United States Patent Application Publication US 2011/0183924 A1 - sequence listing, part 287

SEQ ID NO: 905589 - protein, 649 aa, Homo sapiens; identical to SEQ ID NO: 905583

SEQ ID NO: 905590 - protein, 268 aa, Homo sapiens
MLSAVVASIIESIGDYYACARLSCAPPPPIHAINRGIFVEGLSCVLDGIFGTGNGSTSSSPNIGVLGITKVGSRRVIQCGAALMLALGMIGKFSALFASLPDPVLGALFCTLFGMITAVGLSNLQFIDLNSSRNLFVLGFSIFFGLVLPSYLRQNPLVTGITGIDQVLNVLLTTAMFVGGCVAFILDNTIPGTPEERGIRKWKKGVGKGNKSLDGMESYNLPFGMNIIKKYRCFSYLPISPTFVGYTWKGLRKSDNSRSSDEDSQATG

SEQ ID NO: 905591 - protein, 649 aa, Homo sapiens; identical to SEQ ID NO: 905583

SEQ ID NO: 905592 - protein, 560 aa, Homo sapiens
TREEHLLWYKSCLIAGGPHYLTCFSGTIAVPFLLADAMCVGYDQWATSQLIGTIFFCVGITTLLQTTFGCRLPLFQASAFAFLAPARAILSLDKWKCNTTDVSVANGTAELLHTEHIWYPRIREIQGAIIMSSLIEVVIGLLGLPGALLKYIGPLTITPTVALIGLSGFQAAGERAGKHWGIAMLTIFLVLLFSQYARNVKFPLPIYKSKKGWTAYKLQLFKMFPIILAILVSWLLCFIFTVTDVFPPDSTKYGFYARTDARQGVLLVAPWFKVPYPFQWGLPTVSAAGVIGMLSAVVASIIESIGDYYACARLSCAPPPPIHAINRGIFVEGLSCVLDGIFGTGNGSTSSSPNIGVLGITKVGSRRVIQCGAALMLALGMIGKFSALFASLPDPVLGALFCTLFGMITAVGLSNLQFIDLNSSRNLFVLGFSIFFGLVLPSYLRQNPLVTGITGIDQVLNVLLTTAMFVGGCVAFILDNTIPGTPEERGIRKWKKGVGKGNKSLDGMESYNLPFGMNIIKKYRCFSYLPISPTFVGYTWKGLRKSDNSRSSDEDSQATG

SEQ ID NO: 905593 - protein, 519 aa, Homo sapiens
LWKRLLSCQIVNYLGSSRCRDHGFGLVSFRLPLFQASAFAFLAPARAILSLDKWKCNTTDVSVANGTAELLHTEHIWYPRIREIQGAIIMSSLIEVVIGLLGLPGALLKYIGPLTITPTVALIGLSGFQAAGERAGKHWGIAMLTIFLVLLFSQYARNVKFPLPIYKSKKGWTAYKLQLFKMFPIILAILVSWLLCFIFTVTDVFPPDSTKYGFYARTDARQGVLLVAPWFKVPYPFQWGLPTVSAAGVIGMLSAVVASIIESIGDYYACARLSCAPPPPIHAINRGIFVEGLSCVLDGIFGTGNGSTSSSPNIGVLGITKVGSRRVIQCGAALMLALGMIGKFSALFASLPDPVLGALFCTLFGMITAVGLSNLQFIDLNSSRNLFVLGFSIFFGLVLPSYLRQNPLVTGITGIDQVLNVLLTTAMFVGGCVAFILDNTIPGTPEERGIRKWKKGVGKGNKSLDGMESYNLPFGMNIIKKYRCFSYLPISPTFVGYTWKGLRKSDNSRSSDEDSQATG

SEQ ID NO: 905594 - protein, 649 aa, Homo sapiens; identical to SEQ ID NO: 905583

SEQ ID NO: 905595 - protein, 649 aa, Homo sapiens; identical to SEQ ID NO: 905583

SEQ ID NO: 905596 - protein, 372 aa, Homo sapiens [sequence omitted]

SEQ ID NO: 905597 - protein, 170 aa, Homo sapiens
SSTETLQYSFRCICPEGPHHPSCYSQVNECLSNPCIHGNCTGGLSGYKCLCDAGWVGINCEVDKNECLSNPCQNGGTCDNLVNGYRCTCKKGFKGYNCQVNIDECASNPCLNQGTCFDDISGYTCHCVLPYTGKNCQTVLAPCSPNPCENAAVCKESPNFESLRHTGTEL

SEQ ID NO: 905598 - protein, 2554 aa, Homo sapiens
AGCTPEKVSAKLRAAAEAAAEERRTRGAGSRGICAWASERSARPEPLKQEEGRREWGSSIGTPSPCGSAQAAAAAAEEEATEKMPALRPALLWALLALWLCCAAPAHALQCRDGYEPCVNEGMCVTYHNGTGYCKCPEGFLGEYCQHRDPCEKNRCQNGGTCVAQAMLGKATCRCASGFTGEDCQYSTSHPCFVSRPCLNGGTCHMLSRDTYECTCQVGFTGKECQWTDACLSHPCANGSTCTTVANQFSCKCLTGFTGQKCETDVNECDIPGHCQHGGTCLNLPGSYQCQCPQGFTGQYCDSLYVPCAPSPCVNGGTCRQTGDFTFECNCLPGFEGSTCERNIDDCPNHRCQNGGVCVDGVNTYNCRCPPQWTGQFCTEDVDECLLQPNACQNGGTCANRNGGYGCVCVNGWSGDDCSENIDDCAFASCTPGSTCIDRVASFSCMCPEGKAGLLCHLDDACISNPCHKGALCDTNPLNGQYICTCPQGYKGADCTEDVDECAMANSNPCEHAGKCVNTDGAFHCECLKGYAGPRCEMDINECHSDPCQNDATCLDKIGGFTCLCMPGFKGVHCELEINECQSNPCVNNGQCVDKVNRFQCLCPPGFTGPVCQIDIDDCSSTPCLNGAKCIDHPNGYECQCATGFTGVLCEENIDNCDPDPCHHGQCQDGIDSYTCICNPGYMGAICSDQIDECYSSPCLNDGRCIDLVNGYQCNCQPGTSGVNCEINFDDCASNPCIHGICMDGINRYSCVCSPGFTGQRCNIDIDECASNPCRKGATCINGVNGFRCICPEGPHHPSCYSQVNECLSNPCIHGNCTGGLSGYKCLCDAGWVGINCEVDKNECLSNPCQNGGTCDNLVNGYRCTCKKGFKGYNCQVNIDECASNPCLNQGTCFDDISGYTCHCVLPYTGKNCQTVLAPCSPNPCENAAVCKESPNFESYTCLCAPGWQGQRCTIDIDECISKPCMNHGLCHNTQGSYMCECPPGFSGMDCEEDIDDCLANPCQNGGSCMDGVNTFSCLCLPGFTGDKCQTDMNECLSEPCKNGGTCSDYVNSYTCKCQAGFDGVHCENNINECTESSCFNGGTCVDGINSFSCLCPVGFTGSFCLHEINECSSHPCLNEGTCVDGLGTYRCSCPLGYTGKNCQTLVNLCSRSPCKNKGTCVQKKAESQCLCPSGWAGAYCDVPNVSCDIAASRRGVLVEHLCQHSGVCINAGNTHYCQCPLGYTGSYCEEQLDECASNPCQHGATCSDFIGGYRCECVPGYQGVNCEYEVDECQNQPCQNGGTCIDLVNHFKCSCPPGTRGLLCEENIDDCARGPHCLNGGQCMDRIGGYSCRCLPGFAGERCEGDINECLSNPCSSEGSLDCIQLTNDYLCVCRSAFTGRHCETFVDVCPQMPCLNGGTCAVASNMPDGFICRCPPGFSGARCQSSCGQVKCRKGEQCVHTASGPRCFCPSPRDCESGCASSPCQHGGSCHPQRQPPYYSCQCAPPFSGSRCELYTAPPSTPPATCLSQYCADKARDGVCDEACNSHACQWDGGDCSLTMENPWANCSSPLPCWDYINNQCDELCNTVECLFDNFECQGNSKTCKYDKYCADHFKDNHCDQGCNSEECGWDGLDCAADQPENLAEGTLVIVVLMPPEQLLQDARSFLRALGTLLHTNLRIKRDSQGELMVYPYYGEKSAAMKKQRMTRRSLPGEQEQEVAGSKVFLEIDNRQCVQDSDHCFKNTDAAAALLASHAIQGTLSYPLVSVVSESLTPERTQLLYLLAVAVVIILFIILLGVIMAKRKRKHGSLWLPEGFTLRRDASNHKRREPVGQDAVGLKNLSVQVSEANLIGTGTSEHWVDDEGPQPKKVKAEDEALLSEEDDPIDRRPWTQQHLEAADIRRTPSLALTPPQAEQEVDVLDVNVRGPDGCTPLMLASLRGGSSDLSDEDEDAEDSSANIITDLVYQGASLQAQTDRTGEMALHLAARYSRADAAKRLLDAGADANAQDNMGRCPLHAAVAADAQGVFQILIRNRVTDLDARMNDGTTPLILAARLAVEGMVAELINCQADVNAVDDHGKSALHWAAAVNNVEATLLLLKNGANRDMQDNKEETPLFLAAREGSYEAAKILLDHFANRDITDHMDRLPRDVARDRMHHDIVRLLDEYNVTPSPPGTVLTSALSPVICGPNRSFLSLKHTPMGKKSRRPSAKSTMPTSLPNLAKEAKDAKGSRRKKSLSEKVQLSESSVTLSPVDSLESPHTYVSDTTSSPMITSPGILQASPNPMLATAAPPAPVHAQHALSFSNLHEMQPLAHGASTVLPSVSQLLSHHHIVSPGSGSAGSLSRLHPVPVPADWMNRMEVNETQYNEMFGMVLAPAEGTHPGIAPQSRPPEGKHITTPREPLPPIVTFQLIPKGSIAQPAGAPQPQSTCPPAVAGPLPTMYQIPEMARLPSVAFPTAMMPQQDGQVAQTILPAYHPFPASVGKYPTPPSQHSYASSNAAERTPSHSGHLQGEHPYLTPSPESPDQWSSSSPHSASDWSDVTTSPTPGGAGGGQRGPGTHMSEPPHNNMQVYA

SEQ ID NO: 905599 - protein, 1589 aa, Homo sapiens
MNHGLCHNTQGSYMCECPPGFSGMDCEEDIDDCLANPCQNGGSCMDGVNTFSCLCLPGFTGDKCQTDMNECLSEPCKNGGTCSDYVNSYTCKCQAGFDGVHCENNINECTESSCFNGGTCVDGINSFSCLCPVGFTGSFCLHEINECSSHPCLNEGTCVDGLGTYRCSCPLGYTGKNCQTLVNLCSRSPCKNKGTCVQKKAESQCLCPSGWAGAYCDVPNVSCDIAASRRGVLVEHLCQHSGVCINAGNTHYCQCPLGYTGSYCEEQLDECASNPCQHGATCSDFIGGYRCECVPGYQGVNCEYEVDECQNQPCQNGGTCIDLVNHFKCSCPPGTRGLLCEENIDDCARGPHCLNGGQCMDRIGGYSCRCLPGFAGERCEGDINECLSNPCSSEGSLDCIQLTNDYLCVCRSAFTGRHCETFVDVCPQMPCLNGGTCAVASNMPDGFICRCPPGFSGARCQSSCGQVKCRKGEQCVHTASGPRCFCPSPRDCESGCASSPCQHGGSCHPQRQPPYYSCQCAPPFSGSRCELYTAPPSTPPATCLSQYCADKARDGVCDEACNSHACQWDGGDCSLTMENPWANCSSPLPCWDYINNQCDELCNTVECLFDNFECQGNSKTCKYDKYCADHFKDNHCDQGCNSEECGWDGLDCAADQPENLAEGTLVIVVLMPPEQLLQDARSFLRALGTLLHTNLRIKRDSQGELMVYPYYGEKSAAMKKQRMTRRSLPGEQEQEVAGSKVFLEIDNRQCVQDSDHCFKNTDAAAALLASHAIQGTLSYPLVSVVSESLTPERTQLLYLLAVAVVIILFIILLGVIMAKRKRKHGSLWLPEGFTLRRDASNHKRREPVGQDAVGLKNLSVQVSEANLIGTGTSEHWVDDEGPQPKKVKAEDEALLSEEDDPIDRRPWTQQHLEAADIRRTPSLALTPPQAEQEVDVLDVNVRGPDGCTPLMLASLRGGSSDLSDEDEDAEDSSANIITDLVYQGASLQAQTDRTGEMALHLAARYSRADAAKRLLDAGADANAQDNMGRCPLHAAVAADAQGVFQILIRNRVTDLDARMNDGTTPLILAARLAVEGMVAELINCQADVNAVDDHGKSALHWAAAVNNVEATLLLLKNGANRDMQDNKEETPLFLAAREGSYEAAKILLDHFANRDITDHMDRLPRDVARDRMHHDIVRLLDEYNVTPSPPGTVLTSALSPVICGPNRSFLSLKHTPMGKKSRRPSAKSTMPTSLPNLAKEAKDAKGSRRKKSLSEKVQLSESSVTLSPVDSLESPHTYVSDTTSSPMITSPGILQASPNPMLATAAPPAPVHAQHALSFSNLHEMQPLAHGASTVLPSVSQLLSHHHIVSPGSGSAGSLSRLHPVPVPADWMNRMEVNETQYNEMFGMVLAPAEGTHPGIAPQSRPPEGKHITTPREPLPPIVTFQLIPKGSIAQPAGAPQPQSTCPPAVAGPLPTMYQIPEMARLPSVAFPTAMMPQQDGQVAQTILPAYHPFPASVGKYPTPPSQHSYASSNAAERTPSHSGHLQGEHPYLTPSPESPDQWSSSSPHSASDWSDVTTSPTPGGAGGGQRGPGTHMSEPPHNNMQVYA

SEQ ID NO: 905600 - protein, 1416 aa, Homo sapiens
PLPLFQTLVNLCSRSPCKNKGTCVQKKAESQCLCPSGWAGAYCDVPNVSCDIAASRRGVLVEHLCQHSGVCINAGNTHYCQCPLGYTGSYCEEQLDECASNPCQHGATCSDFIGGYRCECVPGYQGVNCEYEVDECQNQPCQNGGTCIDLVNHFKCSCPPGTRGLLCEENIDDCARGPHCLNGGQCMDRIGGYSCRCLPGFAGERCEGDINECLSNPCSSEGSLDCIQLTNDYLCVCRSAFTGRHCETFVDVCPQMPCLNGGTCAVASNMPDGFICRCPPGFSGARCQSSCGQVKCRKGEQCVHTASGPRCFCPSPRDCESGCASSPCQHGGSCHPQRQPPYYSCQCAPPFSGSRCELYTAPPSTPPATCLSQYCADKARDGVCDEACNSHACQWDGGDCSLTMENPWANCSSPLPCWDYINNQCDELCNTVECLFDNFECQGNSKTCKYDKYCADHFKDNHCDQGCNSEECGWDGLDCAADQPENLAEGTLVIVVLMPPEQLLQDARSFLRALGTLLHTNLRIKRDSQGELMVYPYYGEKSAAMKKQRMTRRSLPGEQEQEVAGSKVFLEIDNRQCVQDSDHCFKNTDAAAALLASHAIQGTLSYPLVSVVSESLTPERTQLLYLLAVAVVIILFIILLGVIMAKRKRKHGSLWLPEGFTLRRDASNHKRREPVGQDAVGLKNLSVQVSEANLIGTGTSEHWVDDEGPQPKKVKAEDEALLSEEDDPIDRRPWTQQHLEAADIRRTPSLALTPPQAEQEVDVLDVNVRGPDGCTPLMLASLRGGSSDLSDEDEDAEDSSANIITDLVYQGASLQAQTDRTGEMALHLAARYSRADAAKRLLDAGADANAQDNMGRCPLHAAVAADAQGVFQILIRNRVTDLDARMNDGTTPLILAARLAVEGMVAELINCQADVNAVDDHGKSALHWAAAVNNVEATLLLLKNGANRDMQDNKEETPLFLAAREGSYEAAKILLDHFANRDITDHMDRLPRDVARDRMHHDIVRLLDEYNVTPSPPGTVLTSALSPVICGPNRSFLSLKHTPMGKKSRRPSAKSTMPTSLPNLAKEAKDAKGSRRKKSLSEKVQLSESSVTLSPVDSLESPHTYVSDTTSSPMITSPGILQASPNPMLATAAPPAPVHAQHALSFSNLHEMQPLAHGASTVLPSVSQLLSHHHIVSPGSGSAGSLSRLHPVPVPADWMNRMEVNETQYNEMFGMVLAPAEGTHPGIAPQSRPPEGKHITTPREPLPPIVTFQLIPKGSIAQPAGAPQPQSTCPPAVAGPLPTMYQIPEMARLPSVAFPTAMMPQQDGQVAQTILPAYHPFPASVGKYPTPPSQHSYASSNAAERTPSHSGHLQGEHPYLTPSPESPDQWSSSSPHSASDWSDVTTSPTPGGAGGGQRGPGTHMSEPPHNNMQVYA

SEQ ID NO: 905601 - protein, 2554 aa, Homo sapiens; identical to SEQ ID NO: 905598

SEQ ID NO: 905602 - protein, 1318 aa, Homo sapiens
AGCTPEKVSAKLRAAAEAAAEERRTRGAGSRGICAWASERSARPEPLKQEEGRREWGSSIGTPSPCGSAQAAAAAAEEEATEKMPALRPALLWALLALWLCCAAPAHALQCRDGYEPCVNEGMCVTYHNGTGYCKCPEGFLGEYCQHRDPCEKNRCQNGGTCVAQAMLGKATCRCASGFTGEDCQYSTSHPCFVSRPCLNGGTCHMLSRDTYECTCQVGFTGKECQWTDACLSHPCANGSTCTTVANQFSCKCLTGFTGQKCETDVNECDIPGHCQHGGTCLNLPGSYQCQCPQGFTGQYCDSLYVPCAPSPCVNGGTCRQTGDFTFECNCLPGFEGSTCERNIDDCPNHRCQNGGVCVDGVNTYNCRCPPQWTGQFCTEDVDECLLQPNACQNGGTCANRNGGYGCVCVNGWSGDDCSENIDDCAFASCTPGSTCIDRVASFSCMCPEGKAGLLCHLDDACISNPCHKGALCDTNPLNGQYICTCPQGYKGADCTEDVDECAMANSNPCEHAGKCVNTDGAFHCECLKGYAGPRCEMDINECHSDPCQNDATCLDKIGGFTCLCMPGFKGVHCELEINECQSNPCVNNGQCVDKVNRFQCLCPPGFTGPVCQIDIDDCSSTPCLNGAKCIDHPNGYECQCATGFTGVLCEENIDNCDPDPCHHGQCQDGIDSYTCICNPGYMGAICSDQIDECYSSPCLNDGRCIDLVNGYQCNCQPGTSGVNCEINFDDCASNPCIHGICMDGINRYSCVCSPGFTGQRCNIDIDECASNPCRKGATCINGVNGFRCICPEGPHHPSCYSQVNECLSNPCIHGNCTGGLSGYKCLCDAGWVGINCEVDKNECLSNPCQNGGTCDNLVNGYRCTCKKGFKGYNCQVNIDECASNPCLNQGTCFDDISGYTCHCVLPYTGKNCQTVLAPCSPNPCENAAVCKESPNFESYTCLCAPGWQGQRCTIDIDECISKPCMNHGLCHNTQGSYMCECPPGFSGMDCEEDIDDCLANPCQNGGSCMDGVNTFSCLCLPGFTGDKCQTDMNECLSEPCKNGGTCSDYVNSYTCKCQAGFDGVHCENNINECTESSCFNGGTCVDGINSFSCLCPVGFTGSFCLHEINECSSHPCLNEGTCVDGLGTYRCSCPLGYTGKNCQTLVNLCSRSPCKNKGTCVQKKAESQCLCPSGWAGAYCDVPNVSCDIAASRRGVLVEHLCQHSGVCINAGNTHYCQCPLGYTGSYCEEQLDECASNPCQHGATCSDFIGGYRCECVPGYQGVNCEYEVDECQNQPCQNGGTCIDLVNHFKCSCPPGTRGMKSSLSIFHPGHCLKL

SEQ ID NO: 905603 - protein, 357 aa, Homo sapiens
AGCTPEKVSAKLRAAAEAAAEERRTRGAGSRGICAWASERSARPEPLKQEEGRREWGSSIGTPSPCGSAQAAAAAAEEEATEKMPALRPALLWALLALWLCCAAPAHALQCRDGYEPCVNEGMCVTYHNGTGYCKCPEGFLGEYCQHRDPCEKNRCQNGGTCVAQAMLGKATCRCASGFTGEDCQYSTSHPCFVSRPCLNGGTCHMLSRDTYECTCQVGFTGKECQWTDACLSHPCANGSTCTTVANQFSCKCLTGFTGQKCETDVNECDIPGHCQHGGTCLNLPGSYQCQCPQGFTGQYCDSLYVPCAPSPCVNGGTCRQTGDFTFECNCLPETVRNKRNRALGKGQASLEWKRTR

SEQ ID NO: 905604 - protein, 141 aa, Homo sapiens
FTGVLCEENIDNCDPDPCHHGQCQDGIDSYTCICNPGYMGAICSDQIDECYSSPCLNDGRCIDLVNGYQCNCQPGTSGKPTLFMFGMGFSLFLKSVYTDVSDCWHMLRYLKNSPDSEKHSQSHKHKCLKANGPSQWRSQRQ

SEQ ID NO: 905605 - protein, 2554 aa, Homo sapiens; identical to SEQ ID NO: 905598

SEQ ID NO: 905606 - protein, 202 aa, Homo sapiens
LTLSPFSTGQRCNIDIDECASNPCRKGATCINGVNGFRCICPEGPHHPSCYSQVNECLSNPCIHGNCTGGLSGYKCLCDAGWVGINCEVDKNECLSNPCQNGGTCDNLVNGYRCTCKKGFKGYNCQVNIDECASNPCLNQGTCFDDISGYTCHCVLPYTGGSWRYQQGPEGILDLALSVPESQCPGLWGCNAPPRAHSSVVL

SEQ ID NO: 905607 - protein, 1777 aa, Homo sapiens
SSTETLQYSFRCICPEGPHHPSCYSQVNECLSNPCIHGNCTGGLSGYKCLCDAGWVGINCEVDKNECLSNPCQNGGTCDNLVNGYRCTCKKGFKGYNCQVNIDECASNPCLNQGTCFDDISGYTCHCVLPYTGKNCQTVLAPCSPNPCENAAVCKESPNFESYTCLCAPGWQGQRCTIDIDECISKPCMNHGLCHNTQGSYMCECPPGFSGMDCEEDIDDCLANPCQNGGSCMDGVNTFSCLCLPGFTGDKCQTDMNECLSEPCKNGGTCSDYVNSYTCKCQAGFDGVHCENNINECTESSCFNGGTCVDGINSFSCLCPVGFTGSFCLHEINECSSHPCLNEGTCVDGLGTYRCSCPLGYTGKNCQTLVNLCSRSPCKNKGTCVQKKAESQCLCPSGWAGAYCDVPNVSCDIAASRRGVLVEHLCQHSGVCINAGNTHYCQCPLGYTGSYCEEQLDECASNPCQHGATCSDFIGGYRCECVPGYQGVNCEYEVDECQNQPCQNGGTCIDLVNHFKCSCPPGTRGLLCEENIDDCARGPHCLNGGQCMDRIGGYSCRCLPGFAGERCEGDINECLSNPCSSEGSLDCIQLTNDYLCVCRSAFTGRHCETFVDVCPQMPCLNGGTCAVASNMPDGFICRCPPGFSGARCQSSCGQVKCRKGEQCVHTASGPRCFCPSPRDCESGCASSPCQHGGSCHPQRQPPYYSCQCAPPFSGSRCELYTAPPSTPPATCLSQYCADKARDGVCDEACNSHACQWDGGDCSLTMENPWANCSSPLPCWDYINNQCDELCNTVECLFDNFECQGNSKTCKYDKYCADHFKDNHCDQGCNSEECGWDGLDCAADQPENLAEGTLVIVVLMPPEQLLQDARSFLRALGTLLHTNLRIKRDSQGELMVYPYYGEKSAAMKKQRMTRRSLPGEQEQEVAGSKVFLEIDNRQCVQDSDHCFKNTDAAAALLASHAIQGTLSYPLVSVVSESLTPERTQLLYLLAVAVVIILFIILLGVIMAKRKRKHGSLWLPEGFTLRRDASNHKRREPVGQDAVGLKNLSVQVSEANLIGTGTSEHWVDDEGPQPKKVKAEDEALLSEEDDPIDRRPWTQQHLEAADIRRTPSLALTPPQAEQEVDVLDVNVRGPDGCTPLMLASLRGGSSDLSDEDEDAEDSSANIITDLVYQGASLQAQTDRTGEMALHLAARYSRADAAKRLLDAGADANAQDNMGRCPLHAAVAADAQGVFQILIRNRVTDLDARMNDGTTPLILAARLAVEGMVAELINCQADVNAVDDHGKSALHWAAAVNNVEATLLLLKNGANRDMQDNKEETPLFLAAREGSYEAAKILLDHFANRDITDHMDRLPRDVARDRMHHDIVRLLDEYNVTPSPPGTVLTSALSPVICGPNRSFLSLKHTPMGKKSRRPSAKSTMPTSLPNLAKEAKDAKGSRRKKSLSEKVQLSESSVTLSPVDSLESPHTYVSDTTSSPMITSPGILQASPNPMLATAAPPAPVHAQHALSFSNLHEMQPLAHGASTVLPSVSQLLSHHHIVSPGSGSAGSLSRLHPVPVPADWMNRMEVNETQYNEMFGMVLAPAEGTHPGIAPQSRPPEGKHITTPREPLPPIVTFQLIPKGSIAQPAGAPQPQSTCPPAVAGPLPTMYQIPEMARLPSVAFPTAMMPQQDGQVAQTILPAYHPFPASVGKYPTPPSQHSYASSNAAERTPSHSGHLQGEHPYLTPSPESPDQWSSSSPHSASDWSDVTTSPTPGGAGGGQRGPGTHMSEPPHNNMQVYA

SEQ ID NO: 905608 - protein, 2554 aa, Homo sapiens; identical to SEQ ID NO: 905598

SEQ ID NO: 905609 - protein, 1505 aa, Homo sapiens
AGCTPEKVSAKLRAAAEAAAEERRTRGAGSRGICAWASERSARPEPLKQEEGRREWGSSIGTPSPCGSAQAAAAAAEEEATEKMPALRPALLWALLALWLCCAAPAHALQCRDGYEPCVNEGMCVTYHNGTGYCKCPEGFLGEYCQHRDPCEKNRCQNGGTCVAQAMLGKATCRCASGFTGEDCQYSTSHPCFVSRPCLNGGTCHMLSRDTYECTCQVGFTGKECQWTDACLSHPCANGSTCTTVANQFSCKCLTGFTGQKCETDVNECDIPGHCQHGGTCLNLPGSYQCQCPQGFTGQYCDSLYVPCAPSPCVNGGTCRQTGDFTFECNCLPGFEGSTCERNIDDCPNHRCQNGGVCVDGVNTYNCRCPPQWTGQFCTEDVDECLLQPNACQNGGTCANRNGGYGCVCVNGWSGDDCSENIDDCAFASCTPGSTCIDRVASFSCMCPEGKAGLLCHLDDACISNPCHKGALCDTNPLNGQYICTCPQGYKGADCTEDVDECAMANSNPCEHAGKCVNTDGAFHCECLKGYAGPRCEMDINECHSDPCQNDATCLDKIGGFTCLCMPGFKGVHCELEINECQSNPCVNNGQCVDKVNRFQCLCPPGFTGPVCQIDIDDCSSTPCLNGAKCIDHPNGYECQCATGFTGVLCEENIDNCDPDPCHHGQCQDGIDSYTCICNPGYMGAICSDQIDECYSSPCLNDGRCIDLVNGYQCNCQPGTSGVNCEINFDDCASNPCIHGICMDGINRYSCVCSPGFTGQRCNIDIDECASNPCRKGATCINGVNGFRCICPEGPHHPSCYSQVNECLSNPCIHGNCTGGLSGYKCLCDAGWVGINCEVDKNECLSNPCQNGGTCDNLVNGYRCTCKKGFKGYNCQVNIDECASNPCLNQGTCFDDISGYTCHCVLPYTGKNCQTVLAPCSPNPCENAAVCKESPNFESYTCLCAPGWQGQRCTIDIDECISKPCMNHGLCHNTQGSYMCECPPGFSGMDCEEDIDDCLANPCQNGGSCMDGVNTFSCLCLPGFTGDKCQTDMNECLSEPCKNGGTCSDYVNSYTCKCQAGFDGVHCENNINECTESSCFNGGTCVDGINSFSCLCPVGFTGSFCLHEINECSSHPCLNEGTCVDGLGTYRCSCPLGYTGKNCQTLVNLCSRSPCKNKGTCVQKKAESQCLCPSGWAGAYCDVPNVSCDIAASRRGVLVEHLCQHSGVCINAGNTHYCQCPLGYTGSYCEEQLDECASNPCQHGATCSDFIGGYRCECVPGYQGVNCEYEVDECQNQPCQNGGTCIDLVNHFKCSCPPGTRGLLCEENIDDCARGPHCLNGGQCMDRIGGYSCRCLPGFAGERCEGDINECLSNPCSSEGSLDCIQLTNDYLCVCRSAFTGRHCETFVDVCPQMPCLNGGTCAVASNMPDGFICRCPPGFSGARCQSSCGQVKCRKGEQCVHTASGPRCFCPSPRDCESGCASSPCQHSACQHPCRVLLDARDSRAVDSLQRCSPETSECPSHKN

SEQ ID NO: 905610 - protein, 926 aa, Homo sapiens
AGCTPEKVSAKLRAAAEAAAEERRTRGAGSRGICAWASERSARPEPLKQEEGRREWGSSIGTPSPCGSAQAAAAAAEEEATEKMPALRPALLWALLALWLCCAAPAHALQCRDGYEPCVNEGMCVTYHNGTGYCKCPEGFLGEYCQHRDPCEKNRCQNGGTCVAQAMLGKATCRCASGFTGEDCQYSTSHPCFVSRPCLNGGTCHMLSRDTYECTCQVGFTGKECQWTDACLSHPCANGSTCTTVANQFSCKCLTGFTGQKCETDVNECDIPGHCQHGGTCLNLPGSYQCQCPQGFTGQYCDSLYVPCAPSPCVNGGTCRQTGDFTFECNCLPGFEGSTCERNIDDCPNHRCQNGGVCVDGVNTYNCRCPPQWTGQFCTEDVDECLLQPNACQNGGTCANRNGGYGCVCVNGWSGDDCSENIDDCAFASCTPGSTCIDRVASFSCMCPEGKAGLLCHLDDACISNPCHKGALCDTNPLNGQYICTCPQGYKGADCTEDVDECAMANSNPCEHAGKCVNTDGAFHCECLKGYAGPRCEMDINECHSDPCQNDATCLDKIGGFTCLCMPGFKGVHCELEINECQSNPCVNNGQCVDKVNRFQCLCPPGFTGPVCQIDIDDCSSTPCLNGAKCIDHPNGYECQCATGFTGVLCEENIDNCDPDPCHHGQCQDGIDSYTCICNPGYMGAICSDQIDECYSSPCLNDGRCIDLVNGYQCNCQPGTSGVNCEINFDDCASNPCIHGICMDGINRYSCVCSPGFTGQRCNIDIDECASNPCRKGATCINGVNGFRCICPEGPHHPSCYSQVNECLSNPCIHGNCTGGLSGYKCLCDAGWVGINCEVDKNECLSNPCQNGGTCDNLVNGYRCTCKKGFKGYNCQVNIDECASNPCLNQGTCFDDISGYTCHCVLPYTVPLHLTQRCHPFDGCYN

SEQ ID NO: 905611 - protein, 35 aa, Homo sapiens
MNHGLCHNTQGSYMCECPPGFSGMDCEEDIDDCLA

SEQ ID NO: 905612 - protein, 1267 aa, Homo sapiens
SRGWTELAGGALPASAAASFQDPDGGFALPPPPRGSRGAGSPARGARGRGHGTAPDPVTAGSQAARALSASSPGGLALLLAGPGLLLRLLALLLAVAAARIMSGRRCAGGGAACASAAAEAVEPAARELFEACRNGDVERVKRLVTPEKVNSRDTAGRKSTPLHFAAGFGRKDVVEYLLQNGANVQARDDGGLIPLHNACSFGHAEVVNLLLRHGADPNARDNWNYTPLHEAAIKGKIDVCIVLLQHGAEPTIRNTDGRTALDLADPSAKAVLTGEYKKDELLESARSGNEEKMMALLTPLNVNCHASDGRKSTPLHLAAGYNRVKIVQLLLQHGADVHAKDKGDLVPLHNACSYGHYEVTELLVKHGACVNAMDLWQFTPLHEAASKNRVEVCSLLLSYGADPTLLNCHNKSAIDLAPTPQLKERLAYEFKGHSLLQAAREADVTRIKKHLSLEMVNFKHPQTHETALHCAAASPYPKRKQICELLLRKGANINEKTKEFLTPLHVASEKAHNDVVEVVVKHEAKVNALDNLGQTSLHRAAYCGHLQTCRLLLSYGCDPNIISLQGFTALQMGNENVQQLLQEGISLGNSEADRQLLEAAKAGDVETVKKLCTVQSVNCRDIEGRQSTPLHFAAGYNRVSVVEYLLQHGADVHAKDKGGLVPLHNACSYGHYEVAELLVKHGAVVNVADLWKFTPLHEAAAKGKYEICKLLLQHGADPTKKNRDGNTPLDLVKDGDTDIQDLLRGDAALLDAAKKGCLARVKKLSSPDNVNCRDTQGRHSTPLHLAAGYNNLEVAEYLLQHGADVNAQDKGGLIPLHNAASYGHVDVAALLIKYNACVNATDKWAFTPLHEAAQKGRTQLCALLLAHGADPTLKNQEGQTPLDLVSADDVSALLTAAMPPSALPSCYKPQVLNGVRSPGATADALSSGPSSPSSLSAASSLDNLSGSFSELSSVVSSSGTEGASSLEKKEVPGVDFSITQFVRNLGLEHLMDIFEREQITLDVLVEMGHKELKEIGINAYGHRHKLIKGVERLISGQQGLNPYLTLNTSGSGTILIDLSPDDKEFQSVEEEMQSTVREHRDGGHAGGIFNRYNILKIQKVCNKKLWERYTHRRKEVSEENHNHANERMLFHGSPFVNAIIHKGFDERHAYIGGMFGAGIYFAENSSKSNQYVYGIGGGTGCPVHKDRSCYICHRQLLFCRVTLGKSFLQFSAMKMAHSPPGHHSVTGRPSVNGLALAEYVIYRGEQAYPEYLITYQIMRPEGMVDG

SEQ ID NO: 905613 - protein, 1267 aa, Homo sapiens; identical to SEQ ID NO: 905612

SEQ ID NO: 905614 - protein, 369 aa, Homo sapiens [sequence omitted]

SEQ ID NO: 905615 - protein, 693 aa, Homo sapiens
VLEDPSSQQEGISLGNSEADRQLLEAAKAGDVETVKKLCTVQSVNCRDIEGRQSTPLHFAAGYNRVSVVEYLLQHGADVHAKDKGGLVPLHNACSYGHYEVAELLVKHGAVVNVADLWKFTPLHEAAAKGKYEICKLLLQHGADPTKKNRDGNTPLDLVKDGDTDIQDLLRGDAALLDAAKKGCLARVKKLSSPDNVNCRDTQGRHSTPLHLAAGYNNLEVAEYLLQHGADVNAQDKGGLIPLHNAASYGHVDVAALLIKYNACVNATDKWAFTPLHEAAQKGRTQLCALLLAHGADPTLKNQEGQTPLDLVSADDVSALLTAAMPPSALPSCYKPQVLNGVRSPGATADALSSGPSSPSSLSAASSLDNLSGSFSELSSVVSSSGTEGASSLEKKEVPGVDFSITQFVRNLGLEHLMDIFEREQITLDVLVEMGHKELKEIGINAYGHRHKLIKGVERLISGQQGLNPYLTLNTSGSGTILIDLSPDDKEFQSVEEEMQSTVREHRDGGHAGGIFNRYNILKIQKVCNKKLWERYTHRRKEVSEENHNHANERMLFHGSPFVNAIIHKGFDERHAYIGGMFGAGIYFAENSSKSNQYVYGIGGGTGCPVHKDRSCYICHRQLLFCRVTLGKSFLQFSAMKMAHSPPGHHSVTGRPSVNGLALAEYVIYRGEQAYPEYLITYQIMRPEGMVDG

SEQ ID NO: 905616 - protein, 354 aa, Homo sapiens
MPPSALPSCYKPQVLNGVRSPGATADALSSGPSSPSSLSAASSLDNLSGSFSELSSVVSSSGTEGASSLEKKEGLEHLMDIFEREQITLDVLVEMGHKELKEIGINAYGHRHKLIKGVERLISGQQGLNPYLTLNTSGSGTILIDLSPDDKEFQSVEEEMQSTVREHRDGGHAGGIFNRYNILKIQKVCNKKLWERYTHRRKEVSEENHNHANERMLFHGSPFVNAIIHKGFDERHAYIGGMFGAGIYFAENSSKSNQYVYGIGGGTGCPVHKDRSCYICHRQLLFCRVTLGKSFLQFSAMKMAHSPPGHHSVTGRPSVNGLALAEYVIYRGEQAYPEYLITYQIMRPEGMVDG

SEQ ID NO: 905617 - protein, 789 aa, Homo sapiens
SRGWTELAGGALPASAAASFQDPDGGFALPPPPRGSRGAGSPARGARGRGHGTAPDPVTAGSQAARALSASSPGGLALLLAGPGLLLRLLALLLAVAAARIMSGRRCAGGGAACASAAAEAVEPAARELFEACRNGDVERVKRLVTPEKVNSRDTAGRKSTPLHFAAGFGRKDVVEYLLQNGANVQARDDGGLIPLHNACSFGHAEVVNLLLRHGADPNARDNWNYTPLHEAAIKGKIDVCIVLLQHGAEPTIRNTDGRTALDLADPSAKAVLTGEYKKDELLESARSGNEEKMMALLTPLNVNCHASDGRKSTPLHLAAGYNRVKIVQLLLQHGADVHAKDKGDLVPLHNACSYGHYEVTELLVKHGACVNAMDLWQFTPLHEAASKNRVEVCSLLLSYGADPTLLNCHNKSAIDLAPTPQLKERLAYEFKGHSLLQAAREADVTRIKKHLSLEMVNFKHPQTHETALHCAAASPYPKRKQICELLLRKGANINEKTKEFLTPLHVASEKAHNDVVEVVVKHEAKVNALDNLGQTSLHRAAYCGHLQTCRLLLSYGCDPNIISLQGFTALQMGNENVQQLLQEGISLGNSEADRQLLEAAKAGDVETVKKLCTVQSVNCRDIEGRQSTPLHFAAGYNRVSVVEYLLQHGADVHAKDKGGLVPLHNACSYGHYEVAELLVKHGAVVNVADLWKFTPLHEAAAKGKYEICKLLLQHGADPTKKNRDGNTPLDLVKDGDTDIQDLLRGDAALLDAAKKGCLARVKKLSSPDNVNCRDTQGRHSTPLHLAGK

SEQ ID NO: 905618 - protein, 293 aa, Homo sapiens
SRGWTELAGGALPASAAASFQDPDGGFALPPPPRGSRGAGSPARGARGRGHGTAPDPVTAGSQAARALSASSPGGLALLLAGPGLLLRLLALLLAVAAARIMSGRRCAGGGAACASAAAEAVEPAARELFEACRNGDVERVKRLVTPEKVNSRDTAGRKSTPLHFAAGFGRKDVVEYLLQNGANVQARDDGGLIPLHNACSFGHAEVVNLLLRHGADPNARDNWNYTPLHEAAIKGKIDVCIVLLQHGAEPTIRNTDGRTALDLADPSAKAVLTGKSVYSGYSRKPVKNNLAR

SEQ ID NO: 905619 - protein, 1267 aa, Homo sapiens; identical to SEQ ID NO: 905612

SEQ ID NO: 905620 - protein, 1267 aa, Homo sapiens; identical to SEQ ID NO: 905612

SEQ ID NO: 905621 - protein, 369 aa, Homo sapiens [sequence omitted]

SEQ ID NO: 905622 - protein, 1249 aa, Homo sapiens
SRGWTELAGGALPASAAASFQDPDGGFALPPPPRGSRGAGSPARGARGRGHGTAPDPVTAGSQAARALSASSPGGLALLLAGPGLLLRLLALLLAVAAARIMSGRRCAGGGAACASAAAEAVEPAARELFEACRNGDVERVKRLVTPEKVNSRDTAGRKSTPLHFAAGFGRKDVVEYLLQNGANVQARDDGGLIPLHNACSFGHAEVVNLLLRHGADPNARDNWNYTPLHEAAIKGKIDVCIVLLQHGAEPTIRNTDGRTALDLADPSAKAVLTGEYKKDELLESARSGNEEKMMALLTPLNVNCHASDGRKSTPLHLAAGYNRVKIVQLLLQHGADVHAKDKGDLVPLHNACSYGHYEVTELLVKHGACVNAMDLWQFTPLHEAASKNRVEVCSLLLSYGADPTLLNCHNKSAIDLAPTPQLKERLAYEFKGHSLLQAAREADVTRIKKHLSLEMVNFKHPQTHETALHCAAASPYPKRKQICELLLRKGANINEKTKEFLTPLHVASEKAHNDVVEVVVKHEAKVNALDNLGQTSLHRAAYCGHLQTCRLLLSYGCDPNIISLQGFTALQMGNENVQQLLQEGISLGNSEADRQLLEAAKAGDVETVKKLCTVQSVNCRDIEGRQSTPLHFAAGYNRVSVVEYLLQHGADVHAKDKGGLVPLHNACSYGHYEVAELLVKHGAVVNVADLWKFTPLHEAAAKGKYEICKLLLQHGADPTKKNRDGNTPLDLVKDGDTDIQDLLRGDAALLDAAKKGCLARVKKLSSPDNVNCRDTQGRHSTPLHLAAGYNNLEVAEYLLQHGADVNAQDKGGLIPLHNAASYGHVDVAALLIKYNACVNATDKWAFTPLHEAAQKGRTQLCALLLAHGADPTLKNQEGQTPLDLVSADDVSALLTAAMPPSALPSCYKPQVLNGVRSPGATADALSSGPSSPSSLSAASSLDNLSGSFSELSSVVSSSGTEGASSLEKKEVPGVDFSITQFVRNLGLEHLMDIFEREQITLDVLVEMGHKELKEIGINAYGHRHKLIKGVERLISGQQGLNPYLTLNTSGSGTILIDLSPDDKEFQSVEEEMQSTVREHRDGGHAGGIFNRYNILKIQKVCNKKLWERYTHRRKEVSEENHNHANERMLFHGSPFVNAIIHKGFDERHAYIGGMFGAGIYFAENSSKSNQYVYGIGGGTGCPVHKDRSCYICHRQLLFCRVTLGKSFLQFSAMKMAHSPPGHHSVTGRPSVNGLALAEYVIYRGEQVM

SEQ ID NO: 905623 - protein, 789 aa, Homo sapiens
SRGWTELAGGALPASAAASFQDPDGGFALPPPPRGSRGAGSPARGARGRGHGTAPDPVTAGSQAARALSASSPGGLALLLAGPGLLLRLLALLLAVAAARIMSGRRCAGGGAACASAAAEAVEPAARELFEACRNGDVERVKRLVTPEKVNSRDTAGRKSTPLHFAAGFGRKDVVEYLLQNGANVQARDDGGLIPLHNACSFGHAEVVNLLLRHGADPNARDNWNYTPLHEAAIKGKIDVCIVLLQHGAEPTIRNTDGRTALDLADPSAKAVLTGEYKKDELLESARSGNEEKMMALLTPLNVNCHASDGRKSTPLHLAAGYNRVKIVQLLLQHGADVHAKDKGDLVPLHNACSYGHYEVTELLVKHGACVNAMDLWQFTPLHEAASKNRVEVCSLLLSYGADPTLLNCHNKSAIDLAPTPQLKERLAYEFKGHSLLQAAREADVTRIKKHLSLEMVNFKHPQTHETALHCAAASPYPKRKQICELLLRKGANINEKTKEFLTPLHVASEKAHNDVVEVVVKHEAKVNALDNLGQTSLHRAAYCGHLQTCRLLLSYGCDPNIISLQGFTALQMGNENVQQLLQEGISLGNSEADRQLLEAAKAGDVETVKKLCTVQSVNCRDIEGRQSTPLHFAAGYNRVSVVEYLLQHGADVHAKDKGGLVPLHNACSYGHYEVAELLVKHGAVVNVADLWKFTPLHEAAAKGKYEICKLLLQHGADPTKKNRDGNTPLDLVKDGDTDIQDLLRGDAALLDAAKKGFDDRHQTLGLIGKLPGFRVSMTVIKPSIKLRC

SEQ ID NO: 905624 - protein, 508 aa, Homo sapiens
MQRLLTPVKRILQLTRAVQETSLTPARLLPVAHQRFSTASAVPLAKTDTWPKDVGILALEVYFPAQYVDQTDLEKYNNVEAGKYTVGLGQTRMGFCSVQEDINSLCLTVVQRLMERIQLPWDSVGRLEVGTETIIDKSKAVKTVLMELFQDSGNTDIEGIDTTNACYGGTASLFNAANWMESSSWDGRYAMVVCGDIAVYPSGNARPTGGAGAVAMLIGPKAPLALERGLRGTHMENVYDFYKPNLASEYPIVDGKLSIQCYLRALDRCYTSYRKKIQNQWKQAGSDRPFTLDDLQYMIFHTPFCKMVQKSLARLMFNDFLSASSDTQTSLYKGLEAFGGLKLEDTYTNKDLDKALLKASQDMFDKKTKASLYLSTHNGNMYTSSLYGCLASLLSHHSAQELAGSRIGAFSYGSGLAASFFSFRVSQDAAPGSPLDKLVSSTSDLPKRLASRKCVSPEEFTEIMNQREQFYHKVNFSPPGDTNSLFPGTWYLERVDEQHRRKYARRPV

SEQ ID NO: 905625 - protein, 490 aa, Homo sapiens
MQRLLTPVKRILQLTRAVQETSLTPARLLPVAHQRFSTASAVPLAKTDTWPKDVGILALEVYFPAQYVDQTDLEKYNNVEAGKYTVGLGQTRMGFCSVQEDINSLCLTVVQRLMERIQLPWDSVGRLEVGTETIIDKSKAVKTVLMELFQDSGNTDIEGIDTTNACYGGTASLFNAANWMESSSWDGRYAMVVCGDIAVYPSGNARPTGGAGAVAMLIGPKAPLALERGLRGTHMENVYDFYKPNLASEYPIVDGKLSIQCYLRALDRCYTSYRKDLQYMIFHTPFCKMVQKSLARLMFNDFLSASSDTQTSLYKGLEAFGGLKLEDTYTNKDLDKALLKASQDMFDKKTKASLYLSTHNGNMYTSSLYGCLASLLSHHSAQELAGSRIGAFSYGSGLAASFFSFRVSQDAAPGSPLDKLVSSTSDLPKRLASRKCVSPEEFTEIMNQREQFYHKVNFSPPGDTNSLFPGTWYLERVDEQHRRKYARRPV

SEQ ID NO: 905626 - protein, 490 aa, Homo sapiens
MQRLLTPVKRILQLTRAVQETSLTPARLLPVAHQRFSTASAVPLAKTDTWPKDVGILALEVYFPAQYVDQTDLEKYNNVEAGKYTVGLGQTRMGFCSVQEDINSLCLTVVQRLMERIQLPWDSVGRLEVGTETIIDKSKAGIDTTNACYGGTASLFNAANWMESSSWDGRYAMVVCGDIAVYPSGNARPTGGAGAVAMLIGPKAPLALERGLRGTHMENVYDFYKPNLASEYPIVDGKLSIQCYLRALDRCYTSYRKKIQNQWKQAGSDRPFTLDDLQYMIFHTPFCKMVQKSLARLMFNDFLSASSDTQTSLYKGLEAFGGLKLEDTYTNKDLDKALLKASQDMFDKKTKASLYLSTHNGNMYTSSLYGCLASLLSHHSAQELAGSRIGAFSYGSGLAASFFSFRVSQDAAPGSPLDKLVSSTSDLPKRLASRKCVSPEEFTEIMNQREQFYHKVNFSPPGDTNSLFPGTWYLERVDEQHRRKYARRPV

SEQ ID NO: 905627 - protein, 508 aa, Homo sapiens; identical to SEQ ID NO: 905624

SEQ ID NO: 905628 - protein, 490 aa, Homo sapiens
MQRLLTPVKRILQLTRAVQETSLTPARLLPVAHQRFSTASAVPLAKTDTWPKDVGILALEVYFPAQYVDQTDLEKYNNVEAGKYTVGLGQTRMGFCSVQEDINSLCLTVVQRLMERIQLPWDSVGRLEVGTETIIDKSKAVKTVLMELFQDSGNTDIEGIDTTNACYGGTASLFNAANWMESSSWDGRYAMVVCGDIAVYPSGNARPTGGAGAVAMLIGPKAPLALERGLRGTHMENVYDFYKPNLASEYPIVDGKLSIQCYLRALDRCYTSYRKKIQNQWKQAGSDRPFTLDDLQYMIFHTPFCKMVQKSLARLMFNDFLSASSDTQTSLYKGLEAFGGLKLEDTYTNKDLDKALLKASQDMFDKKTKASLYLSTHNGNMYTSSLYGCLASLLSHHSAQELAGSRIGAFSYGSGLAASFFSFRVSQDAAPGSPLDKLVSSTSDLPNQREQFYHKVNFSPPGDTNSLFPGTWYLERVDEQHRRKYARRPV

SEQ ID NO: 905629 - protein, 318 aa, Homo sapiens
MVVCGDIAVYPSGNARPTGGAGAVAMLIGPKAPLALERGLRGTHMENVYDFYKPNLASEYPIVDGKLSIQCYLRALDRCYTSYRKKIQNQWKQAGSDRPFTLDDLQYMIFHTPFCKMVQKSLARLMFNDFLSASSDTQTSLYKGLEAFGGLKLEDTYTNKDLDKALLKASQDMFDKKTKASLYLSTHNGNMYTSSLYGCLASLLSHHSAQELAGSRIGAFSYGSGLAASFFSFRVSQDAAPGSPLDKLVSSTSDLPKRLASRKCVSPEEFTEIMNQREQFYHKVNFSPPGDTNSLFPGTWYLERVDEQHRRKYARRPV

SEQ ID NO: 905630 - protein, 508 aa, Homo sapiens; identical to SEQ ID NO: 905624

SEQ ID NO: 905631 - protein, 365 aa, Homo sapiens
MQRLLTPVKRILQLTRAVQETSLTPARLLPVAHQRFSTASAVPLAKTDTWPKDVGILALEVYFPAQYVDQTDLEKYNNVEAGKYTVGLGQTRMGFCSVQEDINSLCLTVVQRLMERIQLPWDSVGRLEVGTETIIDKSKAVKTVLMELFQDSGNTDIEGIDTTNACYGGTASLFNAANWMESSSWDGRYAMVVCGDIAVYPSGNARPTGGAGAVAMLIGPKAPLALERGLRGTHMENVYDFYKPNLASEYPIVDGKLSIQCYLRALDRCYTSYRKKIQNQWKQAGSDRPFTLDDLQYMIFHTPFCKMVQKSLARLMFNELPFTSPLTMGTCTPHPCTGAWPRFCPTTLPKNWLAPGLVPSLMALV

SEQ ID NO: 905632 - protein, 196 aa, Homo sapiens
MQRLLTPVKRILQLTRAVQETSLTPARLLPVAHQRFSTASAVPLAKTDTWPKDVGILALEVYFPAQYVDQTDLEKYNNVEAGKYTVGLGQTRMGFCSVQEDINSLCLTVVQRLMERIQLPWDSVGRLEVGTETIIDKSKAGIDTTNACYGGTASLFNAANWMESSSWDGMYGHEPYVRVLELEADITSFAFVPRGF

SEQ ID NO: 905633 - protein, 51 aa, Homo sapiens
MAILQQNRNNPRSFHGVVGYCLGRALHELLQGNMGDLAALQDQGAVRNYRG

SEQ ID NO: 905634 - protein, 490 aa, Homo sapiens
MQRLLTPVKRILQLTRAVQETSLTPARLLPVAHQRFSTASAVPLAPAQYVDQTDLEKYNNVEAGKYTVGLGQTRMGFCSVQEDINSLCLTVVQRLMERIQLPWDSVGRLEVGTETIIDKSKAVKTVLMELFQDSGNTDIEGIDTTNACYGGTASLFNAANWMESSSWDGRYAMVVCGDIAVYPSGNARPTGGAGAVAMLIGPKAPLALERGLRGTHMENVYDFYKPNLASEYPIVDGKLSIQCYLRALDRCYTSYRKKIQNQWKQAGSDRPFTLDDLQYMIFHTPFCKMVQKSLARLMFNDFLSASSDTQTSLYKGLEAFGGLKLEDTYTNKDLDKALLKASQDMFDKKTKASLYLSTHNGNMYTSSLYGCLASLLSHHSAQELAGSRIGAFSYGSGLAASFFSFRVSQDAAPGSPLDKLVSSTSDLPKRLASRKCVSPEEFTEIMNQREQFYHKVNFSPPGDTNSLFPGTWYLERVDEQHRRKYARRPV

SEQ ID NO: 905635 - protein, 256 aa, Homo sapiens
MQRLLTPVKRILQLTRAVQETSLTPARLLPVAHQRFSTASAVPLAKTDTWPKDVGILALEVYFPAQYVDQTDLEKYNNVEAGKYTVGLGQTRMGFCSVQEDINSLCLTVVQRLMERIQLPWDSVGRLEVGTETIIDKSKAVKTVLMELFQDSGNTDIEGIDTTNACYGGTASLFNAANWMESSSWDGRYAMVVCGDIAVYPSGNARPTGGAGAVAMLIGPKAPLALERGLRGTHMENVYDFYKPIAGLGSMLHIIP

SEQ ID NO: 905636 - protein, 453 aa, Homo sapiens
MQRLLTPVKRILQLTRAVQETSLTPARLLPVAHQRFSTASAVPLAKTDTWPKDVGILALEVYFPAQYVDQTDLEKYNNVEAGKYTVGLGQTRMGFCSVQEDINSLCLTVVQRLMERIQLPWDSVGRLEVGTETIIDKSKAVKTVLMELFQDSGNTDIEGIDTTNACYGGTASLFNAANWMESSSWDGRYAMVVCGDIAVYPSGNARPTGGAGAVAMLIGPKAPLALERAGSDRPFTLDDLQYMIFHTPFCKMVQKSLARLMFNDFLSASSDTQTSLYKGLEAFGGLKLEDTYTNKDLDKALLKASQDMFDKKTKASLYLSTHNGNMYTSSLYGCLASLLSHHSAQELAGSRIGAFSYGSGLAASFFSFRVSQDAAPGSPLDKLVSSTSDLPKRLASRKCVSPEEFTEIMNQREQFYHKVNFSPPGDTNSLFPGTWYLERVDEQHRRKYARRPV

SEQ ID NO: 905637 - protein, 274 aa, Homo sapiens [sequence omitted]

SEQ ID NO: 905638 - protein, 448 aa, Homo sapiens
MQRLLTPVKRILQLTRAVQETSLTPARLLPVAHQRFSTASAVPLAKTDTWPKDVGILALEVYFPAQYVDQTDLEKYNNVEAGKYTVGLGQTRMGFCSVQEDINSLCLTVVQRLMERIQLPWDSVGRLEVGTETIIDKSKAVKTVLMELFQDSGNTDIEGIDTTNACYGGTASLFNAANWMESSSWDGRYAMVVCGDIAVYPSGNARPTGGAGAVAMLIGPKAPLALERGLRGTHMENVYDFYKPNLASEYPIVDGKLSIQCYLRALDRCYTSYRKKIQNQWKQAGSDRPFTLDDLQYMIFHTPFCKMVQKSLARLMFNDFLSASSDTQTSLYKGLEAFGGLKLEDTYTNKDLDKALLKASQDMFDKKTKASLYLSTHNGNMYTSSLYGCLASLLSHHSAQELAGSRIGAFSYGSGLAASFFSFRAKVCPASRLKVFCRSMESFLGNVC

SEQ ID NO: 905639 - protein, 297 aa, Homo sapiens
MQRLLTPVKRILQLTRAVQETSLTPARLLPVAHQRFSTASAVPLAKTDTWPKDVGILALEVYFPAQYVDQTDLEKYNNVEAGKYTVGLGQTRMGFCSVQEDINSLCLTVVQRLMERIQLPWDSVGRLEVGTETIIDKSKAVKTVLMELFQDSGNTDIEGIDTTNACYGGTASLFNAANWMESSSWDGRYAMVVCGDIAVYPSGNARPTGGAGAVAMLIGPKAPLALERGLRGTHMENVYDFYKPNLASEYPIVDGKLSIQCYLRALDRCYTSYRKKIQNQWKQGMRFRGQKVGALFT

SEQ ID NO: 905640 - protein, 214 aa, Homo sapiens
MQRLLTPVKRILQLTRAVQETSLTPARLLPVAHQRFSTASAVPLAKTDTWPKDVGILALEVYFPAQYVDQTDLEKYNNVEAGKYTVGLGQTRMGFCSVQEDINSLCLTVVQRLMERIQLPWDSVGRLEVGTETIIDKSKAVKTVLMELFQDSGNTDIEGIDTTNACYGGTASLFNAANWMESSSWDGMYGHEPYVRVLELEADITSFAFVPRGF

SEQ ID NO: 905641 - protein, 713 aa, Homo sapiens
MQPRTPLVLCVLLSQVLLLTSAEDLDCTPGFQQKVFHINQPAEFIEDQSILNLTFSDCKGNDKLRYEVSSPYFKVNSDGGLVALRNITAVGKTLFVHARTPHAEDMAELVIVGGKDIQGSLQDIFKFARTSPVPRQKRSIVVSPILIPENQRQPFPRDVGKVVDSDRPERSKFRLTGKGVDQEPKGIFRINENTGSVSVTRTLDREVIAVYQLFVETTDVNGKTLEGPVPLEVIVIDQNDNRPIFREGPYIGHVMEGSPTGTTVMRMTAFDADDPATDNALLRYNIRQQTPDKPSPNMFYIDPEKGDIVTVVSPALLDRETLENPKYELIIEAQDMAGLDVGLTGTATATIMIDDKNDHSPKFTKKEFQATVEEGAVGVIVNLTVEDKDDPTTGAWRAAYTIINGNPGQSFEIHTNPQTNEGMLSVVKPLDYEISAFHTLLIKVENEDPLVPDVSYGPSSTATVHITVLDVNEGPVFYPDPMMVTRQEDLSVGSVLLTVNATDPDSLQHQTIRYSVYKDPAGWLNINPINGTVDTTAVLDRESPFVDNSVYTALFLAIDSGNPPATGTGTLLITLEDVNDNAPFIYPTVAEVCDDAKNLSVVILGASDKDLHPNTDPFKFEIHKQAVPDKVWKISKINNTHALVSLLQNLNKANYNLPIMVTDSGKPPMTNITDLRVQVCSCRNSKVDCNAAGALRFSLPSVLLLSLFSLACL

SEQ ID NO: 905642 - protein, 713 aa, Homo sapiens; identical to SEQ ID NO: 905641

SEQ ID NO: 905643 - protein, 713 aa, Homo sapiens; identical to SEQ ID NO: 905641

SEQ ID NO: 905644 - protein, 685 aa, Homo sapiens
AELPTRASDQHRITSRRVGVIPDSVTFSDCKGNDKLRYEVSSPYFKVNSDGGLVALRNITAVGKTLFVHARTPHAEDMAELVIVGGKDIQGSLQDIFKFARTSPVPRQKRSIVVSPILIPENQRQPFPRDVGKVVDSDRPERSKFRLTGKGVDQEPKGIFRINENTGSVSVTRTLDREVIAVYQLFVETTDVNGKTLEGPVPLEVIVIDQNDNRPIFREGPYIGHVMEGSPTGTTVMRMTAFDADDPATDNALLRYNIRQQTPDKPSPNMFYIDPEKGDIVTVVSPALLDRETLENPKYELIIEAQDMAGLDVGLTGTATATIMIDDKNDHSPKFTKKEFQATVEEGAVGVIVNLTVEDKDDPTTGAWRAAYTIINGNPGQSFEIHTNPQTNEGMLSVVKPLDYEISAFHTLLIKVENEDPLVPDVSYGPSSTATVHITVLDVNEGPVFYPDPMMVTRQEDLSVGSVLLTVNATDPDSLQHQTIRYSVYKDPAGWLNINPINGTVDTTAVLDRESPFVDNSVYTALFLAIDSGNPPATGTGTLLITLEDVNDNAPFIYPTVAEVCDDAKNLSVVILGASDKDLHPNTDPFKFEIHKQAVPDKVWKISKINNTHALVSLLQNLNKANYNLPIMVTDSGKPPMTNITDLRVQVCSCRNSKVDCNAAGALRFSLPSVLLLSLFSLACL

SEQ ID NO: 905645 - protein, 713 aa, Homo sapiens; identical to SEQ ID NO: 905641

SEQ ID NO: 905646 - protein, 713 aa, Homo sapiens; identical to SEQ ID NO: 905641

SEQ ID NO: 905647 - protein, 713 aa, Homo sapiens; identical to SEQ ID NO: 905641

SEQ ID NO: 905648 - protein, 695 aa, Homo sapiens
MQPRTPLVLCVLLSQVLLLTSAEDLDCTPGFQQKVFHINQPAEFIEDQSILNLTFSDCKGNDKLRYEVSSPYFKVNSDGGLVALRNITAVGKTLFVHARTPHAEDMAELVIVGGKDIQGSLQDIFKFARTSPVPRQKRSIVVSPILIPENQRQPFPRDVGKVVDSDRPERSKFRLTGKGVDQEPKGIFRINENTGSVSVTRTLDREVIAVYQLFVETTDVNDNRPIFREGPYIGHVMEGSPTGTTVMRMTAFDADDPATDNALLRYNIRQQTPDKPSPNMFYIDPEKGDIVTVVSPALLDRETLENPKYELIIEAQDMAGLDVGLTGTATATIMIDDKNDHSPKFTKKEFQATVEEGAVGVIVNLTVEDKDDPTTGAWRAAYTIINGNPGQSFEIHTNPQTNEGMLSVVKPLDYEISAFHTLLIKVENEDPLVPDVSYGPSSTATVHITVLDVNEGPVFYPDPMMVTRQEDLSVGSVLLTVNATDPDSLQHQTIRYSVYKDPAGWLNINPINGTVDTTAVLDRESPFVDNSVYTALFLAIDSGNPPATGTGTLLITLEDVNDNAPFIYPTVAEVCDDAKNLSVVILGASDKDLHPNTDPFKFEIHKQAVPDKVWKISKINNTHALVSLLQNLNKANYNLPIMVTDSGKPPMTNITDLRVQVCSCRNSKVDCNAAGALRFSLPSVLLLSLFSLACL

SEQ ID NO: 905649 - protein, 191 aa, Homo sapiens
MQPRTPLVLCVLLSQVLLLTSAEDLDCTPGFQQKVFHINQPAEFIEDQSILNLTFSDCKGNDKLRYEVSSPYFKVNSDGGLVALRNITAVGKTLFVHARTPHAEDMAELVIVGGKDIQGSLQDIFKFARTSPVPRQKRSIVVSPILIPENQRQPFPRDVGKVRTHNPINSELLLNEGITADLNPCITILAI

SEQ ID NO: 905650 - protein, 116 aa, Homo sapiens
MAGVLKKTTGLVGLAVCNTPHERLRILYTKILDVLEEIPKNAAYRKYTEQITNEKLAMVKAEPDVKKLEDQLQGGQLEEVILQAEHELNLARKMREWKLWEPLVEEPPADQWKWPI

SEQ ID NO: 905651 - protein, 116 aa, Homo sapiens; identical to SEQ ID NO: 905650

SEQ ID NO: 905652 - protein, 240 aa, Homo sapiens [sequence omitted]

SEQ ID NO: 905653 - protein, 116 aa, Homo sapiens; identical to SEQ ID NO: 905650

SEQ ID NO: 905654 - protein, 116 aa, Homo sapiens; identical to SEQ ID NO: 905650

SEQ ID NO: 905655 - protein, 116 aa, Homo sapiens; identical to SEQ ID NO: 905650

SEQ ID NO: 905656 - protein, 137 aa, Homo sapiens
GAKLFPGGQSGDLGGRLSRSENCSQRVVRHRVVGAVMAGVLKKRLRILYTKILDVLEEIPKNAAYRKYTEQITNEKLAMVKAEPDVKKLEDQLQGGQLEEVILQAEHELNLARKMREWKLWEPLVEEPPADQWKWPI

SEQ ID NO: 905657 - protein, 90 aa, Homo sapiens
  misc_feature (16)..(16): Xaa can be any naturally occurring amino acid
LVHPPRGLDPKLVSGXPKCAEVSDLVPMRAGYGEAEPDVKKLEDQLQGGQLEEVILQAEHELNLARKMREWKLWEPLVEEPPADQWKWPI

SEQ ID NO: 905658 - protein, 116 aa, Homo sapiens; identical to SEQ ID NO: 905650

SEQ ID NO: 905659 - protein, 116 aa, Homo sapiens; identical to SEQ ID NO: 905650

SEQ ID NO: 905660 - protein, 116 aa, Homo sapiens; identical to SEQ ID NO: 905650

SEQ ID NO: 905661 - protein, 116 aa, Homo sapiens; identical to SEQ ID NO: 905650

SEQ ID NO: 905662 - protein, 116 aa, Homo sapiens; identical to SEQ ID NO: 905650

SEQ ID NO: 905663 - protein, 113 aa, Homo sapiens
MPYRTTGLVGLAVCNTPHERLRILYTKILDVLEEIPKNAAYRKYTEQITNEKLAMVKAEPDVKKLEDQLQGGQLEEVILQAEHELNLARKMREWKLWEPLVEEPPADQWKWPI

SEQ ID NO: 905664 - protein, 182 aa, Homo sapiens
MGFDLVVQAGFKLLSSSNLPTLQSVGITDILPLQYRWRFSSINKRCSLFTNGNGATVHNFCPRIHGWCRWKYWHSSRGVKGLTQAVQLRLRILYTKILDVLEEIPKNAAYRKYTEQITNEKLAMVKAEPDVKKLEDQLQGGQLEEVILQAEHELNLARKMREWKLWEPLVEEPPADQWKWPI

SEQ ID NO: 905665 - protein, 137 aa, Homo sapiens
GAKLFPGGQSGDLGGRLSRSENCSQRVVRHRVVGAVMAGVLKKTTGLVGLAVCNTPHERLRILYTKILDVLEEIPKNAAYRKYTEQITNEKLAMVKAEPDVKKLEDQLQGGQLEEVILQGKVLNYYSLNKFIDYCLK

SEQ ID NO: 905666 - protein, 587 aa, Homo sapiens
MVTAAMLLQCCPVLARGPTSLLGKVVKTHQFLFGIGRCPILATQGPNCSQIHLKATKAGGDSPSWAKGHCPFMLSELQDGKSKIVQKAAPEVQEDVKAFKTDLPSSLVSVSLRKPFSGPQEQEQISGKVTHLIQNNMPGNYVFSYDQFFRDKIMEKKQDHTYRVFKTVNRWADAYPFAQHFSEASVASKDVSVWCSNDYLGMSRHPQVLQATQETLQRHGAGAGGTRNISGTSKFHVELEQELAELHQKDSALLFSSCFVANDSTLFTLAKILPGCEIYSDAGNHASMIQGIRNSGAAKFVFRHNDPDHLKKLLEKSNPKIPKIVAFETVHSMDGAICPLEELCDVSHQYGALTFVDEVHAVGLYGSRGAGIGERDGIMHKIDIISGTLGKAFGCVGGYIASTRDLVDMVRSYAAGFIFTTSLPPMVLSGALESVRLLKGEEGQALRRAHQRNVKHMRQLLMDRGLPVIPCPSHIIPIRVGNAALNSKLCDLLLSKHGIYVQAINYPTVPRGEELLRLAPSPHHSPQMMEDFVEKLLLAWTAVGLPLQDVSVAACNFCRRPVHFELMSEWERSYFGNMGPQYVTTYA

SEQ ID NO: 905667 - protein, 587 aa, Homo sapiens; identical to SEQ ID NO: 905666

SEQ ID NO: 905668 - protein, 512 aa, Homo sapiens
MVTAAMLLQCCPVLARGPTSLLGKVVKTHQFLFGIGRCPILATQGPNCSQIHLKATKAGGDSPSWAKGHCPFMLSELQDGKSKIVQKAAPEVQEDVKAFKTDLPSSLVSVSLRKPFSGPQEQEQISGKVTHLIQNNMPGNYVFSYDQFFRDKIMEKKQDHTYRVFKTVNRWADAYPFAQHFSEASVASKDVSVWCSNDYLGMSRHPQVLQATQETLQRHGAGAGGTRNISGTSKFHVELEQELAELHQKDSALLFSSCFVANDSTLFTLAKILPGCEIYSDAGNHASMIQGIRNSGAAKFVFRHNDPDHLKKLLEKSNPKIPKIVAFETVHSMDGAICPLEELCDVSHQYGALTFVDEVHAVGLYGSRGAGIGERDGIMHKIDIISGTLGKAFGCVGGYIASTRDLVDMVRSYAAGFIFTTSLPPMVLSGALESVRLLKGEEGQALRRAHQRNVKHMRQLLMDRGLPVIPCPSHIIPIRRSCCWLGLRWGCPSRMCLWLPAISVAVLYTLSS

SEQ ID NO: 905669 - protein, 527 aa, Homo sapiens
MVTAAMLLQCCPVLARGPTSLLGKVVKTHQFLFGIGRCPILATQGPNCSQIHLKATKAGGDSPSWAKGHCPFMLSELQDGKSKIVQKAAPEVQEDVKAFKTDLPSSLVSVSLRKPFSGPQEQEQISGKVTHLIQNNMPGNYVFSYDQFFRDKIMEKKQDHTYRVFKTVNRWADAYPFAQHFSEASVASKDVSVWCSNDYLGMSRHPQVLQATQETLQRHGAGAGGTRNISGTSKFHVELEQELAELHQKDSALLFSSCFVANDSTLFTLAKILPGCEIYSDAGNHASMIQGIRNSGAAKFVFRHNDPDHLKKLLEKSNPKIPKIVAFETVHSMDGAICPLEELCDVSHQYGALTFVDEVHAVGLYGSRGAGIGERDGIMHKIDIISGTLGKAFGCVGGYIASTRDLVDMVRSYAAGFIFTTSLPPMVLSGALESVRLLKGEEGQALRRAHQRNVKHMRQLLMDRGLPVIPCPSHIIPIRVRAPPCPLPSPPIYSGSLTLPTNLHLLLSSIICFPANHSLYCQLCFPF

SEQ ID NO: 905670 - protein, 587 aa, Homo sapiens; identical to SEQ ID NO: 905666

SEQ ID NO: 905671 - protein, 550 aa, Homo sapiens
MVTAAMLLQCCPVLARGPTSLLGKVVKTHQFLFGIGRCPILATQGPNCSQIHLKATKAGGDSPSWAKGHCPFMLSELQDGKSKIVQKAAPEVQEDVKAFKTGNYVFSYDQFFRDKIMEKKQDHTYRVFKTVNRWADAYPFAQHFSEASVASKDVSVWCSNDYLGMSRHPQVLQATQETLQRHGAGAGGTRNISGTSKFHVELEQELAELHQKDSALLFSSCFVANDSTLFTLAKILPGCEIYSDAGNHASMIQGIRNSGAAKFVFRHNDPDHLKKLLEKSNPKIPKIVAFETVHSMDGAICPLEELCDVSHQYGALTFVDEVHAVGLYGSRGAGIGERDGIMHKIDIISGTLGKAFGCVGGYIASTRDLVDMVRSYAAGFIFTTSLPPMVLSGALESVRLLKGEEGQALRRAHQRNVKHMRQLLMDRGLPVIPCPSHIIPIRVGNAALNSKLCDLLLSKHGIYVQAINYPTVPRGEELLRLAPSPHHSPQMMEDFVEKLLLAWTAVGLPLQDVSVAACNFCRRPVHFELMSEWERSYFGNMGPQYVTTYA

SEQ ID NO: 905672 - protein, 192 aa, Homo sapiens
MASKGPSASASPENSSAGGPSGSSNGAGESGGQDSTFECNICLDTAKDAVISLCGHLFCWPCLHQWLETRPNRQVCPVCKAGISRDKVIPLYGRGSTGQQDPREKTPPRPQGQRPEPENRGGFQGFGFGDGGFQMSFGIGAFPFGIFATAFNINDGRPPPAVPGTPQYVDEQFLSRLFLFVALVIMFWLLIA

SEQ ID NO: 905673 - protein, 192 aa, Homo sapiens; identical to SEQ ID NO: 905672

SEQ ID NO: 905674 - protein, 137 aa, Homo sapiens
MASKGPSASASPENSSAGGPSGSSNGAGESGGQDSTFECNICLDTAKDAVISLCGHLFCWPCLPHQGFQGFGFGDGGFQMSFGIGAFPFGIFATAFNINDGRPPPAVPGTPQYVDEQFLSRLFLFVALVIMFWLLIA

SEQ ID NO: 905675 - protein, 192 aa, Homo sapiens; identical to SEQ ID NO: 905672

SEQ ID NO: 905676 - protein, 192 aa, Homo sapiens; identical to SEQ ID NO: 905672

SEQ ID NO: 905677 - protein, 192 aa, Homo sapiens; identical to SEQ ID NO: 905672

SEQ ID NO: 905678 - protein, 143 aa, Homo sapiens
MASKGPSASASPENSSAGGPSGSSNGAGESGGQDSTFECNICLDTAKDAVISLCGHLFCWPCLHQWLETRPNRQVCPVCKAGISRDKVIPLYGRGSTGQQDPREKTPPRPQGQRPEPENRGGFQGFGFGDGGFQMSFVCFLCS

SEQ ID NO: 905679 - protein, 74 aa, Homo sapiens
SSACVATSSGQYPYFHPREHIAKFGKPVALGGLEQNASCSLWEYTQAQGTRDLSSHPSSATNELDDLGQILSPL

SEQ ID NO: 905680 - protein, 157 aa, Homo sapiens
MASKGPSASASPENSSAGGPSGSSNGAGESGGQDSTFECNICLDTAKDAVISLCGHLFCWPCLHQWLETRPNRQVCPVCKAGISRDKVIPLYGRGSTGQQDPREKTPPRPQGQRPEPENRGVRNILGEASTNELMALEVSFLALQFFSLIIKVKENL

SEQ ID NO: 905681 - protein, 192 aa, Homo sapiens; identical to SEQ ID NO: 905672

SEQ ID NO: 905682 - protein, 192 aa, Homo sapiens; identical to SEQ ID NO: 905672

SEQ ID NO: 905683 - protein, 192 aa, Homo sapiens; identical to SEQ ID NO: 905672

SEQ ID NO: 905684 - protein, 192 aa, Homo sapiens; identical to SEQ ID NO: 905672

SEQ ID NO: 905685 - protein, 566 aa, Homo sapiens
PFPPLPSTRPSLLPPPSSLLLPLLKSAPRGGRPGYFLQRLTSAVSLQLRAPGAARPASGLPDRLWPAPSPSPGAHRAAAGAEQPPSRPSAGPARSGRMNDFGIKNMDQVAPVANSYRGTLKRQPAFDTFDGSLFAVFPSLNEEQTLQEVPTGLDSISHDSANCELPLLTPCSKAVMSQALKATFSGFKKEQRRLGIPKNPWLWSEQQVCQWLLWATNEFSLVNVNLQRFGMNGQMLCNLGKERFLELAPDFVGDILWEHLEQMIKENQEKTEDQYEENSHLTSVPHWINSNTLGFGTEQAPYGMQTQNYPKGGLLDSMCPASTPSVLSSEQEFQMFPKSRLSSVSVTYCSVSQDFPGSNLNLLTNNSGTPKDHDSPENGADSFESSDSLLQSWNSQSSLLDVQRVPSFESFEDDCSQSLCLNKPTMSFKDYIQERSDPVEQGKPVIPAAVLAGFTGSGPIQLWQFLLELLSDKSCQSFISWTGDGWEFKLADPDEVARRWGKRKNKPKMNYEKLSRGLRYYYDKNIIHKTSGKRYVYRFVCDLQNLLGFTPEELHAILGVQPDTED

SEQ ID NO: 905686 - protein, 566 aa, Homo sapiens; identical to SEQ ID NO: 905685

SEQ ID NO: 905687 - protein, 566 aa, Homo sapiens; identical to SEQ ID NO: 905685

SEQ ID NO: 905688 - protein, 566 aa, Homo sapiens; identical to SEQ ID NO: 905685

SEQ ID NO: 905689 - protein, 566 aa, Homo sapiens; identical to SEQ ID NO: 905685

SEQ ID NO: 905690 - protein, 548 aa, Homo sapiens
PFPPLPSTRPSLLPPPSSLLLPLLKSAPRGGRPGYFLQRLTSAVSLQLRAPGAARPASGLPDRLWPAPSPSPGAHRAAAGAEQPPSRPSAGPARSGRMNDFGIKNMDQVAPVANSYRGTLKRQPAFDTFDGSLFAVFPSLNEEQTLQEVPTGLDSISHDSANCELPLLTPCSKAVMSQALKATFSGFKQVCQWLLWATNEFSLVNVNLQRFGMNGQMLCNLGKERFLELAPDFVGDILWEHLEQMIKENQEKTEDQYEENSHLTSVPHWINSNTLGFGTEQAPYGMQTQNYPKGGLLDSMCPASTPSVLSSEQEFQMFPKSRLSSVSVTYCSVSQDFPGSNLNLLTNNSGTPKDHDSPENGADSFESSDSLLQSWNSQSSLLDVQRVPSFESFEDDCSQSLCLNKPTMSFKDYIQERSDPVEQGKPVIPAAVLAGFTGSGPIQLWQFLLELLSDKSCQSFISWTGDGWEFKLADPDEVARRWGKRKNKPKMNYEKLSRGLRYYYDKNIIHKTSGKRYVYRFVCDLQNLLGFTPEELHAILGVQPDTED

SEQ ID NO: 905691 - protein, 346 aa, Homo sapiens
MRLNVKHSVHLIILKLSSHRNSESQFVLCSFHLHLPSYVSCVCFSENQEKTEDQYEENSHLTSVPHWINSNTLGFGTEQAPYGMQTQNYPKGGLLDSMCPASTPSVLSSEQEFQMFPKSRLSSVSVTYCSVSQDFPGSNLNLLTNNSGTPKDHDSPENGADSFESSDSLLQSWNSQSSLLDVQRVPSFESFEDDCSQSLCLNKPTMSFKDYIQERSDPVEQGKPVIPAAVLAGFTGSGPIQLWQFLLELLSDKSCQSFISWTGDGWEFKLADPDEVARRWGKRKNKPKMNYEKLSRGLRYYYDKNIIHKTSGKRYVYRFVCDLQNLLGFTPEELHAILGVQPDTED

SEQ ID NO: 905692 - protein, 263 aa, Homo sapiens [sequence omitted]

SEQ ID NO: 905693 - protein, 263 aa, Homo sapiens [sequence omitted]

SEQ ID NO: 905694 - protein, 566 aa, Homo sapiens; identical to SEQ ID NO: 905685

SEQ ID NO: 905695 - protein, 297 aa, Homo sapiens
PFPPLPSTRPSLLPPPSSLLLPLLKSAPRGGRPGYFLQRLTSAVSLQLRAPGAARPASGLPDRLWPAPSPSPGAHRAAAGAEQPPSRPSAGPARSGRMNDFGIKNMDQVAPVANSYRGTLKRQPAFDTFDGSLFAVFPSLNEEQTLQEVPTGLDSISHDSANCELPLLTPCSKAVMSQALKATFSGFKKEQRRLGIPKNPWLWSEQQVCQWLLWATNEFSLVNVNLQRFGMNGQMLCNLGKERFLELAPDFVGDILWEHLEQMIKENQEKTEDQYEENSHLTSVPHWINSNTLGQSD

SEQ ID NO: 905696 - protein, 268 aa, Homo sapiens
PFPPLPSTRPSLLPPPSSLLLPLLKSAPRGGRPGYFLQRLTSAVSLQLRAPGAARPASGLPDRLWPAPSPSPGAHRAAAGAEQPPSRPSAGPARSGRMNDFGIKNMDQVAPVANSYRGTLKRQPAFDTFDGSLFAVFPSLNEEQTLQEVPTGLDSISHDSANCELPLLTPCSKAVMSQALKATFSGFKKEQRRLGIPKNPWLWSEQQVCQWLLWATNEFSLVNVNLQRFGMNGQMLCNLGKERFLELAPDFVGDILWEHLEQMIKGTS

SEQ ID NO: 905697 - protein, 203 aa, Homo sapiens
PFPPLPSTRPSLLPPPSSLLLPLLKSAPRGGRPGYFLQRLTSAVSLQLRAPGAARPASGLPDRLWPAPSPSPGAHRAAAGAEQPPSRPSAGPARSGRMNDFGIKNMDQVAPVANSYRGTLKRQPAFDTFDGSLFAVFPSLNEEQTLQEVPTGLDSISHDSANCELPLLTPCSKDFVHLGVFMRNLNVIIWAYIWPLLSPLIVK

SEQ ID NO: 905698 - protein, 566 aa, Homo sapiens; identical to SEQ ID NO: 905685

SEQ ID NO: 905699 - protein, 566 aa, Homo sapiens; identical to SEQ ID NO: 905685

SEQ ID NO: 905700 - protein, 566 aa, Homo sapiens; identical to SEQ ID NO: 905685

SEQ ID NO: 905701 - protein, 469 aa, Homo sapiens
MNDFGIKNMDQVAPVANSYRGTLKRQPAFDTFDGSLFAVFPSLNEEQTLQEVPTGLDSISHDSANCELPLLTPCSKAVMSQALKATFSGFKKEQRRLGIPKNPWLWSEQQVCQWLLWATNEFSLVNVNLQRFGMNGQMLCNLGKERFLELAPDFVGDILWEHLEQMIKENQEKTEDQYEENSHLTSVPHWINSNTLGFGTEQAPYGMQTQNYPKGGLLDSMCPASTPSVLSSEQEFQMFPKSRLSSVSVTYCSVSQDFPGSNLNLLTNNSGTPKDHDSPENGADSFESSDSLLQSWNSQSSLLDVQRVPSFESFEDDCSQSLCLNKPTMSFKDYIQERSDPVEQGKPVIPAAVLAGFTGSGPIQLWQFLLELLSDKSCQSFISWTGDGWEFKLADPDEVARRWGKRKNKPKMNYEKLSRGLRYYYDKNIIHKTSGKRYVYRFVCDLQNLLGFTPEELHAILGVQPDTED

SEQ ID NO: 905702 - protein, 695 aa, Homo sapiens
PFPPLPSTRPSLLPPPSSLLLPLLKSAPRGGRPGYFLQRLTSAVSLQLRAPGAARPASGLPDRLWPAPSPSPGAHRAAAGAEQPPSRPSAGPARSGRMNDFGIKNMDQVAPVANSYRGTLKRQPAFDTFDGSLFAVFPSLNEEQTLQEVPTGLDSISHDSANCELPLLTPCSKAVMSQALKATFSGFKKEQRRLGIPKSKYCFPEPALGEKNQLQCSCLILTCLLSFCLGYSAKSSMDVVNLSHFCFTPINPRLDPELIKYVVEGRITGVLKCAWVVSEWCRVIMVSCSFVGSGVCRYLVHKLGMTVVSLPFHCFYLMCSIFSSLLVDPWLWSEQQVCQWLLWATNEFSLVNVNLQRFGMNGQMLCNLGKERFLELAPDFVGDILWEHLEQMIKENQEKTEDQYEENSHLTSVPHWINSNTLGFGTEQAPYGMQTQNYPKGGLLDSMCPASTPSVLSSEQEFQMFPKSRLSSVSVTYCSVSQDFPGSNLNLLTNNSGTPKDHDSPENGADSFESSDSLLQSWNSQSSLLDVQRVPSFESFEDDCSQSLCLNKPTMSFKDYIQERSDPVEQGKPVIPAAVLAGFTGSGPIQLWQFLLELLSDKSCQSFISWTGDGWEFKLADPDEVARRWGKRKNKPKMNYEKLSRGLRYYYDKNIIHKTSGKRYVYRFVCDLQNLLGFTPEELHAILGVQPDTED

SEQ ID NO: 905703 - protein, 566 aa, Homo sapiens; identical to SEQ ID NO: 905685

SEQ ID NO: 905704 - protein, 307 aa, Homo sapiens
QGIRDNGQETEDQEMKRYVTADLRSLMGLTAIEYSFGTEQAPYGMQTQNYPKGGLLDSMCPASTPSVLSSEQEFQMFPKSRLSSVSVTYCSVSQDFPGSNLNLLTNNSGTPKDHDSPENGADSFESSDSLLQSWNSQSSLLDVQRVPSFESFEDDCSQSLCLNKPTMSFKDYIQERSDPVEQGKPVIPAAVLAGFTGSGPIQLWQFLLELLSDKSCQSFISWTGDGWEFKLADPDEVARRWGKRKNKPKMNYEKLSRGLRYYYDKNIIHKTSGKRYVYRFVCDLQNLLGFTPEELHAILGVQPDTED

SEQ ID NO: 905705 - protein, 566 aa, Homo sapiens; identical to SEQ ID NO: 905685

SEQ ID NO: 905706 - protein, 90 aa, Homo sapiens
IDSWTQLARMGVKLADPDEVARRWGKRKNKPKMNYEKLSRGLRYYYDKNIIHKTSGKRYVYRFVCDLQNLLGFTPEELHAILGVQPDTED

SEQ ID NO: 905707 - protein, 254 aa, Homo sapiens
PFPPLPSTRPSLLPPPSSLLLPLLKSAPRGGRPGYFLQRLTSAVSLQLRAPGAARPASGLPDRLWPAPSPSPGAHRAAAGAEQPPSRPSAGPARSGRMNDFGIKNMDQVAPVANSYRGTLKRQPAFDTFDGSLFAVFPSLNEEQTLQEVPTGLDSISHDSANCELPLLTPCSKAVMSQALKATFSGFKKEQRRLGIPKSKYCFPEPALGEKNQLQCSCLILTCLLSFCLGYSAKSSMDVVNLSQFLFHPNQPKT

SEQ ID NO: 905708 - protein, 300 aa, Homo sapiens
PAEFLQRNYRPGRKRLFSFNTDDWAWEPTRLQSGGRQQQLPGLLFLNTLQARQGSRSPLTMDKFVIRTPRIQNSPQKKDSGGKVYKQATIESLKRVVVVEDIKRWKTMLELPDQTKENLVEALQELKKKIPSREVLKSTRIGHTVNKMRKHSDSEVASLAREVYTEWKTFTEKHSNRPSIEVRSDPKTESLRKNAQKLLSEALELKMDTYWLKIVNVDEVGGEALGRLLVVYPWTQRFFESFGDLSTPDAVMGNPKVKAHGKKVLGAFSDGLAHLDNLKGTFATLSELHCDKLHVDPENF

SEQ ID NO: 905709 - protein, 268 aa, Homo sapiens
PAEFLQRNYRPGRKRLFSFNTDDWAWEPTRLQSGGRQQQLPGLLFLNTLQARQGSRSPLTMDKFVIRTPRIQNSPQKKDSGGKVYKQATIESLKRVVVVEDIKRWKTMLELPDQTKENLVEALQELKKKIPSREVLKSTRIGHTVNKMRKHSDSEVASLAREVYTEWKTFTEKHSNRPSIEVRSDPKTESLRKNAQKLLSEALELKMDHLLVENIERETFHLCSRLINGPYRRTVRALVFTLKHRAEIRAQVKSGSLPVGTFVQTHKK

SEQ ID NO: 905710 - protein, 497 aa, Homo sapiens
ETESGGRDAGMWSGCGAAAAELRDCGSRRISRSPSSNSHLSPRISLSGNLGPQTSRLGGPPSPSATWSVFWQLPRQQSLPGRGSANLLPSVRSESAVLSDCVGGFPGRSSVRAWIAGPRCTPASPTRVLSLSWRLFNSASLLLLATSTSGSECRFPRSPRARERGIPDCERLLVRRSCWRSGDPRPAGPAGHAAGAFSTPQYLGGTAMVLLHVKRGDESQFLLQAPGSTELEELTVQVARVYNGRLKVQRLCSEMEELAEHGIFLPPNMQGLTDDQIEELKLKDEWGEKCVPSGGAVFKKDDIGRRNGQAPNEKMKQVLKKTIEEAKAIISKKQVEAGVCVTMEMVKDALDQLRGAVMIVYPMGLPPYDPIRMEFENKEDLSGTQAGLNVIKEAEAQLWWAAKELRRTKKLSDYVGKNEKTKIIAKIQQRGQGAPAREPIISSEEQKQLMLYYHRRQEELKRLEENDDDAYLNSPWADNTALKRHFHGVKDIKWRPR

SEQ ID NO: 905711 - protein, 476 aa, Homo sapiens
ETESGGRDAGMWSGCGAAAAELRDCGSRRISRSPSSNSHLSPRISLSGNLGPQTSRLGGPPSPSATWSVFWQLPRQQSLPGRGSANLLPSVRSESAVLSDCVGGFPGRSSVRAWIAGPRCTPASPTRVLSLSWRLFNSASLLLLATSTSGSECRFPRSPRARERGIPDCERLLVRRSCWRSGDPRPAGPAGHAAGAFSTPQYLGGTAMVLLHVKRGDESQFLLQAPGSTELEELTVQVARVYNGRLKVQRLCSEMEELAEHGIFLPPNMQGLTDDQIEELKLKDEWGEKCVPSGGAVFKKDDIGRRNGQAPNEKMKQVLKKTIEEAKAIISKKQVEAGVCVTMEMVKDALDQLRGAVMIVYPMGLPPYDPIRMEFENKEDLSGTQAGLNVIKEAEAQLWWAAKELRRTKKLSDYVGKNEKTKIIAKIQQRGQGAPAREPIISSEEQKQLMLYYHRRQEELKVAGDRWAFCSAGAHT

SEQ ID NO: 905712 - protein, 452 aa, Homo sapiens
ETESGGRDAGMWSGCGAAAAELRDCGSRRISRSPSSNSHLSPRISLSGNLGPQTSRLGGPPSPSATWSVFWQLPRQQSLPGRGSANLLPSVRSESAVLSDCVGGFPGRSSVRAWIAGPRCTPASPTRVLSLSWRLFNSASLLLLATSTSGSECRFPRSPRARERGIPDCERLLVRRSCWRSGDPRPAGPAGHAAGAFSTPQYLGGTAMVLLHVKRGDESQFLLQAPGSTELEELTVQVARVYNGRLKVQRLCSEMEELAEHGIFLPPNMQGLTDDQIEELKLKDEWGEKCVPSGGAVFKKDDIGRRNGQAPNEKMKQVLKKTIEEAKAIISKKQVEAGVCVTMEMVKDALDQLRGAVMIVYPMGLPPYDPIRMEFENKEDLSGTQAGLNVIKEAEAQLWWAAKELRRTKKLSDYVGKNEKTKIIAKIQQVSTFCFNVSVVFVISLQTDKNVQ

SEQ ID NO: 905713 - protein, 465 aa, Homo sapiens
ETESGGRDAGMWSGCGAAAAELRDCGSRRISRSPSSNSHLSPRISLSGNLGPQTSRLGGPPSPSATWSVFWQLPRQQSLPGRGSANLLPSVRSESAVLSDCVGGFPGRSSVRAWIAGPRCTPASPTRVLSLSWRLFNSASLLLLATSTSGSECRFPRSPRARERGIPDCERLLVRRSCWRSGDPRPAGPAGHAAGAFSTPQYLGGTAMVLLHVKRGDESQFLLQAPGSTELEELTVQVARVYNGRLKVQRLCSEMEELAEHGIFLPPNMQGLTDDQIEELKLKDEWGEKCVPSGGAVFKKDDIGRRNGQAPNEKMKQVLKKTIEEAKAIISKKQVEAGVCVTMEMVKDALDQLRGAVMIVYPMGLPPYDPIRMEFENKEDLSGTQAGLNVIKEAEAQLWWAAKELRRTKKLSDYVGKNEKTKIIAKIQQRLEENDDDAYLNSPWADNTALKRHFHGVKDIKWRPR

SEQ ID NO: 905714 - protein, 345 aa, Homo sapiens
ETESGGRDAGMWSGCGAAAAELRDCGSRRISRSPSSNSHLSPRISLSGNLGPQTSRLGGPPSPSATWSVFWQLPRQQSLPGRGSANLLPSVRSESAVLSDCVGGFPGRSSVRAWIAGPRCTPASPTRVLSLSWRLFNSASLLLLATSTSGSECRFPRSPRARERGIPDCERLLVRRSCWRSGDPRPAGPAGHAAGAFSTPQYLGGTAMVLLHVKRGDESQFLLQAPGSTELEELTVQVARVYNGRLKVQRLCSEMEELAEHGIFLPPNMQGLTDDQIEELKLKDEWGEKCVPSGGAVFKKDDIGRRNGQETSGSRCLCYHGDGERCLGPASRRGDDCLPHGVATV

SEQ ID NO: 905715 - protein, 264 aa, Homo sapiens
MAHLRSSQLLGCPPQQRLCSEMEELAEHGIFLPPNMQGLTDDQIEELKLKDEWGEKCVPSGGAVFKKDDIGRRNGQAPNEKMKQVLKKTIEEAKAIISKKQVEAGVCVTMEMVKDALDQLRGAVMIVYPMGLPPYDPIRMEFENKEDLSGTQAGLNVIKEAEAQLWWAAKELRRTKKLSDYVGKNEKTKIIAKIQQRGQGAPAREPIISSEEQKQLMLYYHRRQEELKRLEENDDDAYLNSPWADNTALKRHFHGVKDIKWRPR

SEQ ID NO: 905716 - protein, 87 aa, Homo sapiens
IGTSVRTRIMYSLLDSCDRRGQGAPAREPIISSEEQKQLMLYYHRRQEELKRLEENDDDAYLNSPWADNTALKRHFHGVKDIKWRPR

SEQ ID NO: 905717 - protein, 497 aa, Homo sapiens; identical to SEQ ID NO: 905710

SEQ ID NO: 905718 - protein, 452 aa, Homo sapiens; identical to SEQ ID NO: 905712

SEQ ID NO: 905719 - protein, 482 aa, Homo sapiens
ETESGGRDAGMWSGCGAAAAELRDCGSRRISRSPSSNSHLSPRISLSGNLGPQTSRLGGPPSPSATWSVFWQLPRQQSLPGRGSANLLPSVRSESAVLSDCVGGFPGRSSVRAWIAGPRCTPASPTRVLSLSWRLFNSASLLLLATSTSGSECRFPRSPRARERGIPDCERLLVRRSCWRSGDPRPAGPAGHAAGAFSTPQYLGGTAMVLLHVKRGDESQFLLQAPGSTELEELTVQVARVYNGRLKVQRLCSEMEELAEHGIFLPPNMQGLTDDQIEELKLKDEWGEKCVPSGGAVFKKDDIGRRNGQAPNEKMKQVLKKTIEEAKAIISKKQVEAGVCVTMEMVKDALDQLRGAVMIVYPMGLPPYDPIRMEFENKEDLSGTQAGLNVIKEAEAQLWWAAKELRRTKKLSDYVGKNEKTKIIAKIQQIFATFQVVVLCPPELGPRSLGPLDQNPNQLRNRLLADEPGGSGARDAVSNVAP

SEQ ID NO: 905720 - protein, 290 aa, Homo sapiens
MVLLHVKRGDESQFLLQAPGSTELEELTVQVARVYNGRLKVQRLCSEMEELAEHGIFLPPNMQGLTDDQIEELKLKDEWGEKCVPSGGAVFKKDDIGRRNGQAPNEKMKQVLKKTIEEAKAIISKKQVEAGVCVTMEMVKDALDQLRGAVMIVYPMGLPPYDPIRMEFENKEDLSGTQAGLNVIKEAEAQLWWAAKELRRTKKLSDYVGKNEKTKIIAKIQQRGQGAPAREPIISSEEQKQLMLYYHRRQEELKRLEENDDDAYLNSPWADNTALKRHFHGVKDIKWRPR

SEQ ID NO: 905721 - protein, 183 aa, Homo sapiens [sequence omitted]

SEQ ID NO: 905722 - protein, 249 aa, Homo sapiens
MAVILSLEQGNRLREQYGLGPYEAVTPLTKAADISLDNLVEGKRKRRSNVSSPATPTASSSSSTTPTRKITESPRASMGVLSGKRKLITSEEERSPAKRGRKSATVKPGAVGAGEFVSPCESGDNTGEPSALEEQRGPLPLNKTLFLGYAFLLTMATTSDKLASRSKLPDGPTGSSEEEEAIREFLLSQGRYKNPRSRGGVIPKFHEPRHTLHGLKGGENWHPEIRRHGTGARGAKGARKRIARRRDMV

SEQ ID NO: 905723 - protein, 1977 aa, Homo sapiens
MPGEQMDPTGSQLDSDFSQQDTPCLIIEDSQPESQVLEDDSGSHFSMLSRHLPNLQTHKENPVLDVVSNPEQTAGEERGDGNSGFNEHLKENKVADPVDSSNLDTCGSISQVIEQLPQPNRTSSVLGMSVESAPAVEEEKGEELEQKEKEKEEDTSGNTTHSLGAEDTASSQLGFGVLELSQSQDVEENTVPYEVDKEQLQSVTTNSGYTRLSDVDANTAIKHEEQSNEDIPIAEQSSKDIPVTAQPSKDVHVVKEQNPPPARSEDMPFSPKASVAAMEAKEQLSAQELMESGLQIQKSPEPEVLSTQEDLFDQSNKTVSSDGCSTPSREEGGCSLASTPATTLHLLQLSGQRSLVQDSLSTNSSDLVAPSPDAFRSTPFIVPSSPTEQEGRQDKPMDTSVLSEEGGEPFQKKLQSGEPVELENPPLLPESTVSPQASTPISQSTPVFPPGSLPIPSQPQFSHDIFIPSPSLEEQSNDGKKDGDMHSSSLTVECSKTSEIEPKNSPEDLGLSLTGDSCKLMLSTSEYSQSPKMESLSSHRIDEDGENTQIEDTEPMSPVLNSKFVPAENDSILMNPAQDGEVQLSQNDDKTKGDDTDTRDDISILATGCKGREETVAEDVCIDLTCDSGSQAVPSPATRSEALSSVLDQEEAMEIKEHHPEEGSSGSEVEEIPETPCESQGEELKEENMESVPLHLSLTETQSQGLCLQKEMPKKECSEAMEVETSVISIDSPQKLAILDQELEHKEQEAWEEATSEDSSVVIVDVKEPSPRVDVSCEPLEGVEKCSDSQSWEDIAPEIEPCAENRLDTKEEKSVEYEGDLKSGTAETEPVEQDSSQPSLPLVRADDPLRLDQELQQPQTQEKTSNSLTEDSKMANAKQLSSDAEAQKLGKPSAHASQSFCESSSETPFHFTLPKEGDIIPPLTGATPPLIGHLKLEPKRHSTPIGISNYPESTIATSDVMSESMVETHDPILGSGKGDSGAAPDVDDKLCLRMKLVSPETEASEESLQFNLEKPATGERKNGSTAVAESVASPQKTMSVLSCICEARQENEARSEDPPTTPIRGNLLHFPSSQGEEEKEKLEGDHTIRQSQQPMKPISPVKDPVSPASQKMVIQGPSSPQGEAMVTDVLEDQKEGRSTNKENPSKALIERPSQNNIGIQTMECSLRVPETVSAATQTIKNVCEQGTSTVDQNFGKQDATVQTERGSGEKPVSAPGDDTESLHSQGEEEFDMPQPPHGHVLHRHMRTIREVRTLVTRVITDVYYVDGTEVERKVTEETEEPIVECQECETEVSPSQTGGSSGDLGDISSFSSKASSLHRTSSGTSLSAMHSSGSSGKGAGPLRGKTSGTEPADFALPSSRGGPGKLSPRKGVSQTGTPVCEEDGDAGLGIRQGGKAPVTPRGRGRRGRPPSRTTGTRETAVPGPLGIEDISPNLSPDDKSFSRVVPRVPDSTRRTDVGAGALRRSDSPEIPFQAAAGPSDGLDASSPGNSFVGLRVVAKWSSNGYFYSGKITRDVGAGKYKLLFDDGYECDVLGKDILLCDPIPLDTEVTALSEDEYFSAGVVKGHRKESGELYYSIEKEGQRKWYKRMAVILSLEQGNRLREQYGLGPYEAVTPLTKAADISLDNLVEGKRKRRSNVSSPATPTASSSSSTTPTRKITESPRASMGVLSGKRKLITSEEERSPAKRGRKSATVKPGAVGAGEFVSPCESGDNTGEPSALEEQRGPLPLNKTLFLGYAFLLTMATTSDKLASRSKLPDGPTGSSEEEEEFLEIPPFNKQYTESQLRAGAGYILEDFNEAQCNTAYQCLLIADQHCRTRKYFLCLASGIPCVSHVWVHDSCHANQLQNYRNYLLPAGYSLEEQRILDWQPRENPFQNLKVLLVSDQQQNFLELWSEILMTGGAASVKQHHSSAHNKDIALGVFDVVVTDPSCPASVLKCAEALQLPVVSQEWVIQCLIVGERIGFKQHPKYKHDYVSH

SEQ ID NO: 905724 - protein, 1654 aa, Homo sapiens
RSTSLPLMRADDPLRLDQELQQPQTQEKTSNSLTEDSKMANAKQLSSDAEAQKLGKPSAHASQSFCESSSDKPMDTSVLSEEGGEPFQKKLQSGEPVELENPPLLPESTVSPQASTPISQSTPVFPPGSLPIPSQPQFSHDIFIPSPSLEEQSNDGKKDGDMHSSSLTVECSKTSEIEPKNSPEDLGLSLTGDSCKLMLSTSEYSQSPKMESLSSHRIDEDGENTQIEDTEPMSPVLNSKFVPAENDSILMNPAQDGEVQLSQNDDKTKGDDTDTRDDISILATGCKGREETVAEDVCIDLTCDSGSQAVPSPATRSEALSSVLDQEEAMEIKEHHPEEGSSGSEVEEIPETPCESQGEELKEENMESVPLHLSLTETQSQGLCLQKEMPKKECSEAMEVETSVISIDSPQKLAILDQELEHKEQEAWEEATSEDSSVVIVDVKEPSPRVDVSCEPLEGVEKCSDSQSWEDIAPEIEPCAENRLDTKEEKSVEYEGDLKSGTAETEPVEQDSSQPSLPLVRADDPLRLDQELQQPQTQEKTSNSLTEDSKMANAKQLSSDAEAQKLGKPSAHASQSFCESSSETPFHFTLPKEGDIIPPLTGATPPLIGHLKLEPKRHSTPIGISNYPESTIATSDVMSESMVETHDPILGSGKGDSGAAPDVDDKLCLRMKLVSPETEASEESLQFNLEKPATGERKNGSTAVAESVASPQKTMSVLSCICEARQENEARSEDPPTTPIRGNLLHFPSSQGEEEKEKLEGDHTIRQSQQPMKPISPVKDPVSPASQKMVIQGPSSPQGEAMVTDVLEDQKEGRSTNKENPSKALIERPSQNNIGIQTMECSLRVPETVSAATQTIKNVCEQGTSTVDQNFGKQDATVQTERGSGEKPVSAPGDDTESLHSQGEEEFDMPQPPHGHVLHRHMRTIREVRTLVTRVITDVYYVDGTEVERKVTEETEEPIVECQECETEVSPSQTGGSSGDLGDISSFSSKASSLHRTSSGTSLSAMHSSGSSGKGAGPLRGKTSGTEPADFALPSSRGGPGKLSPRKGVSQTGTPVCEEDGDAGLGIRQGGKAPVTPRGRGRRGRPPSRTTGTRETAVPGPLGIEDISPNLSPDDKSFSRVVPRVPDSTRRTDVGAGALRRSDSPEIPFQAAAGPSDGLDASSPGNSFVGLRVVAKWSSNGYFYSGKITRDVGAGKYKLLFDDGYECDVLGKDILLCDPIPLDTEVTALSEDEYFSAGVVKGHRKESGELYYSIEKEGQRKWYKRMAVILSLEQGNRLREQYGLGPYEAVTPLTKAADISLDNLVEGKRKRRSNVSSPATPTASSSSSTTPTRKITESPRASMGVLSGKRKLITSEEERSPAKRGRKSATVKPGAVGAGEFVSPCESGDNTGEPSALEEQRGPLPLNKTLFLGYAFLLTMATTSDKLASRSKLPDGPTGSSEEEEEFLEIPPFNKQYTESQLRAGAGYILEDFNEAQCNTAYQCLLIADQHCRTRKYFLCLASGIPCVSHVWVHDSCHANQLQNYRNYLLPAGYSLEEQRILDWQPRENPFQNLKVLLVSDQQQNFLELWSEILMTGGAASVKQHHSSAHNKDIALGVFDVVVTDPSCPASVLKCAEALQLPVVSQEWVIQCLIVGERIGFKQHPKYKHDYVSH

SEQ ID NO: 905725 - protein, 1806 aa, Homo sapiens [sequence omitted]

SEQ ID NO: 905726 - protein, 2009 aa, Homo sapiens
MPGEQMDPTGSQLDSDFSQQDTPCLIIEDSQPESQVLEDDSGSHFSMLSRHLPNLQTHKENPVLDVVSNPEQTAGEERGDGNSGFNEHLKENKVADPVDSSNLDTCGSISQVIEQLPQPNRTSSVLGMSVESAPAVEEEKGEELEQKEKEKEEDTSGNTTHSLGAEDTASSQLGFGVLELSQSQDVEENTVPYEVDKEQLQSVTTNSGYTRLSDVDANTAIKHEEQSNEDIPIAEQSSKDIPVTAQPSKDVHVVKEQNPPPARSEDMPFSPKASVAAMEAKEQLSAQELMESGLQIQKSPEPEVLSTQEDLFDQSNKTVSSDGCSTPSREEGGCSLASTPATTLHLLQLSGQRSLVQDSLSTNSSDLVAPSPDAFRSTPFIVPSSPTEQEGRQDKPMDTSVLSEEGGEPFQKKLQSGEPVELENPPLLPESTVSPQASTPISQSTPVFPPGSLPIPSQPQFSHDIFIPSPSLEEQSNDGKKDGDMHSSSLTVECSKTSEIEPKNSPEDLGLSLTGDSCKLMLSTSEYSQSPKMESLSSHRIDEDGENTQIEDTEPMSPVLNSKFVPAENDSILMNPAQDGEVQLSQNDDKTKGDDTDTRDDISILATGCKGREETVAEDVCIDLTCDSGSQAVPSPATRSEALSSVLDQEEAMEIKEHHPEEGSSGSEVEEIPETPCESQGEELKEENMESVPLHLSLTETQSQGLCLQKEMPKKECSEAMEVETSVISIDSPQKLAILDQELEHKEQEAWEEATSEDSSVVIVDVKEPSPRVDVSCEPLEGVEKCSDSQSWEDIAPEIEPCAENRLDTKEEKSVEYEGDLKSGTAETEPVEQDSSQPSLPLVRADDPLRLDQELQQPQTQEKTSNSLTEDSKMANAKQLSSDAEAQKLGKPSAHASQSFCESSSETPFHFTLPKEGDIIPPLTGATPPLIGHLKLEPKRHSTPIGISNYPESTIATSDVMSESMVETHDPILGSGKGDSGAAPDVDDKLCLRMKLVSPETEASEESLQFNLEKPATGERKNGSTAVAESVASPQKTMSVLSCICEARQENEARSEDPPTTPIRGNLLHFPSSQGEEEKEKLEGDHTIRQSQQPMKPISPVKDPVSPASQKMVIQGPSSPQGEAMVTDVLEDQKEGRSTNKENPSKALIERPSQNNIGIQTMECSLRVPETVSAATQTIKNVCEQGTSTVDQNFGKQDATVQTERGSGEKPVSAPGDDTESLHSQGEEEFDMPQPPHGHVLHRHMRTIREVRTLVTRVITDVYYVDGTEVERKVTEETEEPIVECQECETEVSPSQTGGSSGDLGDISSFSSKASSLHRTSSGTSLSAMHSSGSSGKGAGPLRGKTSGTEPADFALPSSRGGPGKLSPRKGVSQTGTPVCEEDGDAGLGIRQGGKAPVTPRGRGRRGRPPSRTTGTRETAVPGPLGIEDISPNLSPDDKSFSRVVPRVPDSTRRTDVGAGALRRSDSPEIPFQAAAGPSDGLDASSPGNSFVGLRVVAKWSSNGYFYSGKITRDVGAGKYKLLFDDGYECDVLGKDILLCDPIPLDTEVTALSEDEYFSAGVVKGHRKESGELYYSIEKEGQRKWYKRMAVILSLEQGNRLREQYGLGPYEAVTPLTKAADISLDNLVEGKRKRRSNVSSPATPTASSSSSTTPTRKITESPRASMGVLSGKRKLITSEEERSPAKRGRKSATVKPGAVGAGEFVSPCESGDNTGEPSALEEQRGPLPLNKTLFLGYAFLLTMATTSDKLASRSKLPDGPTGSSEEEEAYCNHPSQSGLNALPSSPFAFYGHLLEQTHVEEFLEIPPFNKQYTESQLRAGAGYILEDFNEAQCNTAYQCLLIADQHCRTRKYFLCLASGIPCVSHVWVHDSCHANQLQNYRNYLLPAGYSLEEQRILDWQPRENPFQNLKVLLVSDQQQNFLELWSEILMTGGAASVKQHHSSAHNKDIALGVFDVVVTDPSCPASVLKCAEALQLPVVSQEWVIQCLIVGERIGFKQHPKYKHDYVSH

SEQ ID NO: 905727 - protein, 1806 aa, Homo sapiens [sequence omitted]

SEQ ID NO: 905728 - protein, 1705 aa, Homo sapiens
MPGEQMDPTGSQLDSDFSQQDTPCLIIEDSQPESQVLEDDSGSHFSMLSRHLPNLQTHKENPVLDVVSNPEQTAGEERGDGNSGFNEHLKENKVADPVDSSNLDTCGSISQVIEQLPQPNRTSSVLGMSVESAPAVEEEKGEELEQKEKEKEEDTSGNTTHSLGAEDTASSQLGFGVLELSQSQDVEENTVPYEVDKEQLQSVTTNSGYTRLSDVDANTAIKHEEQSNEDIPIAEQSSKDIPVTAQPSKDVHVVKEQNPPPARSEDMPFSPKASVAAMEAKEQLSAQELMESGLQIQKSPEPEVLSTQEDLFDQSNKTVSSDGCSTPSREEGGCSLASTPATTLHLLQLSGQRSLVQDSLSTNSSDLVAPSPDAFRSTPFIVPSSPTEQEGRQDKPMDTSVLSEEGGEPFQKKLQSGEPVELENPPLLPESTVSPQASTPISQSTPVFPPGSLPIPSQPQFSHDIFIPSPSLEEQSNDGKKDGDMHSSSLTVECSKTSEIEPKNSPEDLGLSLTGDSCKLMLSTSEYSQSPKMESLSSHRIDEDGENTQIEDTEPMSPVLNSKFVPAENDSILMNPAQDGEVQLSQNDDKTKGDDTDTRDDISILATGCKGREETVAEDVCIDLTCDSGSQAVPSPATRSEALSSVLDQEEAMEIKEHHPEEGSSGSEVEEIPETPCESQGEELKEENMESVPLHLSLTETQSQGLCLQKEMPKKECSEAMEVETSVISIDSPQKLAILDQELEHKEQEAWEEATSEDSSVVIVDVKEPSPRVDVSCEPLEGVEKCSDSQSWEDIAPEIEPCAENRLDTKEEKSVEYEGDLKSGTAETEPVEQDSSQPSLPLVRADDPLRLDQELQQPQTQEKTSNSLTEDSKMANAKQLSSDAEAQKLGKPSAHASQSFCESSSETPFHFTLPKEGDIIPPLTGATPPLIGHLKLEPKRHSTPIGISNYPESTIATSDVMSESMVETHDPILGSGKGDSGAAPDVDDKLCLRMKLVSPETEASEESLQFNLEKPATGERKNGSTAVAESVASPQKTMSVLSCICEARQENEARSEDPPTTPIRGNLLHFPSSQGEEEKEKLEGDHTIRQSQQPMKPISPVKDPVSPASQKMVIQGPSSPQGEAMVTDVLEDQKEGRSTNKENPSKALIERPSQNNIGIQTMECSLRVPETVSAATQNSTRRTDVGAGALRRSDSPEIPFQAAAGPSDGLDASSPGNSFVGLRVVAKWSSNGYFYSGKITRDVGAGKYKLLFDDGYECDVLGKDILLCDPIPLDTEVTALSEDEYFSAGVVKGHRKESGELYYSIEKEGQRKWYKRMAVILSLEQGNRLREQYGLGPYEAVTPLTKAADISLDNLVEGKRKRRSNVSSPATPTASSSSSTTPTRKITESPRASMGVLSGKRKLITSEEERSPAKRGRKSATVKPGAVGAGEFVSPCESGDNTGEPSALEEQRGPLPLNKTLFLGYAFLLTMATTSDKLASRSKLPDGPTGSSEEEEEFLEIPPFNKQYTESQLRAGAGYILEDFNEAQCNTAYQCLLIADQHCRTRKYFLCLASGIPCVSHVWVHDSCHANQLQNYRNYLLPAGYSLEEQRILDWQPRENPFQNLKVLLVSDQQQNFLELWSEILMTGGAASVKQHHSSAHNKDIALGVFDVVVTDPSCPASVLKCAEALQLPVVSQEWVIQCLIVGERIGFKQHPKYKHDYVSH

SEQ ID NO: 905729 - protein, 806 aa, Homo sapiens
QYSTMFILYFIEIQYSPIRMNNSSQNHLGEKKKRTDPKCSVQWLLKILSNHYSKQIQNIPIIPESLLILTFLNYNFVPSVGFSNHHISIVLLWHLLSSVSIFSLQETEEPIVECQECETEVSPSQTGGSSGDLGDISSFSSKASSLHRTSSGTSLSAMHSSGSSGKGAGPLRGKTSGTEPADFALPSSRGGPGKLSPRKGVSQTGTPVCEEDGDAGLGIRQGGKAPVTPRGRGRRGRPPSRTTGTRETAVPGPLGIEDISPNLSPDDKSFSRVVPRVPDSTRRTDVGAGALRRSDSPEIPFQAAAGPSDGLDASSPGNSFVGLRVVAKWSSNGYFYSGKITRDVGAGKYKLLFDDGYECDVLGKDILLCDPIPLDTEVTALSEDEYFSAGVVKGHRKESGELYYSIEKEGQRKWYKRMAVILSLEQGNRLREQYGLGPYEAVTPLTKAADISLDNLVEGKRKRRSNVSSPATPTASSSSSTTPTRKITESPRASMGVLSGKRKLITSEEERSPAKRGRKSATVKPGAVGAGEFVSPCESGDNTGEPSALEEQRGPLPLNKTLFLGYAFLLTMATTSDKLASRSKLPDGPTGSSEEEEEFLEIPPFNKQYTESQLRAGAGYILEDFNEAQCNTAYQCLLIADQHCRTRKYFLCLASGIPCVSHVWVHDSCHANQLQNYRNYLLPAGYSLEEQRILDWQPRENPFQNLKVLLVSDQQQNFLELWSEILMTGGAASVKQHHSSAHNKDIALGVFDVVVTDPSCPASVLKCAEALQLPVVSQEWVIQCLIVGERIGFKQHPKYKHDYVSH

SEQ ID NO: 905730 - protein, 649 aa, Homo sapiens
MHSSGSSGKGAGPLRGKTSGTEPADFALPSSRGGPGKLSPRKGVSQTGTPVCEEDGDAGLGIRQGGKAPVTPRGRGRRGRPPSRTTGTRETAVPGPLGIEDISPNLSPDDKSFSRVVPRVPDSTRRTDVGAGALRRSDSPEIPFQAAAGPSDGLDASSPGNSFVGLRVVAKWSSNGYFYSGKITRDVGAGKYKLLFDDGYECDVLGKDILLCDPIPLDTEVTALSEDEYFSAGVVKGHRKESGELYYSIEKEGQRKWYKRMAVILSLEQGNRLREQYGLGPYEAVTPLTKAADISLDNLVEGKRKRRSNVSSPATPTASSSSSTTPTRKITESPRASMGVLSGKRKLITSEEERSPAKRGRKSATVKPGAVGAGEFVSPCESGDNTGEPSALEEQRGPLPLNKTLFLGYAFLLTMATTSDKLASRSKLPDGPTGSSEEEEEFLEIPPFNKQYTESQLRAGAGYILEDFNEAQCNTAYQCLLIADQHCRTRKYFLCLASGIPCVSHVWVHDSCHANQLQNYRNYLLPAGYSLEEQRILDWQPRENPFQNLKVLLVSDQQQNFLELWSEILMTGGAASVKQHHSSAHNKDIALGVFDVVVTDPSCPASVLKCAEALQLPVVSQEWVIQCLIVGERIGFKQHPKYKHDYVSH

SEQ ID NO: 905731 - protein, 389 aa, Homo sapiens
MAVILSLEQGNRLREQYGLGPYEAVTPLTKAADISLDNLVEGKRKRRSNVSSPATPTASSSSSTTPTRKITESPRASMGVLSGKRKLITSEEERSPAKRGRKSATVKPGAVGAGEFVSPCESGDNTGEPSALEEQRGPLPLNKTLFLGYAFLLTMATTSDKLASRSKLPDGPTGSSEEEEEFLEIPPFNKQYTESQLRAGAGYILEDFNEAQCNTAYQCLLIADQHCRTRKYFLCLASGIPCVSHVWVHDSCHANQLQNYRNYLLPAGYSLEEQRILDWQPRENPFQNLKVLLVSDQQQNFLELWSEILMTGGAASVKQHHSSAHNKDIALGVFDVVVTDPSCPASVLKCAEALQLPVVSQEWVIQCLIVGERIGFKQHPKYKHDYVSH

SEQ ID NO: 905732 - protein, 1760 aa, Homo sapiens
MPGEQMDPTGSQLDSDFSQQDTPCLIIEDSQPESQVLEDDSGSHFSMLSRHLPNLQTHKENPVLDVVSNPEQTAGEERGDGNSGFNEHLKENKVADPVDSSNLDTCGSISQVIEQLPQPNRTSSVLGMSVESAPAVEEEKGEELEQKEKEKEEDTSGNTTHSLGAEDTASSQLGFGVLELSQSQDVEENTVPYEVDKEQLQSVTTNSGYTRLSDVDANTAIKHEEQSNEDIPIAEQSSKDIPVTAQPSKDVHVVKEQNPPPARSEDMPFSPKASVAAMEAKEQLSAQELMESGLQIQKSPEPEVLSTQEDLFDQSNKTVSSDGCSTPSREEGGCSLASTPATTLHLLQLSGQRSLVQDSLSTNSSDLVAPSPDAFRSTPFIVPSSPTEQEGRQDKPMDTSVLSEEGGEPFQKKLQSGEPVELENPPLLPESTVSPQASTPISQSTPVFPPGSLPIPSQPQFSHDIFIPSPSLEEQSNDGKKDGDMHSSSLTVECSKTSEIEPKNSPEDLGLSLTGDSCKLMLSTSEYSQSPKMESLSSHRIDEDGENTQIEDTEPMSPVLNSKFVPAENDSILMNPAQDGEVQLSQNDDKTKGDDTDTRDDISILATGCKGREETVAEDVCIDLTCDSGSQAVPSPATRSEALSSVLDQEEAMEIKEHHPEEGSSGSEVEEIPETPCESQGEELKEENMESVPLHLSLTETQSQGLCLQKEMPKKECSEAMEVETSVISIDSPQKLAILDQELEHKEQEAWEEATSEDSSVVIVDVKEPSPRVDVSCEPLEGVEKCSDSQSWEDIAPEIEPCAENRLDTKEEKSVEYEGDLKSGTAETEPVEQDSSQPSLPLVRADDPLRLDQELQQPQTQEKTSNSLTEDSKMANAKQLSSDAEAQKLGKPSAHASQSFCESSSETPFHFTLPKEGDIIPPLTGATPPLIGHLKLEPKRHSTPIGISNYPESTIATSDVMSESMVETHDPILGSGKGDSGAAPDVDDKLCLRMKLVSPETEASEESLQFNLEKPATGERKNGSTAVAESVASPQKTMSVLSCICEARQENEARSEDPPTTPIRGNLLHFPSSQGEEEKEKLEGDHTIRQSQQPMKPISPVKDPVSPASQKMVIQGPSSPQGEAMVTDVLEDQKEGRSTNKENPSKALIERPSQNNIGIQTMECSLRVPETVSAATQTIKNVCEQGTSTVDQNFGKQDATVQTERGSGEKPVSAPGDDTESLHSQGEEEFDMPQPPHGHVLHRHMRTIREVRTLVTRVITDVYYVDGTEVERKVTEETEEPIVECQECETEVSPSQTGGSSGDLGDISSFSSKASSLHRTSSGTSLSAMHSSGSSGKGAGPLRGKTSGTEPADFALPSSRGGPGKLSPRKGVSQTGTPVCEEDGDAGLGIRQGGKAPVTPRGRGRRGRPPSRTTGTRETAVPGPLGIEDISPNLSPDDKSFSRVVPRVPDSTRRTDVGAGALRRSDSPEIPFQAAAGPSDGLDASSPGNSFVGLRVVAKWSSNGYFYSGKITRDVGAGKYKLLFDDGYECDVLGKDILLCDPIPLDTEVTALSEDEYFSAGVVKGHRKESGELYYSIEKEGQRKWYKRMAVILSLEQGNRLREQYGLGPYEAVTPLTKAADISLDNLVEGKRKRRSNVSSPATPTASSSSSTTPTRKITESPRASMGVLSGKRKLITSEEERSPAKRGRKSATVKPGKCSFLPHSSFRPWQNAGSAAGKMELNMWQWPFCPAIKSGSCPSPQVIFRDSSLYPSSPIPYRL

SEQ ID NO: 905733 - protein, 1582 aa, Homo sapiens
MPGEQMDPTGSQLDSDFSQQDTPCLIIEDSQPESQVLEDDSGSHFSMLSRHLPNLQTHKENPVLDVVSNPEQTAGEERGDGNSGFNEHLKENKVADPVDSSNLDTCGSISQVIEQLPQPNRTSSVLGMSVESAPAVEEEKGEELEQKEKEKEEDTSGNTTHSLGAEDTASSQLGFGVLELSQSQDVEENTVPYEVDKEQLQSVTTNSGYTRLSDVDANTAIKHEEQSNEDIPIAEQSSKDIPVTAQPSKDVHVVKEQNPPPARSEDMPFSPKASVAAMEAKEQLSAQELMESGLQIQKSPEPEVLSTQEDLFDQSNKTVSSDGCSTPSREEGGCSLASTPATTLHLLQLSGQRSLVQDSLSTNSSDLVAPSPDAFRSTPFIVPSSPTEQEGRQDKPMDTSVLSEEGGEPFQKKLQSGEPVELENPPLLPESTVSPQASTPISQSTPVFPPGSLPIPSQPQFSHDIFIPSPSLEEQSNDGKKDGDMHSSSLTVECSKTSEIEPKNSPEDLGLSLTGDSCKLMLSTSEYSQSPKMESLSSHRIDEDGENTQIEDTEPMSPVLNSKFVPAENDSILMNPAQDGEVQLSQNDDKTKGDDTDTRDDISILATGCKGREETVAEDVCIDLTCDSGSQAVPSPATRSEALSSVLDQEEAMEIKEHHPEEGSSGSEVEEIPETPCESQGEELKEENMESVPLHLSLTETQSQGLCLQKEMPKKECSEAMEVETSVISIDSPQKLAILDQELEHKEQEAWEEATSEDSSVVIVDVKEPSPRVDVSCEPLEGVEKCSDSQSWEDIAPEIEPCAENRLDTKEEKSVEYEGDLKSGTAETEPVEQDSSQPSLPLVRADDPLRLDQELQQPQTQEKTSNSLTEDSKMANAKQLSSDAEAQKLGKPSAHASQSFCESSSETPFHFTLPKEGDIIPPLTGATPPLIGHLKLEPKRHSTPIGISNYPESTIATSDVMSESMVETHDPILGSGKGDSGAAPDVDDKLCLRMKLVSPETEASEESLQFNLEKPATGERKNGSTAVAESVASPQKTMSVLSCICEARQENEARSEDPPTTPIRGNLLHFPSSQGEEEKEKLEGDHTIRQSQQPMKPISPVKDPVSPASQKMVIQGPSSPQGEAMVTDVLEDQKEGRSTNKENPSKALIERPSQNNIGIQTMECSLRVPETVSAATQTIKNVCEQGTSTVDQNFGKQDATVQTERGSGEKPVSAPGDDTESLHSQGEEEFDMPQPPHGHVLHRHMRTIREVRTLVTRVITDVYYVDGTEVERKVTEETEEPIVECQECETEVSPSQTGGSSGDLGDISSFSSKASSLHRTSSGTSLSAMHSSGSSGKGAGPLRGKTSGTEPADFALPSSRGGPGKLSPRKGVSQTGTPVCEEDGDAGLGIRQGGKAPVTPRGRGRRGRPPSRTTGTRETAVPGPLGIEDISPNLSPDDKSFSRVVPRVPDSTRRTDVGAGALRRSDSPEIPFQAAAGPSDGLDASSPGNSFVGLRVVAKWSSNGYFYSGKITRDVGAGKYKLLFDDGYECDVLGKDILLCDPIPLDTEVTALSEDEYFSAGNERSRVCRDFFVPWGNNTLLC

SEQ ID NO: 905734 - protein, 947 aa, Homo sapiens [sequence omitted]

SEQ ID NO: 905735 - protein, 753 aa, Homo sapiens
  misc_feature (740)..(740): Xaa can be any naturally occurring amino acid
MPGEQMDPTGSQLDSDFSQQDTPCLIIEDSQPESQVLEDDSGSHFSMLSRHLPNLQTHKENPVLDVVSNPEQTAGEERGDGNSGFNEHLKENKVADPVDSSNLDTCGSISQVIEQLPQPNRTSSVLGMSVESAPAVEEEKGEELEQKEKEKEEDTSGNTTHSLGAEDTASSQLGFGVLELSQSQDVEENTVPYEVDKEQLQSVTTNSGYTRLSDVDANTAIKHEEQSNEDIPIAEQSSKDIPVTAQPSKDVHVVKEQNPPPARSEDMPFSPKASVAAMEAKEQLSAQELMESGLQIQKSPEPEVLSTQEDLFDQSNKTVSSDGCSTPSREEGGCSLASTPATTLHLLQLSGQRSLVQDSLSTNSSDLVAPSPDAFRSTPFIVPSSPTEQEGRQDKPMDTSVLSEEGGEPFQKKLQSGEPVELENPPLLPESTVSPQASTPISQSTPVFPPGSLPIPSQPQFSHDIFIPSPSLEEQSNDGKKDGDMHSSSLTVECSKTSEIEPKNSPEDLGLSLTGDSCKLMLSTSEYSQSPKMESLSSHRIDEDGENTQIEDTEPMSPVLNSKFVPAENDSILMNPAQDGEVQLSQNDDKTKGDDTDTRDDISILATGCKGREETVAEDVCIDLTCDSGSQAVPSPATRSEALSSVLDQEEAMEIKEHHPEEGSSGSEVEEIPETPCESQGEELKEENMESVPLHLSLTETQSRRWLASGPWSSGSISVKEEHPLLSRPAKGVSLSLGEXGEDSTPPPLVEGL

SEQ ID NO: 905736 - protein, 556 aa, Homo sapiens
MPGEQMDPTGSQLDSDFSQQDTPCLIIEDSQPESQVLEDDSGSHFSMLSRHLPNLQTHKENPVLDVVSNPEQTAGEERGDGNSGFNEHLKENKVADPVDSSNLDTCGSISQVIEQLPQPNRTSSVLGMSVESAPAVEEEKGEELEQKEKEKEEDTSGNTTHSLGAEDTASSQLGFGVLELSQSQDVEENTVPYEVDKEQLQSVTTNSGYTRLSDVDANTAIKHEEQSNEDIPIAEQSSKDIPVTAQPSKDVHVVKEQNPPPARSEDMPFSPKASVAAMEAKEQLSAQELMESGLQIQKSPEPEVLSTQEDLFDQSNKTVSSDGCSTPSREEGGCSLASTPATTLHLLQLSGQRSLVQDSLSTNSSDLVAPSPDAFRSTPFIVPSSPTEQEGRQDKPMDTSVLSEEGGEPFQKKLQSGEPVELENPPLLPESTVSPQASTPISQSTPVFPPGSLPIPSQPQFSHDIFIPSPSLEEQSNDGKKDGDMHSSSLTVECSKTSEIEPKNSPEDLGLSLTGDSCKLMLSTSEYSQSPKMESLSPGVRDLPGQYSETPFSRKR

SEQ ID NO: 905737 - protein, 1972 aa, Homo sapiens
MDPTGSQLDSDFSQQDTPCLIIEDSQPESQVLEDDSGSHFSMLSRHLPNLQTHKENPVLDVVSNPEQTAGEERGDGNSGFNEHLKENKVADPVDSSNLDTCGSISQVIEQLPQPNRTSSVLGMSVESAPAVEEEKGEELEQKEKEKEEDTSGNTTHSLGAEDTASSQLGFGVLELSQSQDVEENTVPYEVDKEQLQSVTTNSGYTRLSDVDANTAIKHEEQSNEDIPIAEQSSKDIPVTAQPSKDVHVVKEQNPPPARSEDMPFSPKASVAAMEAKEQLSAQELMESGLQIQKSPEPEVLSTQEDLFDQSNKTVSSDGCSTPSREEGGCSLASTPATTLHLLQLSGQRSLVQDSLSTNSSDLVAPSPDAFRSTPFIVPSSPTEQEGRQDKPMDTSVLSEEGGEPFQKKLQSGEPVELENPPLLPESTVSPQASTPISQSTPVFPPGSLPIPSQPQFSHDIFIPSPSLEEQSNDGKKDGDMHSSSLTVECSKTSEIEPKNSPEDLGLSLTGDSCKLMLSTSEYSQSPKMESLSSHRIDEDGENTQIEDTEPMSPVLNSKFVPAENDSILMNPAQDGEVQLSQNDDKTKGDDTDTRDDISILATGCKGREETVAEDVCIDLTCDSGSQAVPSPATRSEALSSVLDQEEAMEIKEHHPEEGSSGSEVEEIPETPCESQGEELKEENMESVPLHLSLTETQSQGLCLQKEMPKKECSEAMEVETSVISIDSPQKLAILDQELEHKEQEAWEEATSEDSSVVIVDVKEPSPRVDVSCEPLEGVEKCSDSQSWEDIAPEIEPCAENRLDTKEEKSVEYEGDLKSGTAETEPVEQDSSQPSLPLVRADDPLRLDQELQQPQTQEKTSNSLTEDSKMANAKQLSSDAEAQKLGKPSAHASQSFCESSSETPFHFTLPKEGDIIPPLTGATPPLIGHLKLEPKRHSTPIGISNYPESTIATSDVMSESMVETHDPILGSGKGDSGAAPDVDDKLCLRMKLVSPETEASEESLQFNLEKPATGERKNGSTAVAESVASPQKTMSVLSCICEARQENEARSEDPPTTPIRGNLLHFPSSQGEEEKEKLEGDHTIRQSQQPMKPISPVKDPVSPASQKMVIQGPSSPQGEAMVTDVLEDQKEGRSTNKENPSKALIERPSQNNIGIQTMECSLRVPETVSAATQTIKNVCEQGTSTVDQNFGKQDATVQTERGSGEKPVSAPGDDTESLHSQGEEEFDMPQPPHGHVLHRHMRTIREVRTLVTRVITDVYYVDGTEVERKVTEETEEPIVECQECETEVSPSQTGGSSGDLGDISSFSSKASSLHRTSSGTSLSAMHSSGSSGKGAGPLRGKTSGTEPADFALPSSRGGPGKLSPRKGVSQTGTPVCEEDGDAGLGIRQGGKAPVTPRGRGRRGRPPSRTTGTRETAVPGPLGIEDISPNLSPDDKSFSRVVPRVPDSTRRTDVGAGALRRSDSPEIPFQAAAGPSDGLDASSPGNSFVGLRVVAKWSSNGYFYSGKITRDVGAGKYKLLFDDGYECDVLGKDILLCDPIPLDTEVTALSEDEYFSAGVVKGHRKESGELYYSIEKEGQRKWYKRMAVILSLEQGNRLREQYGLGPYEAVTPLTKAADISLDNLVEGKRKRRSNVSSPATPTASSSSSTTPTRKITESPRASMGVLSGKRKLITSEEERSPAKRGRKSATVKPGAVGAGEFVSPCESGDNTGEPSALEEQRGPLPLNKTLFLGYAFLLTMATTSDKLASRSKLPDGPTGSSEEEEEFLEIPPFNKQYTESQLRAGAGYILEDFNEAQCNTAYQCLLIADQHCRTRKYFLCLASGIPCVSHVWVHDSCHANQLQNYRNYLLPAGYSLEEQRILDWQPRENPFQNLKVLLVSDQQQNFLELWSEILMTGGAASVKQHHSSAHNKDIALGVFDVVVTDPSCPASVLKCAEALQLPVVSQEWVIQCLIVGERIGFKQHPKYKHDYVSH

SEQ ID NO: 905738 - protein, 177 aa, Homo sapiens
MPGEQMDPTGSQLDSDFSQQDTPCLIIEDSQPESQVLEDDSGSHFSMLSRHLPNLQTHKENPVLKKKNCVGRGPGPPEKGFFKTPTVVWGGAAPKSRGYGEASVATQSVLPQEGTSPGQEKEGPGSISTPNIRKGPGGTPGGVWEQHYEDGRFSEHTNGSSQRGAPGQARNQISRAG

SEQ ID NO: 905739 - protein, 1977 aa, Homo sapiens; identical to SEQ ID NO: 905723

SEQ ID NO: 905740 - protein, 1806 aa, Homo sapiens [sequence omitted]

SEQ ID NO: 905741 - protein, 1806 aa, Homo sapiens [sequence omitted]

SEQ ID NO: 905742 - protein, 1806 aa, Homo sapiens [sequence omitted]

SEQ ID NO: 905743 - protein, 619 aa, Homo sapiens
MTNLSSFSSPRKGVSQTGTPVCEEDGDAGLGIRQGGKAPVTPRGRGRRGRPPSRTTGTRETAVPGPLGIEDISPNLSPDDKSFSRVVPRVPDSTRRTDVGAGALRRSDSPEIPFQAAAGPSDGLDASSPGNSFVGLRVVAKWSSNGYFYSGKITRDVGAGKYKLLFDDGYECDVLGKDILLCDPIPLDTEVTALSEDEYFSAGVVKGHRKESGELYYSIEKEGQRKWYKRMAVILSLEQGNRLREQYGLGPYEAVTPLTKAADISLDNLVEGKRKRRSNVSSPATPTASSSSSTTPTRKITESPRASMGVLSGKRKLITSEEERSPAKRGRKSATVKPGAVGAGEFVSPCESGDNTGEPSALEEQRGPLPLNKTLFLGYAFLLTMATTSDKLASRSKLPDGPTGSSEEEEEFLEIPPFNKQYTESQLRAGAGYILEDFNEAQCNTAYQCLLIADQHCRTRKYFLCLASGIPCVSHVWVHDSCHANQLQNYRNYLLPAGYSLEEQRILDWQPRENPFQNLKVLLVSDQQQNFLELWSEILMTGGAASVKQHHSSAHNKDIALGVFDVVVTDPSCPASVLKCAEALQLPVVSQEWVIQCLIVGERIGFKQHPKYKHDYVSH

SEQ ID NO: 905744 - protein, 1755 aa, Homo sapiens
MPGEQMDPTGSQLDSDFSQQDTPCLIIEDSQPESQVLEDDSGSHFSMLSRHLPNLQTHKENPVLDVVSNPEQTAGEERGDGNSGFNEHLKENKVADPVDSSNLDTCGSISQVIEQLPQPNRTSSVLGMSVESAPAVEEEKGEELEQKEKEKEEDTSGNTTHSLGAEDTASSQLGFGVLELSQSQDVEENTVPYEVDKEQLQSVTTNSGYTRLSDVDANTAIKHEEQSNEDIPIAEQSSKDIPVTAQPSKDVHVVKEQNPPPARSEDMPFSPKASVAAMEAKEQLSAQELMESGLQIQKSPEPEVLSTQEDLFDQSNKTVSSDGCSTPSREEGGCSLASTPATTLHLLQLSGQRSLVQDSLSTNSSDLVAPSPDAFRSTPFIVPSSPTEQEGRQDKPMDTSVLSEEGGEPFQKKLQSGEPVELENPPLLPESTVSPQASTPISQSTPVFPPGSLPIPSQPQFSHDIFIPSPSLEEQSNDGKKDGDMHSSSLTVECSKTSEIEPKNSPEDLGLSLTGDSCKLMLSTSEYSQSPKMESLSSHRIDEDGENTQIEDTEPMSPVLNSKFVPAENDSILMNPAQDGEVQLSQNDDKTKGDDTDTRDDISILATGCKGREETVAEDVCIDLTCDSGSQAVPSPATRSEALSSVLDQEEAMEIKEHHPEEGSSGSEVEEIPETPCESQGEELKEENMESVPLHLSLTETQSQGLCLQKEMPKKECSEAMEVETSVISIDSPQKLAILDQELEHKEQEAWEEATSEDSSVVIVDVKEPSPRVDVSCEPLEGVEKCSDSQSWEDIAPEIEPCAENRLDTKEEKSVEYEGDLKSGTAETEPVEQDSSQPSLPLVRADDPLRLDQELQQPQTQEKTSNSLTEDSKMANAKQLSSDAEAQKLGKPSAHASQSFCESSSETPFHFTLPKEGDIIPPLTGATPPLIGHLKLEPKRHSTPIGISNYPESTIATSDVMSESMVETHDPILGSGKGDSGAAPDVDDKLCLRMKLVSPETEASEESLQFNLEKPATGERKNGSTAVAESVASPQKTMSVLSCICEARQENEARSEDPPTTPIRGNLLHFPSSQGEEEKEKLEGDHTIRQSQQPMKPISPVKDPVSPASQKMVIQGPSSPQGEAMVTDVLEDQKEGRSTNKENPSKALIERPSQNNIGIQTMECSLRVPETVSAATQTIKNVCEQGTSTVDQNFGKQDATVQTERGSGEKPVSAPGDDTESLHSQGEEEFDMPQPPHGHVLHRHMRTIREVRTLVTRVITDVYYVDGTEVERKVTEETEEPIVECQECETEVSPSQTGGSSGDLGDISSFSSKASSLHRTSSGTSLSAMHSSGSSGKGAGPLRGKTSGTEPADFALPSSRGGPGKLSPRKGVSQTGTPVCEEDGDAGLGIRQGGKAPVTPRGRGRRGRPPSRTTGTRETAVPGPLGIEDISPNLSPDDKSFSRVVPRVPDSTRRTDVGAGALRRSDSPEIPFQAAAGPSDGLDASSPGNSFVGLRVVAKWSSNGYFYSGKITRDVGAGKYKLLFDDGYECDVLGKDILLCDPIPLDTEVTALSEDEYFSAGVVKGHRKESGELYYSIEKEGQRKWYKRMAVILSLEQGNRLREQYGLGPYEAVTPLTKAADISLDNLVEGKRKRRSNVSSPATPTASSSSSTTPTRKITESPRASMGVLSGKRKLITSEEERSPAKRGRKSATVKPGAVGAGEFVSPCESGDNTGEPSALEEQRGPLPLNKTLFLGYAFPYTYGDSFSYGQQELF

SEQ ID NO: 905745 - protein, 326 aa, Homo sapiens
FLAQISSSGQCLPIRSCLVLGPFGVKAFAEAMVCIPLVTVPLSFPGAVGAGEFVSPCESGDNTGEPSALEEQRGPLPLNKTLFLGYAFLLTMATTSDKLASRSKLPDGPTGSSEEEEEFLEIPPFNKQYTESQLRAGAGYILEDFNEAQCNTAYQCLLIADQHCRTRKYFLCLASGIPCVSHVWVHDSCHANQLQNYRNYLLPAGYSLEEQRILDWQPRENPFQNLKVLLVSDQQQNFLELWSEILMTGGAASVKQHHSSAHNKDIALGVFDVVVTDPSCPASVLKCAEALQLPVVSQEWVIQCLIVGERIGFKQHPKYKHDYVSH

SEQ ID NO: 905746 - protein, 1393 aa, Homo sapiens
MPGEQMDPTGSQLDSDFSQQDTPCLIIEDSQPESQVLEDDSGSHFSMLSRHLPNLQTHKENPVLDVVSNPEQTAGEERGDGNSGFNEHLKENKVADPVDSSNLDTCGSISQVIEQLPQPNRTSSVLGMSVESAPAVEEEKGEELEQKEKEKEEDTSGNTTHSLGAEDTASSQLGFGVLELSQSQDVEENTVPYEVDKEQLQSVTTNSGYTRLSDVDANTAIKHEEQSNEDIPIAEQSSKDIPVTAQPSKDVHVVKEQNPPPARSEDMPFSPKASVAAMEAKEQLSAQELMESGLQIQKSPEPEVLSTQEDLFDQSNKTVSSDGCSTPSREEGGCSLASTPATTLHLLQLSGQRSLVQDSLSTNSSDLVAPSPDAFRSTPFIVPSSPTEQEGRQDKPMDTSVLSEEGGEPFQKKLQSGEPVELENPPLLPESTVSPQASTPISQSTPVFPPGSLPIPSQPQFSHDIFIPSPSLEEQSNDGKKDGDMHSSSLTVECSKTSEIEPKNSPEDLGLSLTGDSCKLMLSTSEYSQSPKMESLSSHRIDEDGENTQIEDTEPMSPVLNSKFVPAENDSILMNPAQDGEVQLSQNDDKTKGDDTDTRDDISILATGCKGREETVAEDVCIDLTCDSGSQAVPSPATRSEALSSVLDQEEAMEIKEHHPEEGSSGSEVEEIPETPCESQGEELKEENMESVPLHLSLTETQSQGLCLQKEMPKKECSEAMEVETSVISIDSPQKLAILDQELEHKEQEAWEEATSEDSSVVIVDVKEPSPRVDVSCEPLEGVEKCSDSQSWEDIAPEIEPCAENRLDTKEEKSVEYEGDLKSGTAETEPVEQDSSQPSLPLVRADDPLRLDQELQQPQTQEKTSNSLTEDSKMANAKQLSSDAEAQKLGKPSAHASQSFCESSSETPFHFTLPKEGDIIPPLTGATPPLIGHLKLEPKRHSTPIGISNYPESTIATSDVMSESMVETHDPILGSGKGDSGAAPDVDDKLCLRMKLVSPETEASEESLQFNLEKPATGERKNGSTAVAESVASPQKTMSVLSCICEARQENEARSEDPPTTPIRGNLLHFPSSQGEEEKEKLEGDHTIRQSQQPMKPISPVKDPVSPASQKMVIQGPSSPQGEAMVTDVLEDQKEGRSTNKENPSKALIERPSQNNIGIQTMECSLRVPETVSAATQTIKNVCEQGTSTVDQNFGKQDATVQTERGSGEKPVSAPGDDTESLHSQGEEEFDMPQPPHGHVLHRHMRTIREVRTLVTRVITDVYYVDGTEVERKVTEETEEPIVECQECETEVSPSQTGGSSGDLGDISSFSSKASSLHRTSSGTSLSAMHSSGSSGKGAGPLRGKTSGTEPADFALPSSRGGPGKLRCRQGLQRERATAGAGTASVSVDAAAN

SEQ ID NO: 905747 - protein, 780 aa, Homo sapiens
MPGEQMDPTGSQLDSDFSQQDTPCLIIEDSQPESQVLEDDSGSHFSMLSRHLPNLQTHKENPVLDVVSNPEQTAGEERGDGNSGFNEHLKENKVADPVDSSNLDTCGSISQVIEQLPQPNRTSSVLGMSVESAPAVEEEKGEELEQKEKEKEEDTSGNTTHSLGAEDTASSQLGFGVLELSQSQDVEENTVPYEVDKEQLQSVTTNSGYTRLSDVDANTAIKHEEQSNEDIPIAEQSSKDIPVTAQPSKDVHVVKEQNPPPARSEDMPFSPKASVAAMEAKEQLSAQELMESGLQIQKSPEPEVLSTQEDLFDQSNKTVSSDGCSTPSREEGGCSLASTPATTLHLLQLSGQRSLVQDSLSTNSSDLVAPSPDAFRSTPFIVPSSPTEQEGRQDKPMDTSVLSEEGGEPFQKKLQSGEPVELENPPLLPESTVSPQASTPISQSTPVFPPGSLPIPSQPQFSHDIFIPSPSLEEQSNDGKKDGDMHSSSLTVECSKTSEIEPKNSPEDLGLSLTGDSCKLMLSTSEYSQSPKMESLSSHRIDEDGENTQIEDTEPMSPVLNSKFVPAENDSILMNPAQDGEVQLSQNDDKTKGDDTDTRDDISILATGCKGREETVAEDVCIDLTCDSGSQAVPSPATRSEALSSVLDQEEAMEIKEHHPEEGSSGSEVEEIPETPCESQGEELKEENMESVPLHLSLTETQSQGLCLQKEMPKKECSEAMEVETSVISIDSPQKLAILDQELEHKEQEAWEEATSEDSSVVIVDVKEPSPRVDVSCQPS

SEQ ID NO: 905748 - protein, 110 aa, Homo sapiens
ETEEPIVECQECETEVSPSQTGGSSGDLGDISSFSSKASSLHRTSSGTSLSAMHSSGSSGKGAGPLRGKTSGTEPADFALPSSRGGPGKLRCRQGLQRERATAGAGLLTF

SEQ ID NO: 905749 - protein, 315 aa, Homo sapiens
MEARAQSGNGSQPLLQTPRDGGRQRGEPDPRDALTQQVHVLSLDQIRAIRNTNEYTEGPTVVPRPGLKPAPRPSTQHKHERLHGLPEHRQPPRLQHSQVHSSARAPLSRSISTVSSGSRSSTRTSTSSSSSEQRLLGSSFSSGPVADGIIRVQPKSELKPGELKPLSKEDLGLHAYRCEDCGKCKCKECTYPRPLPSDWICDKQCLCSAQNVIDYGTCVCCVKGLFYHCSNDDEDNCADNPCSCSQSHCCTRWSAMGVMSLFLPCLWCYLPAKGCLKLCQGCYDRVNRPGCRCKNSNTVCCKVPTVPPRNFEKPT

SEQ ID NO: 905750 - protein, 145 aa, Homo sapiens
HEGKAVFFSHSLICQEKGLAVGASASCSLRKKRKYSACACRRGVVSSSEPRSVHQRGIWLRILFFSPADCSEVGLFFLLVEGKVQGEAVPRRGAGGAGGHRLPASGAGDFQGEKKAGCRVEGVPASAPCGQSSPERVGASPCLAP

SEQ ID NO: 905751 - protein, 315 aa, Homo sapiens; identical to SEQ ID NO: 905749

SEQ ID NO: 905752 - protein, 315 aa, Homo sapiens; identical to SEQ ID NO: 905749

SEQ ID NO: 905753 - protein, 315 aa, Homo sapiens; identical to SEQ ID NO: 905749

SEQ ID NO: 905754 - protein, 668 aa, Homo sapiens
PGRPSPTRFRPRLGSPASASAAARGCPAMALSRGLPRELAEAVAGGRVLVVGAGGIGCELLKNLVLTGFSHIDLIDLDTIDVSNLNRQFLFQKKHVGRSKAQVAKESVLQFYPKANIVAYHDSIMNPDYNVEFFRQFILVMNALDNRAARNHVNRMCLAADVPLIESGTAGYLGQVTTIKKGVTECYECHPKPTQRTFPGCTIRNTPSEPIHCIVWAKYLFNQLFGEEDADQEVSPDRADPEAAWEPTEAEARARASNEDGDIKRISTKEWAKSTGYDPVKLFTKLFKDDIRYLLTMDKLWRKRKPPVPLDWAEVQSQGEETNASDQQNEPQLGLKDQQVLDVKSYARLFSKSIETLRVHLAEKGDGAELIWDKDDPSAMDFVTSAANLRMHIFSMNMKSRFDIKSMAGNIIPAIATTNAVIAGLIVLEGLKILSGKIDQCRTIFLNKQPNPRKKLLVPCALDPPNPNCYVCASKPEVTVRLNVHKVTVLTLQDKIVKEKFAMVAPDVQIEDGKGTILISSEEGETEANNHKKLSEFGIRNGSRLQADDFLQDYTLLINILHSEDLGKDVEFEVVGDAPEKVGPKQAEDAAKSITNGSDDGAQPSTSTAQEQDDVLIVDSDEEDSSNNADVSEEERSRKRKLDEKENLSAKRSRIEQKEELDDVIALD

SEQ ID NO: 905755 - protein, 260 aa, Homo sapiens
QAALPPPASGRGSVLPPPPPPRLVVVPPWHCRGGCPGSWLRRWPGAGCWWWGRAASAASSSRISCSPVSPTSTCHQGLTILLRLVLKVWAQAILSLCPPKVLGLQIDLDTIDVSNLNRQFLFQKKHVGRSKAQVAKESVLQFYPKANIVAYHDSIMNPDYNVEFFRQFILVMNALDNRAARNHVNRMCLAADVPLIESGTAGYLGQVTTIKKGVTECYECHPKPTQRTFPGCTIRNTPSEPIHCIVWAKYLFNQCWGTTM

SEQ ID NO: 905756 - protein, 668 aa, Homo sapiens; identical to SEQ ID NO: 905754

SEQ ID NO: 905757 - protein, 668 aa, Homo sapiens; identical to SEQ ID NO: 905754

SEQ ID NO: 905758 - protein, 610 aa, Homo sapiens
DSRGVPRIDGFSHIDLIDLDTIDVSNLNRQFLFQKKHVGRSKAQVAKESVLQFYPKANIVAYHDSIMNPDYNVEFFRQFILVMNALDNRAARNHVNRMCLAADVPLIESGTAGYLGQVTTIKKGVTECYECHPKPTQRTFPGCTIRNTPSEPIHCIVWAKYLFNQLFGEEDADQEVSPDRADPEAAWEPTEAEARARASNEDGDIKRISTKEWAKSTGYDPVKLFTKLFKDDIRYLLTMDKLWRKRKPPVPLDWAEVQSQGEETNASDQQNEPQLGLKDQQVLDVKSYARLFSKSIETLRVHLAEKGDGAELIWDKDDPSAMDFVTSAANLRMHIFSMNMKSRFDIKSMAGNIIPAIATTNAVIAGLIVLEGLKILSGKIDQCRTIFLNKQPNPRKKLLVPCALDPPNPNCYVCASKPEVTVRLNVHKVTVLTLQDKIVKEKFAMVAPDVQIEDGKGTILISSEEGETEANNHKKLSEFGIRNGSRLQADDFLQDYTLLINILHSEDLGKDVEFEVVGDAPEKVGPKQAEDAAKSITNGSDDGAQPSTSTAQEQDDVLIVDSDEEDSSNNADVSEEERSRKRKLDEKENLSAKRSRIEQKEELDDVIALD

SEQ ID NO: 905759 - protein, 528 aa, Homo sapiens [sequence omitted]

SEQ ID NO: 905760 - protein, 582 aa, Homo sapiens
DSRGVPRIDGFSHIDLVAKESVLQFYPKANIVAYHDSIMNPDYNVEFFRQFILVMNALDNRAARNHVNRMCLAADVPLIESGTAGYLGQVTTIKKGVTECYECHPKPTQRTFPGCTIRNTPSEPIHCIVWAKYLFNQLFGEEDADQEVSPDRADPEAAWEPTEAEARARASNEDGDIKRISTKEWAKSTGYDPVKLFTKLFKDDIRYLLTMDKLWRKRKPPVPLDWAEVQSQGEETNASDQQNEPQLGLKDQQVLDVKSYARLFSKSIETLRVHLAEKGDGAELIWDKDDPSAMDFVTSAANLRMHIFSMNMKSRFDIKSMAGNIIPAIATTNAVIAGLIVLEGLKILSGKIDQCRTIFLNKQPNPRKKLLVPCALDPPNPNCYVCASKPEVTVRLNVHKVTVLTLQDKIVKEKFAMVAPDVQIEDGKGTILISSEEGETEANNHKKLSEFGIRNGSRLQADDFLQDYTLLINILHSEDLGKDVEFEVVGDAPEKVGPKQAEDAAKSITNGSDDGAQPSTSTAQEQDDVLIVDSDEEDSSNNADVSEEERSRKRKLDEKENLSAKRSRIEQKEELDDVIALD

SEQ ID NO: 905761 - protein, 593 aa, Homo sapiens
AGNNHLVRKTNTKNISGEQSLGRSKAQVAKESVLQFYPKANIVAYHDSIMNPDYNVEFFRQFILVMNALDNRAARNHVNRMCLAADVPLIESGTAGYLGQVTTIKKGVTECYECHPKPTQRTFPGCTIRNTPSEPIHCIVWAKYLFNQLFGEEDADQEVSPDRADPEAAWEPTEAEARARASNEDGDIKRISTKEWAKSTGYDPVKLFTKLFKDDIRYLLTMDKLWRKRKPPVPLDWAEVQSQGEETNASDQQNEPQLGLKDQQVLDVKSYARLFSKSIETLRVHLAEKGDGAELIWDKDDPSAMDFVTSAANLRMHIFSMNMKSRFDIKSMAGNIIPAIATTNAVIAGLIVLEGLKILSGKIDQCRTIFLNKQPNPRKKLLVPCALDPPNPNCYVCASKPEVTVRLNVHKVTVLTLQDKIVKEKFAMVAPDVQIEDGKGTILISSEEGETEANNHKKLSEFGIRNGSRLQADDFLQDYTLLINILHSEDLGKDVEFEVVGDAPEKVGPKQAEDAAKSITNGSDDGAQPSTSTAQEQDDVLIVDSDEEDSSNNADVSEEERSRKRKLDEKENLSAKRSRIEQKEELDDVIALD

SEQ ID NO: 905762 - protein, 524 aa, Homo sapiens
PGRPSPTRFRPRLGSPASASAAARGCPAMALSRGLPRELAEAVAGGRVLVVGAGGIGCELLKNLVLTGFSHIDLIDLDTIDVSNLNRQFLFQKKHVGRSKAQVAKESVLQFYPKANIVAYHDSIMNPDYNVEFFRQFILVMNALDNRAARNHVNRMCLAADVPLIESGTAGYLGQVTTIKKGVTECYECHPKPTQRTFPGCTIRNTPSEPIHCIVWAKYLFNQLFGEEDADQEVSPDRADPEAAWEPTEAEARARASNEDGDIKRISTKEWAKSTGYDPVKLFTKLFKDDIRYLLTMDKLWRKRKPPVPLDWAEVQSQGEETNASDQQNEPQLGLKDQQVLDVKSYARLFSKSIETLRVHLAEKGDGAELIWDKDDPSAMDFVTSAANLRMHIFSMNMKSRFDIKSMAGNIIPAIATTNAVIAGLIVLEGLKILSGKIDQCRTIFLNKQPNPRKKLLVPCALDPPNPNCYVCASKPEVTVRLNVHKVTVLTLQDKLIITRSCQNLELEMAAGFKQMTSSRTILY

SEQ ID NO: 905763 - protein, 552 aa, Homo sapiens
PGRPSPTRFRPRLGSPASASAAARGCPAMALSRGLPRELAEAVAGGRVLVVGAGGIGCELLKNLVLTGFSHIDLIDLDTIDVSNLNRQFLFQKKHVGRSKAQVAKESVLQFYPKANIVAYHDSIMNPDYNVEFFRQFILVMNALDNRAARNHVNRMCLAADVPLIESGTAGYLGQVTTIKKGVTECYECHPKPTQRTFPGCTIRNTPSEPIHCIVWAKYLFNQLFGEEDADQEVSPDRADPEAAWEPTEAEARARASNEDGDIKRISTKEWAKSTGYDPVKLFTKLFKDDIRYLLTMDKLWRKRKPPVPLDWAEVQSQGEETNASDQQNEPQLGLKDQQVLDVKSYARLFSKSIETLRVHLAEKGDGAELIWDKDDPSAMDFVTSAANLRMHIFSMNMKSRFDIKSMAGNIIPAIATTNAVIAGLIVLEGLKILSGKIDQCRTIFLNKQPNPRKKLLVPCALDPPNPNCYVCASKPEVTVRLNVHKVTVLTLQDKIVKEKFAMVAPDVQIEDGKGTILISSEEGETEANNHKKLSEFGIRNGSRLKSKMTFS

SEQ ID NO: 905764 - protein, 358 aa, Homo sapiens
LIYIFFSLGEETNASDQQNEPQLGLKDQQVLDVKSYARLFSKSIETLRVHLAEKGDGAELIWDKDDPSAMDFVTSAANLRMHIFSMNMKSRFDIKSMAGNIIPAIATTNAVIAGLIVLEGLKILSGKIDQCRTIFLNKQPNPRKKLLVPCALDPPNPNCYVCASKPEVTVRLNVHKVTVLTLQDKIVKEKFAMVAPDVQIEDGKGTILISSEEGETEANNHKKLSEFGIRNGSRLQADDFLQDYTLLINILHSEDLGKDVEFEVVGDAPEKVGPKQAEDAAKSITNGSDDGAQPSTSTAQEQDDVLIVDSDEEDSSNNADVSEEERSRKRKLDEKENLSAKRSRIEQKEELDDVIALD

SEQ ID NO: 905765 - protein, 166 aa, Homo sapiens
MVAPDVQIEDGKGTILISSEEGETEANNHKKLSEFGIRNGSRLQADDFLQDYTLLINILHSEDLGKDVEFEVVGDAPEKVGPKQAEDAAKSITNGSDDGAQPSTSTAQEQDDVLIVDSDEEDSSNNADVSEEERSRKRKLDEKENLSAKRSRIEQKEELDDVIALD

SEQ ID NO: 905766 - protein, 122 aa, Homo sapiens
  misc_feature (9)..(9): Xaa can be any naturally occurring amino acid
GFGISPRSXFIDQTSFIEDLGKDVEFEVVGDAPEKVGPKQAEDAAKSITNGSDDGAQPSTSTAQEQDDVLIVDSDEEDSSNNADVSEEERSRKRKLDEKENLSAKRSRIEQKEELDDVIALD

SEQ ID NO: 905767 - protein, 337 aa, Homo sapiens
PGRPSPTRFRPRLGSPASASAAARGCPAMALSRGLPRELAEAVAGGRVLVVGAGGIGCELLKNLVLTGFSHIDLIDLDTIDVSNLNRQFLFQKKHVGRSKAQVAKESVLQFYPKANIVAYHDSIMNPDYNVEFFRQFILVMNALDNRAARNHVNRMCLAADVPLIESGTAGYLGQVTTIKKGVTECYECHPKPTQRTFPGCTIRNTPSEPIHCIVWAKYLFNQLFGEEDADQEVSPDRADPEAAWEPTEAEARARASNEDGDIKRISTKEWAKSTGYDPVKLFTKLFKDDIRYLLTMDKLWRKRKPPVPLDWAEVQSQGRSKRTASGLYITAERNLW

SEQ ID NO: 905768 - protein, 131 aa, Homo sapiens
MALSRGLPRELAEAVAGGRVLVVGAGGIGCELLKNLVLTGFSHIDLIDLDTIDVSNLNRQFLFQKKHVGRSKAQVAKESVLQFYPKANIVAYHDSIMNPDYNVEFFRQFILVMNALDNRATLTIATRDPLD

SEQ ID NO: 905769 - protein, 640 aa, Homo sapiens
MALSRGLPRELAEAVAGGRVLVVGAGGIGCELLKNLVLTGFSHIDLIDLDTIDVSNLNRQFLFQKKHVGRSKAQVAKESVLQFYPKANIVAYHDSIMNPDYNVEFFRQFILVMNALDNRAARNHVNRMCLAADVPLIESGTAGYLGQVTTIKKGVTECYECHPKPTQRTFPGCTIRNTPSEPIHCIVWAKYLFNQLFGEEDADQEVSPDRADPEAAWEPTEAEARARASNEDGDIKRISTKEWAKSTGYDPVKLFTKLFKDDIRYLLTMDKLWRKRKPPVPLDWAEVQSQGEETNASDQQNEPQLGLKDQQVLDVKSYARLFSKSIETLRVHLAEKGDGAELIWDKDDPSAMDFVTSAANLRMHIFSMNMKSRFDIKSMAGNIIPAIATTNAVIAGLIVLEGLKILSGKIDQCRTIFLNKQPNPRKKLLVPCALDPPNPNCYVCASKPEVTVRLNVHKVTVLTLQDKIVKEKFAMVAPDVQIEDGKGTILISSEEGETEANNHKKLSEFGIRNGSRLQADDFLQDYTLLINILHSEDLGKDVEFEVVGDAPEKVGPKQAEDAAKSITNGSDDGAQPSTSTAQEQDDVLIVDSDEEDSSNNADVSEEERSRKRKLDEKENLSAKRSRIEQKEELDDVIALD

SEQ ID NO: 905770 - protein, 668 aa, Homo sapiens; identical to SEQ ID NO: 905754

SEQ ID NO: 905771 - protein, 699 aa, Homo sapiens
QAALPPPASGRGSVLPPPPPPRLVVVPPWHCRGGCPGSWLRRWPGAGCWWWGRAASAASSSRISCSPVSPTSTCHQGLTILLRLVLKVWAQAILSLCPPKVLGLQIDLDTIDVSNLNRQFLFQKKHVGRSKAQVAKESVLQFYPKANIVAYHDSIMNPDYNVEFFRQFILVMNALDNRAARNHVNRMCLAADVPLIESGTAGYLGQVTTIKKGVTECYECHPKPTQRTFPGCTIRNTPSEPIHCIVWAKYLFNQLFGEEDADQEVSPDRADPEAAWEPTEAEARARASNEDGDIKRISTKEWAKSTGYDPVKLFTKLFKDDIRYLLTMDKLWRKRKPPVPLDWAEVQSQGEETNASDQQNEPQLGLKDQQVLDVKSYARLFSKSIETLRVHLAEKGDGAELIWDKDDPSAMDFVTSAANLRMHIFSMNMKSRFDIKSMAGNIIPAIATTNAVIAGLIVLEGLKILSGKIDQCRTIFLNKQPNPRKKLLVPCALDPPNPNCYVCASKPEVTVRLNVHKVTVLTLQDKIVKEKFAMVAPDVQIEDGKGTILISSEEGETEANNHKKLSEFGIRNGSRLQADDFLQDYTLLINILHSEDLGKDVEFEVVGDAPEKVGPKQAEDAAKSITNGSDDGAQPSTSTAQEQDDVLIVDSDEEDSSNNADVSEEERSRKRKLDEKENLSAKRSRIEQKEELDDVIALD

SEQ ID NO: 905772 - protein, 606 aa, Homo sapiens
FSYDVKTPATFDESCYMKKSLPLNRQFLFQKKHVGRSKAQVAKESVLQFYPKANIVAYHDSIMNPDYNVEFFRQFILVMNALDNRAARNHVNRMCLAADVPLIESGTAGYLGQVTTIKKGVTECYECHPKPTQRTFPGCTIRNTPSEPIHCIVWAKYLFNQLFGEEDADQEVSPDRADPEAAWEPTEAEARARASNEDGDIKRISTKEWAKSTGYDPVKLFTKLFKDDIRYLLTMDKLWRKRKPPVPLDWAEVQSQGEETNASDQQNEPQLGLKDQQVLDVKSYARLFSKSIETLRVHLAEKGDGAELIWDKDDPSAMDFVTSAANLRMHIFSMNMKSRFDIKSMAGNIIPAIATTNAVIAGLIVLEGLKILSGKIDQCRTIFLNKQPNPRKKLLVPCALDPPNPNCYVCASKPEVTVRLNVHKVTVLTLQDKIVKEKFAMVAPDVQIEDGKGTILISSEEGETEANNHKKLSEFGIRNGSRLQADDFLQDYTLLINILHSEDLGKDVEFEVVGDAPEKVGPKQAEDAAKSITNGSDDGAQPSTSTAQEQDDVLIVDSDEEDSSNNADVSEEERSRKRKLDEKENLSAKRSRIEQKEELDDVIALD

SEQ ID NO: 905773 - protein, 668 aa, Homo sapiens; identical to SEQ ID NO: 905754

SEQ ID NO: 905774 - protein, 514 aa, Homo sapiens
MTRKFVKRSIFLSGTAGYLGQVTTIKKGVTECYECHPKPTQRTFPGCTIRNTPSEPIHCIVWAKYLFNQLFGEEDADQEVSPDRADPEAAWEPTEAEARARASNEDGDIKRISTKEWAKSTGYDPVKLFTKLFKDDIRYLLTMDKLWRKRKPPVPLDWAEVQSQGEETNASDQQNEPQLGLKDQQVLDVKSYARLFSKSIETLRVHLAEKGDGAELIWDKDDPSAMDFVTSAANLRMHIFSMNMKSRFDIKSMAGNIIPAIATTNAVIAGLIVLEGLKILSGKIDQCRTIFLNKQPNPRKKLLVPCALDPPNPNCYVCASKPEVTVRLNVHKVTVLTLQDKIVKEKFAMVAPDVQIEDGKGTILISSEEGETEANNHKKLSEFGIRNGSRLQADDFLQDYTLLINILHSEDLGKDVEFEVVGDAPEKVGPKQAEDAAKSITNGSDDGAQPSTSTAQEQDDVLIVDSDEEDSSNNADVSEEERSRKRKLDEKENLSAKRSRIEQKEELDDVIALD

SEQ ID NO: 905775 - protein, 616 aa, Homo sapiens
PGRPSPTRFRPRLGSPASASAAARGCPAMALSRGLPRELAEAVAGGRVLVVGAGGIGCELLKNLVLTGFSHIDLIDLDTIDVSNLNRQFLFQKKHVGRSKAQVAKESVLQFYPKANIVAYHDSIMNPDYNVEFFRQFILVMNALDNRAARNHVNRMCLAADVPLIESGTAGYLGQVTTIKKGVTECYECHPKPTQRTFPGCTIRNTPSEPIHCIVWAKYLFNQLFGEEDADQEVSPDRADPEAAWEPTEAEARARASNEDGDIKRISTKEWAKSTGYDPVKLFTKLFKDDIRYLLTMDKLWRKRKPPVPLDWAEVQSQGEETNASDQQNEPQLGLKDQQVLDVKSYARLFSKSIETLRVHLAEKGDGAELIWDKDDPSAMDFVTSAANLRMHIFSMNMKSRFDIKSMAGNIIPAIATTNAVIAGLIVLEGLKILSGKIDQCRTIVKEKFAMVAPDVQIEDGKGTILISSEEGETEANNHKKLSEFGIRNGSRLQADDFLQDYTLLINILHSEDLGKDVEFEVVGDAPEKVGPKQAEDAAKSITNGSDDGAQPSTSTAQEQDDVLIVDSDEEDSSNNADVSEEERSRKRKLDEKENLSAKRSRIEQKEELDDVIALD

SEQ ID NO: 905776 - protein, 668 aa, Homo sapiens; identical to SEQ ID NO: 905754

SEQ ID NO: 905777 - protein, 161 aa, Homo sapiens
MALSRGLPRELAEAVAGGRVLVVGAGGIGCELLKNLVLTGFSHIDLIDLDTIDVSNLNRQFLFQKKHVGRSKAQIFLNKQPNPRKKLLVPCALDPPNPNCYVCASKPEVTVRLNVHKVTVLTLQDKIVKEKFAMVAPDVQIEDGKGTILISSEEGETEVKT

SEQ ID NO: 905778 - protein, 450 aa, Homo sapiens
PGRPSPTRFRPRLGSPASASAAARGCPAMALSRGLPRELAEAVAGGRVLVVGAGGIGCELLKNLVLTGFSHIDLIDLDTIDVSNLNRQFLFQKKHVGRSKAQVAKESVLQFYPKANIVAYHDSIMNPDYNVEFFRQFILVMNALDNRAARNHVNRMCLAADVPLIESGTAGYLGQVTTIKKGVTECYECHPKPTQRTFPGCTIRNTPSEPIHCIVWAKYLFNQLFGEEDADQEVSPDRADPEAAWEPTEAEARARASNEDGDIKRISTKEWAKSTGYDPVKLFTKLFKDDIRYLLTMDKLWRKRKPPVPLDWAEVQSQGEETNASDQQNEPQLGLKDQQVLDVKSYARLFSKSIETLRVHLAEKGDGAELIWDKDDTIWQMDLSTSVKPQGWLFAVLNVTEVLGFRSMGGNIIPGMGVVWRTAGGISDVVQMFGEETGRHFEYNNDKIVL

SEQ ID NO: 905779 - protein, 322 aa, Homo sapiens
PGRPSPTRFRPRLGSPASASAAARGCPAMALSRGLPRELAEAVAGGRVLVVGAGGIGCELLKNLVLTGFSHIDLIDLDTIDVSNLNRQFLFQKKHVGRSKAQVAKESVLQFYPKANIVAYHDSIMNPDYNVEFFRQFILVMNALDNRAARNHVNRMCLAADVPLIESGTAGYLGQVTTIKKGVTECYECHPKPTQRTFPGCTIRNTPSEPIHCIVWAKYLFNQLFGEEDADQEVSPDRADPEAAWEPTEAEARARASNEDGDIKRISTKEWAKSTGYDPVKLFTKLFKDDIRYLLTMDKLWRKRKPPVPLDWAEVQSQGKDF

SEQ ID NO: 905780 - protein, 454 aa, Homo sapiens
MWHEARKHERKLRGMMVDYKKRAERRREYYEKIKKDPAQFLQVHGRACKVHLDSAVALAAESPVNMMPWQGDTNNMIDRFDVRAHLDHIPDYTPPLLTTISPEQESDERKCNYERYRGLVQNDFAGISEEQCLYQIYIDELYGGLQRPSEDEKKKLAEKKASIGYTYEDLQLPLQLSLQLPLSPWWGLLPFRPHARSRSRSWSRSRSRSRRYSRSRSRGRRHSGGGSRDGHRYSRSPARRGGYGPRRRSRSRSHSGDRYRRGGRGLRHHSSSRSRSSWSLSPSRSRSLTRSRSHSPSPSQSRSRSRSRSQSPSPSPAREKLTRPAASPAVGEKLKKTEPAAGKETGAAKPKLTPQEKLKLRMQKALNRQFKADKKAAQEKMIQQEHERQEREDELRAMARKIRMKERERREKEREEWERQYSRQSRSPSPRYSREYSSSRRRSRSRSRSPHYRH

SEQ ID NO: 905781 - protein, 329 aa, Homo sapiens
MWHEARKHERKLRGMMVDYKKRAERRREYYEKIKKDPAQFLQVHGRACKVHLDSAVALAAESPVNMMPWQGDTNNMIDRFDVRAHLDHIPDYTPPLLTTISPEQESDERKCNYERYRGLVQNDFAGISEEQCLYQIYIDELYGGLQRPSEDEKKKLAEKKASIGYTYEDSTVAEVEKAAEKPEEEESAAEEESNSDEDEVIPDIDVEVDVDELNQEQVADLNKQATTYGMADGDFVRMLRKDKEEAEAIKHAKALEEEKAMYSGRRSRRQRREFREKRLRGRKISPPSYAFENKGKSNEPLIKRYRRRRYRIMSYRIRALQLTHLLRRA

SEQ ID NO: 905782 - protein, 674 aa, Homo sapiens
MWHEARKHERKLRGMMVDYKKRAERRREYYEKIKKDPAQFLQVHGRACKVHLDSAVALAAESPVNMMPWQGDTNNMIDRFDVRAHLDHIPDYTPPLLTTISPEQESDERKCNYERYRGLVQNDFAGISEEQCLYQIYIDELYGGLQRPSEDEKKKLAEKKASIGYTYEDSTVAEVEKAAEKPEEEESAAEEESNSDEDEVIPDIDVEVDVDELNQEQVADLNKQATTYGMADGDFVRMLRKDKEEAEAIKHAKALEEEKAMYSGRRSRRQRREFREKRLRGRKISPPSYARRDSPTYDPYKRSPSESSSESRSRSRSPTPGREEKITFITSFGGSDEEAAAAAAAAAASGVTTGKPPAPPQPGGPAPGRNASARRRSSSSSSSSSASRTSSSRSSSRSSSRSRRGGGYYRSGRHARSRSRSWSRSRSRSRRYSRSRSRGRRHSGGGSRDGHRYSRSPARRGGYGPRRRSRSRSHSGDRYRRGGRGLRHHSSSRSRSSWSLSPSRSRSLTRSRSHSPSPSQSRSRSRSRSQSPSPSPAREKLTRPAASPAVGEKLKKTEPAAGKETGAAKPKLTPQEKLKLRMQKALNRQFKADKKAAQEKMIQQEHERQEREDELRAMARKIRMKERERREKEREEWERQYSRQSRSPSPRYSREYSSSRRRSRSRSRSPHYRH

SEQ ID NO: 905783 - protein, 587 aa, Homo sapiens
MKRSRRTQPSSCSSPEQESDERKCNYERYRGLVQNDFAGISEEQCLYQIYIDELYGGLQRPSEDEKKKLAEKKASIGYTYEDSTVAEVEKAAEKPEEEESAAEEESNSDEDEVIPDIDVEVDVDELNQEQVADLNKQATTYGMADGDFVRMLRKDKEEAEAIKHAKALEEEKAMYSGRRSRRQRREFREKRLRGRKISPPSYARRDSPTYDPYKRSPSESSSESRSRSRSPTPGREEKITFITSFGGSDEEAAAAAAAAAASGVTTGKPPAPPQPGGPAPGRNASARRRSSSSSSSSSASRTSSSRSSSRSSSRSRRGGGYYRSGRHARSRSRSWSRSRSRSRRYSRSRSRGRRHSGGGSRDGHRYSRSPARRGGYGPRRRSRSRSHSGDRYRRGGRGLRHHSSSRSRSSWSLSPSRSRSLTRSRSHSPSPSQSRSRSRSRSQSPSPSPAREKLTRPAASPAVGEKLKKTEPAAGKETGAAKPKLTPQEKLKLRMQKALNRQFKADKKAAQEKMIQQEHERQEREDELRAMARKIRMKERERREKEREEWERQYSRQSRSPSPRYSREYSSSRRRSRSRSRSPHYRH

SEQ ID NO: 905784 - protein, 674 aa, Homo sapiens; identical to SEQ ID NO: 905782

SEQ ID NO: 905785 - protein, 649 aa, Homo sapiens
MWHEARKHERKLRGMMVDYKKRAERRREYYEKIKKDPAQFLQVHGRACKVHLDSAVALAAESPVNMMPWQGDTNNMIDRFDVRAHLDHIPDYTPPLLTTISPEQESDERKCNYERYRGLVQNDFAGISEEQCLYQIYIDELYGGLQRPSEDEKKKLAEKKASIGYTYEDSTVAEVEKAAEKPEEEESAAEEESNSDEDEVIPDIDVEVDVDELNQEQVADLNKQATTYGMADGDFVRMLRKDKEEAEAIKHAKALEEEKAMYSGRRSRRQRREFREKRLRGRKISPPSYARRDSPTYDPYKRSPSESSSESRSRSRSPTPGREEKITFITSFGGSDEEAAAAAAAAAASGVTTGKPPAPPQPGGPAPGRNASARRRSSSSSSSSSASRTSSSRSSSRSSSRSRRGGGYYRSGRHARSRSRSWSRSRSRSRRYSRSRSRGRRHSGGGSRDGHRYSRSPARRGGYGPRRRSRSRSHSGDRYRRGGRGLRHHSSSRSRSSWSLSPSRSRSLTRSRSHSPSPSQSRSRSRSRSQSPSPSPAREKLTRPAASPAVGEKLKKTEPAAGKETGAAKPKLTPQEKLKLRMQKALNRQFKADKKAAQEKMIQQEHERQVKWEREGWGDGWVLAWPRPHSPVCCRSGKTSFEPWPARSA

SEQ ID NO: 905786 - protein, 230 aa, Homo sapiens
GSGPRVGCGWGPWSLTVLLPPCCIPRSRSHSGDRYRRGGRGLRHHSSSRSRSSWSLSPSRSRSLTRSRSHSPSPSQSRSRSRSRSQSPSPSPAREKLTRPAASPAVGEKLKKTEPAAGKETGAAKPKLTPQEKLKLRMQKALNRQFKADKKAAQEKMIQQEHERQEREDELRAMARKIRMKERERREKEREEWERQYSRQSRSPSPRYSREYSSSRRRSRSRSRSPHYRH

SEQ ID NO: 905787 - protein, 700 aa, Homo sapiens
MWHEARKHERKLRGMMVDYKKRAERRREYYEKIKKDPAQFLQVHGRACKVHLDSAVALAAESPVNMMPWQGDTNNMIDRFDVRAHLDHIPDYTPPLLTTISPEQESDERKCNYERYRGLVQNDFAGISEEQCLYQIYIDELYGGLQRPSEDEKKKLAEKKASIGYTYEDSTVAEVEKAAEKPEEEESAAEEESNSDEDEVIPDIDVEVDVDELNQEQVADLNKQATTYGMADGDFVRMLRKDKEEAEAIKHAKALEEEKAMYSGRRSRRQRREFREKRLRGRKISPPSYARRDSPTYDPYKRSPSESSSESRSRSRSPTPGREEKITFITSFGGSDEEAAAAAAAAAASGVTTGKPPAPPQPGGPAPGRNASARRRSSSSSSSSSASRTSSSRSSSRSSSRSRRGGGYYRSGRHARSRSRSWSRSRSRSRRYSRSRSRGRRHSGGGSRDGHRYSRSPARRGGYGPRRRSRSRSHSGDRYRRGGRGLRHHSSSRSRSSWSLSPSRSRSLTRSRSHSPSPSQSRSRSRSRSQSPSPSPAREKLTRPAASPAVGEKLKKTEPAAGKETGAAKPKLTPQEKLKLRMQKALNRQFKADKKAAQEKMIQQEHERQEREDELRAMARKIRMKVLEAPALPEFSVSSVPGQMLMPCLRRERERREKEREEWERQYSRQSRSPSPRYSREYSSSRRRSRSRSRSPHYRH

SEQ ID NO: 905788 - protein, 629 aa, Homo sapiens
MWHEARKHERKLRGMMVDYKKRAERRREYYEKIKKDPAQFLQVHGRACKVHLDSAVALAAESPVNMMPWQGDTNNMIDRFDVRAHLDHIPDYTPPLLTTISPEQESDERKCNYERYRGLVQNDFAGISEEQCLYQIYIDELYGGLQRPSEDEKKKLAEKKASIGYTYEDSTVAEVEKAAEKPEEEESAAEEESNSDEDEVIPDIDVEVDVDELNQEQVADLNKQATTYGMADGDFVRMLRKDKEEAEAIKHAKALEEEKAMYSGRRSRRQRREFREKRLRGRKISPPSYARRDSPTYDPYKRSPSESSSESRSRSRSPTPGREEKITFITSFGGSDEEAAAAAAAAAASGVTTGKPPAPPQPGGPAPGRNASARSVTLTPPALRPGHHGGYPGQRGAAAQACADRPSVPRLRRRSSSSSSSSSASRTSSSRSSSRSSSRSRRGGGYYRSGRHARSRSRSWSRSRSRSRRYSRSRSRGRRHSGGGSRDGHRYSRSPARRGGYGPRRRSRSRSHSGDRYRRGGRGLRHHSSSRSRSSWSLSPSRSRSLTRSRSHSPSPSQSRSRSRSRSQSPSPSPAREKLTRPAASPAVGEKLKKTEPAAGKETGAAKVSKNLELARLIPVSSSAQELGP

SEQ ID NO: 905789 - protein, 367 aa, Homo sapiens
MWHEARKHERKLRGMMVDYKKRAERRREYYEKIKKDPAQFLQVHGRACKVHLDSAVALAAESPVNMMPWQGDTNNMIDRFDVRAHLDHIPDYTPPLLTTISPEQESDERKCNYERYRGLVQNDFAGISEEQCLYQIYIDELYGGLQRPSEDEKKKLAEKKASIGYTYEDSTVAEVEKAAEKPEEEESAAEEESNSDEDEVIPDIDVEVDVDELNQEQVADLNKQATTYGMADGDFVRMLRKDKEEAEAIKHAKALEEEKAMYSGRRSRRQRREFREKRLRGRKISPPSYARRDSPTYDPYKRSPSESSSESRSRSRSPTPGREEKITFITSFGGSDEEAAAAAAAAAASGVTVGGGEDKGVGKGLKL

SEQ ID NO: 905790 - protein, 329 aa, Homo sapiens; identical to SEQ ID NO: 905781

SEQ ID NO: 905791 - protein, 256 aa, Homo sapiens
GSGPRVGCGWGPWSLTVLLPPCCIPRSRSHSGDRYRRGGRGLRHHSSSRSRSSWSLSPSRSRSLTRSRSHSPSPSQSRSRSRSRSQSPSPSPAREKLTRPAASPAVGEKLKKTEPAAGKETGAAKPKLTPQEKLKLRMQKALNRQFKADKKAAQEKMIQQEHERQEREDELRAMARKIRMKVLEAPALPEFSVSSVPGQMLMPCLRRERERREKEREEWERQYSRQSRSPSPRYSREYSSSRRRSRSRSRSPHYRH

SEQ ID NO: 905792 - protein, 354 aa, Homo sapiens
MWHEARKHERKLRGMMVDYKKRAERRREYYEKIKKDPAQFLQVHGRACKVHLDSAVALAAESPVNMMPWQGDTNNMIDRFDVRAHLDHIPDYTPPLLTTMEATSQGVARHSVIPRSPCSFPSLPVTFLGAVPIWYRPEPEGDASFPFLLAWGGIHSFSLISRSRPSLKLSPEQESDERKCNYERYRGLVQNDFAGISEEQCLYQIYIDELYGGLQRPSEDEKKKLAEKKASIGYTYEDSTVAEVEKAAEKPEEEESAAEEESNSDEDEVIPDIDRWGPLSALPTCSPWASFLCLVPHPLWGTPCLRTVSLSLPRPRAHQPPAAPVSLLSSSVPAFLCLTHLSFLGCYFYDLFPS

SEQ ID NO: 905793 - protein, 674 aa, Homo sapiens; identical to SEQ ID NO: 905782

SEQ ID NO: 905794 - protein, 137 aa, Homo sapiens
  misc_feature (8)..(8): Xaa can be any naturally occurring amino acid
PASSPPSXAQADASGEAETEDAEGAEQAEAIKHAKALEEEKAMYSGRRSRRQRREFREKRLRGRKISPPSYARRDSPTYDPYKRSPSESSSESRSRSRSPTPGREEKITFITSFGGSDEEAAAAAAAAAASGVTGGG

SEQ ID NO: 905795 - protein, 743 aa, Homo sapiens
MWHEARKHERKLRGMMVDYKKRAERRREYYEKIKKDPAQFLQVHGRACKVHLDSAVALAAESPVNMMPWQGDTNNMIDRFDVRAHLDHIPDYTPPLLTTMEATSQGVARHSVIPRSPCSFPSLPVTFLGAVPIWYRPEPEGDASFPFLLAWGGIHSFSLISRSRPSLKLSPEQESDERKCNYERYRGLVQNDFAGISEEQCLYQIYIDELYGGLQRPSEDEKKKLAEKKASIGYTYEDSTVAEVEKAAEKPEEEESAAEEESNSDEDEVIPDIDVEVDVDELNQEQVADLNKQATTYGMADGDFVRMLRKDKEEAEAIKHAKALEEEKAMYSGRRSRRQRREFREKRLRGRKISPPSYARRDSPTYDPYKRSPSESSSESRSRSRSPTPGREEKITFITSFGGSDEEAAAAAAAAAASGVTTGKPPAPPQPGGPAPGRNASARRRSSSSSSSSSASRTSSSRSSSRSSSRSRRGGGYYRSGRHARSRSRSWSRSRSRSRRYSRSRSRGRRHSGGGSRDGHRYSRSPARRGGYGPRRRSRSRSHSGDRYRRGGRGLRHHSSSRSRSSWSLSPSRSRSLTRSRSHSPSPSQSRSRSRSRSQSPSPSPAREKLTRPAASPAVGEKLKKTEPAAGKETGAAKPKLTPQEKLKLRMQKALNRQFKADKKAAQEKMIQQEHERQEREDELRAMARKIRMKERERREKEREEWERQYSRQSRSPSPRYSREYSSSRRRSRSRSRSPHYRH

SEQ ID NO: 905796 - protein, 433 aa, Homo sapiens
MVVSQVLVQSWVSTALQAPSTRLVSRVAVARAGAAVDLLCVLFPKRLREPELVSLLLPTRRSPSESSSESRSRSRSPTPGREEKITFITSFGGSDEEAAAAAAAAAASGVTTGKPPAPPQPGGPAPGRNASARRRSSSSSSSSSASRTSSSRSSSRSSSRSRRGGGYYRSGRHARSRSRSWSRSRSRSRRYSRSRSRGRRHSGGGSRDGHRYSRSPARRGGYGPRRRSRSRSHSGDRYRRGGRGLRHHSSSRSRSSWSLSPSRSRSLTRSRSHSPSPSQSRSRSRSRSQSPSPSPAREKLTRPAASPAVGEKLKKTEPAAGKETGAAKPKLTPQEKLKLRMQKALNRQFKADKKAAQEKMIQQEHERQEREDELRAMARKIRMKERERREKEREEWERQYSRQSRSPSPRYSREYSSSRRRSRSRSRSPHYRH

SEQ ID NO: 905797 - protein, 649 aa, Homo sapiens; identical to SEQ ID NO: 905785

SEQ ID NO: 905798 - protein, 474 aa, Homo sapiens [sequence omitted]

SEQ ID NO: 905799 - protein, 603 aa, Homo sapiens
MWHEARKHERKLRGMMVDYKKRAERRREYYEKIKKDPAQFLQVHGRACKVHLDSAVALAAESPVNMMPWQGDTNNMIDRFDVRAHLDHIPDYTPPLLTTISPEQESDERKCNYERYRGLVQNDFAGISEEQCLYQIYIDELYGGLQRPSEDEKKKLAEKKASIGYTYEDSTVAEVEKAAEKPEEEESAAEEESNSDEDEVIPDIDVEVDVDELNQEQVADLNKQATTYGMADGDFVRMLRKDKEEAEAIKHAKALEEEKAMYSGRRSRRQRREFREKRLRGRKISPPSYARRDSPTYDPYKRSPSESSSESRSRSRSPTPGREEKITFITSFGGSDEEAAAAAAAAAASGVTTGKPPAPPQPGGPAPGRNASARSVTLTPPALRPGHHGGYPGQRGAAAQACADRPSVPRLRRRSSSSSSSSSASRTSSSRSSSRSSSRSRRGGGYYRSGRHARSRSRSWSRSRSRSRRYSRSRSRGRRHSGGGSRDGHRYSRSPARRGGYGPRRRSRSRSHSGDRYRRGGRGLRHHSSSRSRSSWSLSPSRSRSLTRSRSHSPSPSQSRSRSRSRSQSPSALKVPIPKPPLPTLGRRVGGGEDKGVGKGLKL

SEQ ID NO: 905800 - protein, 293 aa, Homo sapiens
MWHEARKHERKLRGMMVDYKKRAERRREYYEKIKKDPAQFLQVHGRACKVHLDSAVALAAESPVNMMPWQGDTNNMIDRFDVRAHLDHIPDYTPPLLTTISPEQESDERKCNYERYRGLVQNDFAGISEEQCLYQIYIDELYGGLQRPSEDEKKKLAEKKASIGYTYEDSTVAEVEKAAEKPEEEESAAEEESNSDEDEVIPDIDVEVDVDELNQEQVADLNKQATTYGMADGDFVRMLRKDKEEAEAIKHAKALEEEKAMYSITFITSFGGSDEEAAAAAAAAAASGVTGGG

SEQ ID NO: 905801 - protein, 157 aa, Homo sapiens
GDPAPGTGRGGEGSAPVRTMSLSPPHCTLGLHLSLNLLGHPPPLPPLLPPPQPKLTPQEKLKLRMQKALNRQFKADKKAAQEKMIQQEHERQEREDELRAMARKIRMKERERREKEREEWERQYSRQSRSPSPRYSREYSSSRRRSRSRSRSPHYRH

SEQ ID NO: 905802 - protein, 285 aa, Homo sapiens
MWHEARKHERKLRGMMVDYKKRAERRREYYEKIKKDPAQFLQVHGRACKVHLDSAVALAAESPVNMMPWQGDTNNMIDRFDVRAHLDHIPDYTPPLLTTISPEQESDERKCNYERYRGLVQNDFAGISEEQCLYQIYIDELYGGLQRPSEDEKKKLAEKKASIGYTYEDSTVAEVEKAAEKPEEEESAAEEESNSDEDEVIPDIDRWGPLSALPTCSPWASFLCLVPHPLWGTPCLRTVSLSLPRPRAHQPPAAPVSLLSSSVPAFLCLTHLSFLGCYFYDLFPS

SEQ ID NO: 905803 - protein, 463 aa, Homo sapiens
MATFPCQLCGKTFLTLEKFTIHNYSHSRERPYKCVQPDCGKAFVSRYKLMRHMATHSPQKSHQCAHCEKTFNRKDHLKNHLQTHDPNKMAFGCEECGKKYNTMLGYKRHLALHAASSGDLTCGVCALELGSTEVLLDHLKAHAEEKPPSGTKEKKHQCDHCERCFYTRKDVRRHLVVHTGCKDFLCQFCAQRFGRKDHLTRHTKKTHSQELMKESLQTGDLLSTFHTISPSFQLKAAALPPFPLGASAQNGLASSLPAEVHSLTLSPPEQAAQPMQPLPESLASLHPSVSPGSPPPPLPNHKYNTTSTSYSPLASLPLKADTKGFCNISLFEDLPLQEPQSPQKLNPGFDLAKGNAGKVNLPKELPADAVNLTIPASLDLSPLLGFWQLPPPATQNTFGNSTLALGPGESLPHRLSCLGQQQQEPPLAMGTVSLGQLPLPPIPHVFSAGTGSAILPHFHHAFR

SEQ ID NO: 905804 - protein, 339 aa, Homo sapiens
LVWPIAASQHLSRFSCVIGLWRPILAETSASRPRCRPQAGSGLPAPALYLGDLGFAPTGDPARRTCGCRSAPPASAADPQLPGGASSCHVTPPPGAPAPSSRPRRSGSRAPPARGLLGAAILLAAAGGKAHGICHLSFSPSVPPRALIRHGWGVLWPHSPGGCWTDGRTGQPCSQLSSAGPWRAGRFPGSPSWPRRWHARAASPELRGSSPRRVGVWVLAAAAGGLGAAVAVHCRAARTALGSRPRGGCAFAAPPTCGSGLRGAGCGTPQIVTRNPGSPTASAAGPPGRRCQRRSRLSGMRSTDPILTTWRSNLANGPGKKQNKEKKKKSVPSNNGTRQ

SEQ ID NO: 905805 - protein, 411 aa, Homo sapiens
MATHSPQKSHQCAHCEKTFNRKDHLKNHLQTHDPNKMAFGCEECGKKYNTMLGYKRHLALHAASSGDLTCGVCALELGSTEVLLDHLKAHAEEKPPSGTKEKKHQCDHCERCFYTRKDVRRHLVVHTGCKDFLCQFCAQRFGRKDHLTRHTKKTHSQELMKESLQTGDLLSTFHTISPSFQLKAAALPPFPLGASAQNGLASSLPAEVHSLTLSPPEQAAQPMQPLPESLASLHPSVSPGSPPPPLPNHKYNTTSTSYSPLASLPLKADTKGFCNISLFEDLPLQEPQSPQKLNPGFDLAKGNAGKVNLPKELPADAVNLTIPASLDLSPLLGFWQLPPPATQNTFGNSTLALGPGESLPHRLSCLGQQQQEPPLAMGTVSLGQLPLPPIPHVFSAGTGSAILPHFHHAFR

SEQ ID NO: 905806 - protein, 463 aa, Homo sapiens; identical to SEQ ID NO: 905803

SEQ ID NO: 905807 - protein, 411 aa, Homo sapiens; identical to SEQ ID NO: 905805

SEQ ID NO: 905808 - protein, 463 aa, Homo sapiens; identical to SEQ ID NO: 905803

SEQ ID NO: 905809 - protein, 463 aa, Homo sapiens; identical to SEQ ID NO: 905803

SEQ ID NO: 905810 - protein, 463 aa, Homo sapiens; identical to SEQ ID NO: 905803

SEQ ID NO: 905811 - protein, 411 aa, Homo sapiens; identical to SEQ ID NO: 905805

SEQ ID NO: 905812 - protein, 411 aa, Homo sapiens; identical to SEQ ID NO: 905805

SEQ ID NO: 905813 - protein, 463 aa, Homo sapiens; identical to SEQ ID NO: 905803

SEQ ID NO: 905814 - protein, 463 aa, Homo sapiens; identical to SEQ ID NO: 905803

SEQ ID NO: 905815 - protein, 101 aa, Homo sapiens
VTLRIPHRFAGQLLRQQEPSHIKPACPHHLLPCSPLLRHPFPITSTTPLLPHTPHLQACPSKQILKVFAISVCLRTCLCKSLSHLKSSTQVLIWLREMLVK

SEQ ID NO: 905816 - protein, 407 aa, Homo sapiens
PARAWRRWRQWQQWQPRSPAEWSGAGAEPGAHGPPHVPRGERLPSGRRASARGPVGAAAGAAPEMGEQPIFTTRAHVFQIDPNTKKNWMPASKQAVTVSYFYDVTRNSYRIISVDGAKVIINSTITPNMTFTKTSQKFGQWADSRANTVFGLGFSSEQQLTKFAEKFQEVKEAAKIAKDKTQEKIETSSNHSQASSVNGTDDEKASHAGPANTHLKSENDKLKIALTQSAANVKKWEIELQTLRESNARLTTALQESAASVEQWKRQFSICRDENDRLRNKIDELEEQCSEINREKEKNTQLKRRIEELEAELREKETELKDLRKQSEIIPQLMSECEYVSEKLEAAERDNQNLEDKVRSLKTDIEESKYRQRHLKVELKSFLEVLDGKIDDLHDFRRGLSKLGTDN

SEQ ID NO: 905817 - protein, 407 aa, Homo sapiens; identical to SEQ ID NO: 905816

SEQ ID NO: 905818 - protein, 249 aa, Homo sapiens
PARAWRRWRQWQQWQPRSPAEWSGAGAEPGAHGPPHVPRGERLPSGRRASARGPVGAAAGAAPEMGEQPIFTTRAHVFQIDPNTKKNWMPASKQAVTVSYFYDVTRNSYRIISVDGAKVIINSTITPNMTFTKTSQKFGQWADSRANTVFGLGFSSEQQLTKFAEKFQEVKEAAKIAKDKTQEKIETSSNHSQASSVNGTDDEKASHAGPANTHLKSENDKLKIALTQRLMSWKNNAVRSTERRRRTRS

SEQ ID NO: 905819 - protein, 407 aa, Homo sapiens; identical to SEQ ID NO: 905816

SEQ ID NO: 905820 - protein, 299 aa, Homo sapiens
PARAWRRWRQWQQWQPRSPAEWSGAGAEPGAHGPPHVPRGERLPSGRRASARGPVGAAAGAAPEMGEQPIFTTRAHVFQIDPNTKKNWMPASKQAVTVSYFYDVTRNSYRIISVDGAKVIINSTITPNMTFTKTSQKFGQWADSRANTVFGLGFSSEQQLTKFAEKFQEVKEAAKIAKDKTQEKIETSSNHSQASSVNGTDDEKASHAGPANTHLKSENDKLKIALTQRMQAQFVVFPNQLCRPLTPFQNRNLLSLLWPCEVVDNWKILTQESRTRSTFNIYAVRAGMFISFIRAVATI

SEQ ID NO: 905821 - protein, 418 aa, Homo sapiens
PARAWRRWRQWQQWQPRSPAEWSGAGAEPGAHGPPHVPRGERLPSGRRASARGPVGAAAGAAPEMGEQPIFTTRAHVFQIDPNTKKNWMPASKQAVTVSYFYDVTRNSYRIISVDGAKVIINSTITPNMTFTKTSQKFGQWADSRANTVFGLGFSSEQQLTKFAEKFQEVKEAAKIAKDKTQEKIETSSNHSQESGRETPSSTQASSVNGTDDEKASHAGPANTHLKSENDKLKIALTQSAANVKKWEIELQTLRESNARLTTALQESAASVEQWKRQFSICRDENDRLRNKIDELEEQCSEINREKEKNTQLKRRIEELEAELREKETELKDLRKQSEIIPQLMSECEYVSEKLEAAERDNQNLEDKVRSLKTDIEESKYRQRHLKVELKSFLEVLDGKIDDLHDFRRGLSKLGTDN

SEQ ID NO: 905822 - protein, 319 aa, Homo sapiens [sequence omitted]

SEQ ID NO: 905823 - protein, 260 aa, Homo sapiens
PARAWRRWRQWQQWQPRSPAEWSGAGAEPGAHGPPHVPRGERLPSGRRASARGPVGAAAGAAPEMGEQPIFTTRAHVFQIDPNTKKNWMPASKQAVTVSYFYDVTRNSYRIISVDGAKVIINSTITPNMTFTKTSQKFGQWADSRANTVFGLGFSSEQQLTKFAEKFQEVKEAAKIAKDKTQEKIETSSNHSQESGRETPSSTQASSVNGTDDEKASHAGPANTHLKSENDKLKIALTQRLMSWKNNAVRSTERRRRTRS

SEQ ID NO: 905824 - protein, 68 aa, Homo sapiens
QIDPNTKKNWMPASKQAVTVSYFYDVTRNSYRIISVDGAKVPPPQLILILPVAYLSSKMHPKSCRLNT

SEQ ID NO: 905825 - protein, 485 aa, Homo sapiens
MSTGFSFGSGTLGSTTVAAGGTSTGGVFSFGTGASSNPSVGLNFGNLGSTSTPATTSAPSSGFGTGLFGSKPATGFTLGGTNTGIATTITTGLTLGTPATTSAATTGFSLGFNKPAASATPFALPITSTSASGLTLSSALTSTPAASTGFTLNNLGGTTATTTTASTGLSLGGALAGLGGSLFQSTNTGTSGLGQNALGLTLGTTAATSTAGNEGLGGIDFSSSSDKKSDKTGTRPEDSKALKDENLPPVICQDVENLQKFVKEQKQVQEEISRMSSKAMLKVQEDIKALKQLLSLAANGIQRNTLNIDKLKIETAQELKNAEIALRTQKTPPGLQHEYAAPADYFRILVQQFEVQLQQYRQQIEELENHLATQANNSHITPQDLSMAMQKIYQTFVALAAQLQSIHENVKVLKEQYLGYRKMFLGDAVDVFETRRAEAKKWQNTPRVTTGPTPFSTMPNAAAVAMAATLTQQQQPATGLNAFKL

SEQ ID NO: 905826 - protein, 599 aa, Homo sapiens
MSTGFSFGSGTLGSTTVAAGGTSTGGVFSFGTGASSNPSVGLNFGNLGSTSTPATTSAPSSGFGTGLFGSKPATGFTLGGTNTGIATTITTGLTLGTPATTSAATTGFSLGFNKPAASATPFALPITSTSASGLTLSSALTSTPAASTGFTLNNLGGTTATTTTASTGLSLGGALAGLGGSLFQSTNTGTSGLGQNALGLTLGTTAATSTAGNEGLGGIDFSSSSDKKSDKTGTRPEDSKALKDENLPPVICQDVENLQKFVKEQKQVQEEISRMSSKAMLKVQEDIKALKQLLSLAANGIQRNTLNIDKLKIETAQELKNAEIALRTQKTPPGLQHEYAAPADYFRILVQQFEVQLQQYRQQIEELENHLATQANNSHITPQDLSMAMQKIYQTFVALAAQLQSIHENVKVLKEQYLGYRKMFLGDAVDVFETRRAEAKKWQNTPRVTTGPTPFSTMPNAAAVAMAATLTQQQQPATGPQPSLGVSFGTPFGSGIGTGLQSSGLGSSNLGGFGTSSGFGCSTTGASTFGFGTTNKPSGSLSAGFGSSSTSGFNFSNPGITASAGLTFGVSNPASAGFGTGGQLLQLKKPPAGNKRGKR

SEQ ID NO: 905827 - protein, 320 aa, Homo sapiens [sequence omitted]

SEQ ID NO: 905828 - protein, 587 aa, Homo sapiens
MSTGFSFGSGTLGSTTVAAGGTSTGGVFSFGTGASSNPSVGLNFGNLGSTSTPATTSAPSSGFGTGLFGSKPATGFTLGGTNTGTPATTSAATTGFSLGFNKPAASATPFALPITSTSASGLTLSSALTSTPAASTGFTLNNLGGTTATTTTASTGLSLGGALAGLGGSLFQSTNTGTSGLGQNALGLTLGTTAATSTAGNEGLGGIDFSSSSDKKSDKTGTRPEDSKALKDENLPPVICQDVENLQKFVKEQKQVQEEISRMSSKAMLKVQEDIKALKQLLSLAANGIQRNTLNIDKLKIETAQELKNAEIALRTQKTPPGLQHEYAAPADYFRILVQQFEVQLQQYRQQIEELENHLATQANNSHITPQDLSMAMQKIYQTFVALAAQLQSIHENVKVLKEQYLGYRKMFLGDAVDVFETRRAEAKKWQNTPRVTTGPTPFSTMPNAAAVAMAATLTQQQQPATGPQPSLGVSFGTPFGSGIGTGLQSSGLGSSNLGGFGTSSGFGCSTTGASTFGFGTTNKPSGSLSAGFGSSSTSGFNFSNPGITASAGLTFGVSNPASAGFGTGGQLLQLKKPPAGNKRGKR

SEQ ID NO: 905829 - protein, 599 aa, Homo sapiens; identical to SEQ ID NO: 905826

SEQ ID NO: 905830 - protein, 425 aa, Homo sapiens
GNCCSLLMEFISYVLFIGLGQNALGLTLGTTAATSTAGNEGLGGIDFSSSSDKKSDKTGTRPEDSKALKDENLPPVICQDVENLQKFVKEQKQVQEEISRMSSKAMLKVQEDIKALKQLLSLAANGIQRNTLNIDKLKIETAQELKNAEIALRTQKTPPGLQHEYAAPADYFRILVQQFEVQLQQYRQQIEELENHLATQANNSHITPQDLSMAMQKIYQTFVALAAQLQSIHENVKVLKEQYLGYRKMFLGDAVDVFETRRAEAKKWQNTPRVTTGPTPFSTMPNAAAVAMAATLTQQQQPATGPQPSLGVSFGTPFGSGIGTGLQSSGLGSSNLGGFGTSSGFGCSTTGASTFGFGTTNKPSGSLSAGFGSSSTSGFNFSNPGITASAGLTFGVSNPASAGFGTGGQLLQLKKPPAGNKRGKR

SEQ ID NO: 905831 - protein, 570 aa, Homo sapiens
MSTGFSFGSGTLGSTTVAAGGTSTGGVFSFGTGASSNPSVGLNFGNLGSTSTPATTSAPSSGFGTGLFGSKPATGFTLGGTNTGIATTITTGLTLGTPATTSAATTGFSLGFNKPAASATPFALPITSTSASGLTLSSALTSTPAASTGFTLNNLGGTTATTTTASTGLSLGGALAGLGGSLFQSTNTGTSGLGQNALGLTLGTTAATSTAGNEGLGGIDFSSSSDKKSDKTGTRPEDSKALKDENLPPVICQDVENLQKFVKEQKQVQEEISRMSSKAMLKVQEDIKALKQLLSLAANGIQRNTLNIDKLKIETAQELKNAEIALRTQKTPPGLQHEYAAPADYFRILVQQFEVQLQQYRQQIEELENHLATQANNSHITPQDLSMAMQKIYQTFVALAAQLQSIHENVKVLKEQYLGYRKMFLGDAVDVFETRRAEAKKWQNTPRVTTGPTPFSTMPNAAAVAMAATLTQQQQPATGPQPSLGVSFGTPFGSGIGTGLQSSGLGSSNLGGFGTSSGFGCSTTGASTFGFGTTNKPSGSLSAGNKSQVLTEFRKPSVTETNEIGRKIQF

SEQ ID NO: 905832 - protein, 525 aa, Homo sapiens
MSTGFSFGSGTLGSTTVAAGGTSTGGVFSFGTGASSNPSVGLNFGNLGSTSTPATTSAPSSGFGTGLFGSKPATGFTLGGTNTGIATTITTGLTLGTPATTSAATTGFSLGFNKPAASATPFALPITSTSASGLTLSSALTSTPAASTGFTLNNLGGTTATTTTASTGLSLGGALAGLGGSLFQSTNTGTSGLGQNALGLTLGTTAATSTAGNEGLGGIDFSSSSDKKSDKTGTRPEDSKALKDENLPPVICQDVENLQKFVKEQKQVQEEISRMSSKAMLKVQEDIKALKQLLSLAANGIQRNTLNIDKLKIETAQELKNAEIALRTQKTPPGLQHEYAAPADYFRILVQQFEVQLQQYRQQIEELENHLATQANNSHITPQDLSMAMQKIYQTFVALAAQLQSIHENVKVLKEQYLGYRKMFLGDAVDVFETRRAEAKKWQNTPRVTTGPTPFSTMPNAAAVAMAATLTQQQQPATGPQPSLGVSFGTPFGSGIGTGLQSSGLGSSNLGGFGLALYSRAPQGG

SEQ ID NO: 905833 - protein, 599 aa, Homo sapiens; identical to SEQ ID NO: 905826

SEQ ID NO: 905834 - protein, 599 aa, Homo sapiens; identical to SEQ ID NO: 905826

SEQ ID NO: 905835 - protein, 599 aa, Homo sapiens; identical to SEQ ID NO: 905826

SEQ ID NO: 905836 - protein, 485 aa, Homo sapiens; identical to SEQ ID NO: 905825

SEQ ID NO: 905837 - protein, 516 aa, Homo sapiens
MSTGFSFGSGTLGSTTVAAGGTSTGGVFSFGTGASSNPSVGLNFGNLGSTSTPATTSAPSSGFGTGLFGSKPATGFTLGGTNTGIATTITTGLTLGTPATTSAATTGFSLGFNKPAASATPFALPITSTSASGLTLSSALTSTPAASTGFTLNNLGGTTATTTTASTGLSLGGALAGLGGSLFQSTNTGTSGLGQNALGLTLGTTAATSTAGNEGLGGIDFSSSSDKKSDKTGTRPEDSKALKDENLPPVICQDVENLQKFVKEQKQVQEEISRMSSKAMLKVQEDIKALKQLLSLAANGIQRNTLNIDKLKIETAQELKNAEIALRTQKTPPGLQHEYAAPADYFRILVQQFEVQLQQYRQQIEELENHLATQANNSHITPQDLSMAMQKIYQTFVALAAQLQSIHENVKVLKEQYLGYRKMFLGDAVDVFETRRAEAKKWQNTPRVTTGPTPFSTMPNAAAVAMAATLTQQQQPATGDKWCNVAELKNRTQLSLFVNKLELSCYCVIDLLYNEQ

SEQ ID NO: 905838 - protein, 149 aa, Homo sapiens
LSLAFAAVGAGSSRQVRAGRERCCPARLGFEAREVSQTHFALLTASSPGQTCPQGSPSGPGLWAPPPWPPAGPAQAAFSPSERERLGNRTFSPSWAGFTPTPTPAKLPWCPHPVSSLWLPSQWGWREALNLAARRRRPLAAVPGPSAAW

SEQ ID NO: 905839 - protein, 410 aa, Homo sapiens
MVESSRHNWSGLDKQSDIQNLNEERILALQLCGWIKKGTDVDVGPFLNSLVQEGEWERAAAVALFNLDIRRAIQILNEGASSEKGDLNLNVVAMALSGYTDEKNSLWREMCSTLRLQLNNPYLCVMFAFLTSETGSYDGVLYENKVAVRDRVAFACKFLSDTQLNRYIEKLTNEMKEAGNLEGILLTGLTKDGVDLMESYVDRTGDVQTASYCMLQGSPLDVLKDERVQYWIENYRNLLDAWRFWHKRAEFDIHRSKLDPSSKPLAQVFVSCNFCGKSISYSCSAVPHQGRGFSQYGVSGSPTKSKVTSCPGCRKPLPRCALCLINMGTPVSSCPGGTKSDEKVDLSKDKKLAQFNNWFTWCHNCRHGGHAGHMLSWFRDHAECPVSACTCKCMQLDTTGNLVPAETVQP

SEQ ID NO: 905840 - protein, 875 aa, Homo sapiens
MSGTKPDILWAPHHVDRFVVCDSELSLYHVESTVNSELKAGSLRLSEDSAATLLSINSDTPYMKCVAWYLNYDPECLLAVGQANGRVVLTSLGQDHNSKFKDLIGKEFVPKHARQCNTLAWNPLDSNWLAAGLDKHRADFSVLIWDICSKYTPDIVPMEKVKLSAGETETTLLVTKPLYELGQNDACLSLCWLPRDQKLLLAGMHRNLAIFDLRNTSQKMFVNTKAVQGVTVDPYFHDRVASFYEGQVAIWDLRKFEKPVLTLTEQPKPLTKVAWCPTRTGLLATLTRDSNIIRLYDMQHTPTPIGDETEPTIIERSVQPCDNYIASFAWHPTSQNRMIVVTPNRTMSDFTVFERISLAWSPITSLMWACGRHLYECTEEENDNSLEKDIATKMRLRALSRYGLDTEQVWRNHILAGNEDPQLKSLWYTLHFMKQYTEDMDQKSPGNKGSLVYAGIKSIVKSSLGMVESSRHNWSGLDKQSDIQNLNEERILALQLCGWIKKGTDVDVGPFLNSLVQEGEWERAAAVALFNLDIRRAIQILNEGASSEKGDLNLNVVAMALSGYTDEKNSLWREMCSTLRLQLNNPYLCVMFAFLTSETGSYDGVLYENKVAVRDRVAFACKFLSDTQLNRYIEKLTNEMKEAGNLEGILLTGLTKDGVDLMESYVDRTGDVQTASYCMLQGSPLDVLKDERVQYWIENYRNLLDAWRFWHKRAEFDIHRSKLDPSSKPLAQVFVSCNFCGKSISYSCSAVPHQGRGFSQYGVSGSPTKSKVTSCPGCRKPLPRCALCLINMGTPVSSCPGGTKSDEKVDLSKDKKLAQFNNWFTWCHNCRHGGHAGHMLSWFRDHAECPVSACTCKCMQLDTTGNLVPAETVQP

SEQ ID NO: 905841 - protein, 875 aa, Homo sapiens; identical to SEQ ID NO: 905840

SEQ ID NO: 905842 - protein, 875 aa, Homo sapiens; identical to SEQ ID NO: 905840

SEQ ID NO: 905843 - protein, 844 aa, Homo sapiens
MSGTKPDILWAPHHVDRFVVCDSELSLYHVESTVNSELKAGSLRLSEDSAATLLSINSDTPYMKCVAWYLNYDPECLLAVGQANGRVVLTSLGQDHNSKFKDLIGKEFVPKHARQCNTLAWNPLDSNWLAAGLDKHRADFSVLIWDICSKYTPDIVPMEKVKLSAGETETTLLVTKPLYELGQNDACLSLCWLPRDQKLLLAGMHRNLAIFDLRNTSQKMFVNTKAVQGVTVDPYFHDRVASFYEGQVAIWDLRKFEKPVLTLTEQPKPLTKVAWCPTRTGLLATLTRDSNIIRLYDMQHTPTPIGDETEPTIIERSVQPCDNYIASFAWHPTSQNRMIVVTPNRTMSDFTVFERISLAWSPITSLMWACGRHLYECTEEENDNSLEKDIATKMRLRALSRYGLDTEQVWRNHILAGNEDPQLKSLWYTLHFMKQYTEDMDQKSPGNKGSLVYAGIKSIVKSSLGMVESSRHNWSGLDKQSDIQNLNEERILALQLCGWIKKGTDVDVGPFLNSLVQEGEWERAAAVALFNLDIRRAIQILNEGASSEKGDLNLNVVAMALSGYTDEKNSLWREMCSTLRLQLNNPYLCVMFAFLTSETGSYDGVLYENKVAVRDRVAFACKFLSDTQLNRYIEKLTNEMKEAGNLEGILLTGLTKDGVDLMESYVDRTGDVQTASYCMLQGSPLDVLKDERVQYWIENYRNLLDAWRFWHKRAEFDIHRSKLDPSSKPLAQVFVSCNFCGKSISYSCSAVPHQGRGFSQYGVSGSPTKSKVTSCPGCRKPLPRCALCLINMGTPVSSCPGGTKSDEKVDLSKDKKLAQFNNWFTWCHNCRHGGHAGHMLSWFR

SEQ ID NO: 905844 - protein, 844 aa, Homo sapiens; identical to SEQ ID NO: 905843

SEQ ID NO: 905845 - protein, 875 aa, Homo sapiens; identical to SEQ ID NO: 905840

SEQ ID NO: 905846 - protein, 875 aa, Homo sapiens; identical to SEQ ID NO: 905840

SEQ ID NO: 905847 - protein, 875 aa, Homo sapiens; identical to SEQ ID NO: 905840

SEQ ID NO: 905848 - protein, 491 aa, Homo sapiens
MSGTKPDILWAPHHVDRFVVCDSELSLYHVESTVNSELKAGSLRLSEDSAATLLSINSDTPYMKCVAWYLNYDPECLLAVGQANGRVVLTSLGQDHNSKFKDLIGKEFVPKHARQCNTLAWNPLDSNWLAAGLDKHRADFSVLIWDICSKYTPDIVPMEKVKLSAGETETTLLVTKPLYELGQNDACLSLCWLPRDQKLLLAGMHRNLAIFDLRNTSQKMFVNTKAVQGVTVDPYFHDRVASFYEGQVAIWDLRKFEKPVLTLTEQPKPLTKVAWCPTRTGLLATLTRDSNIIRLYDMQHTPTPIGDETEPTIIERSVQPCDNYIASFAWHPTSQNRMIVVTPNRTMSDFTVFERISLAWSPITSLMWACGRHLYECTEEENDNSLEKDIATKMRLRALSRYGLDTEQVWRNHILAGGTKSDEKVDLSKDKKLAQFNNWFTWCHNCRHGGHAGHMLSWFRDHAECPVSACTCKCMQLDTTGNLVPAETVQP

SEQ ID NO: 905849 - protein, 2047 aa, Homo sapiens
SGLYRYRSRNSRTALSEEEEEEREFRKQFPLHEKDFADILVQPTLEENKGTSDGQEEEAGTNPALLSQNSMQAVMLIHQQLCLNFARSLWYQQTLPPHEAKHYLSLFLSCYQTGASLVTHFYPLMGVELNDRLLGSQLLACTLSHNTLFGEAPSDLMVKPDGPYDFYQHPNVPEARQCQPVLQGFSEAVSHLLQDWPEHPALEQLLVVMDRIRSFPLSSPISKFLNGLEILLAKAQDWEENASRALSLRKHLDLISQMIIRWRKLELNCWSMSLDNTMKRHTEKSTKHWFSIYQMLEKHMQEQTEEQEDDKQMTLMLLVSTLQAFIEGSSLGEFHVRLQMLLVFHCHVLLMPQVEGKDSLCSVLWNLYHYYKQFFDRVQAKIVELRSPLEKELKEFVKISKWNDVSFWSIKQSVEKTHRTLFKFMKKFEAVLSEPCRSSLVESDKEEQPDFLPRPTDGAASELSSIQNLNRALRETLLAQPAAGQATIPEWCQGAAPSGLEGELLRRLPKLRKRMRKMCLTFMKESPLPRLVEGLDQFTGEVISSVSELQSLKVEPSAEKEKQRSEAKHILMQKQRALSDLFKHLAKIGLSYRKGLAWARSKNPQEMLHLHPLDLQSALSIVSSTQEADSRLLTEISSSWDGCQKYFYRSLARHARLNAALATPAKEMGMGNVERCRGFSAHLMKMLVRQRRSLTTLSEQWIILRNLLSCVQEIHSRLMGPQAYPVAFPPQDGVQQWTERLQHLAMQCQILLEQLSWLLQCCPSVGPAPGHGNVQVLGQPPGPCLEGPELSKGQLCGVVLDLIPSNLSYPSPIPGSQLPSGCRMRKQDHLWQQSTTRLTEMLKTIKTVKADVDKIRQQSCETLFHSWKDFEVCSSALSCLSQVSVHLQGLESLFILPGMEVEQRDSQMALVESLEYVRGEISKAMADFTTWKTHLLTSDSQGGNQMLDEGFVEDFSEQMEIAIRAILCAIQNLEERKNEKAEENTDQASPQEDYAGFERLQSGHLTKLLEDDFWADVSTLHVQKIISAISELLERLKSYGEDGTAAKHLFFSQSCSLLVRLVPVLSSYSDLVLFFLTMSLATHRSTAKLLSVLAQVFTELAQKGFCLPKEFMEDSAGEGATEFHDYEGGGIGEGEGMKDVSDQIGNEEQVEDTFQKGQEKDKEDPDSKSDIKGEDNAIEMSEDFDGKMHDGELEEQEEDDEKSDSEGGDLDKHMGDLNGEEADKLDERLWGDDDEEEDEEEEDNKTEETGPGMDEEDSELVAKDDNLDSGNSNKDKSQQDKKEEKEEAEADDGGQGEDKINEQIDERDYDENEVDPYHGNQEKVPEPEALDLPDDLNLDSEDKNGGEDTDNEEGEEENPLEIKEKPEEAGHEAEERGETETDQNESQSPQEPEEGPSEDDKAEGEEEMDTGADDQDGDAAQHPEEHSEEQQQSVEEKDKEADEEGGENGPADQGFQPQEEEEREDSDTEEQVPEALERKEHASCGQTGVENMQNTQAMELAGAAPEKEQGKEEHGSGAADANQAEGHESNFIAQLASQKHTRKNTQSFKRKPGQADNERSMGDHNERVHKRLRTVDTDSHAEQGPAQQPQAQVEDADAFEHIKQGSDAYDAQTYDVASKEQQQSAKDSGKDQEEEEIEDTLMDTEEQEEFKAADVEQLKPEEIKSGTTAPLGFDEMEVEIQTVKTEEDQDPRTDKAHKETENEKPERSRESTIHTAHQFLMDTIFQPFLKDVNELRQELERQLEMWQPRESGNPEEEKVAAEMWQSYLILTAPLSQRLCEELRLILEPTQAAKLKGDYRTGKRLNIRKVIPYIASQFRKDKIWLRRTKPSKRQYQICLAIDDSSSMVDNHTKQLAFESLAVIGNALTLLEVGQIAVCSFGESVKLLHPFHEQFSDYSGSQILRLCKFQQKKTKIAQFLESVANMFAAAQQLSQNISSETAQLLLVVSDGRGLFLEGKERVLAAVQAARNANIFVIFVVLDNPSSRDSILDIKVPIFKGPGEMPEIRSYMEEFPFPYYIILRDVNALPETLSDALRQWFELVTASDHP

SEQ ID NO: 905850 - protein, 1140 aa, Homo sapiens [sequence omitted]

SEQ ID NO: 905851 - protein, 2108 aa, Homo sapiens
SGLYRYRSRNSRTALSEEEEEEREFRKQFPLHEKDFADILVQPTLEENKGTSDGQEEEAGTNPALLSQNSMQAVMLIHQQLCLNFARSLWYQQTLPPHEAKHYLSLFLSCYQTGASLVTHFYPLMGVELNDRLLGSQLLACTLSHNTLFGEAPSDLMVKPDGPYDFYQHPNVPEARQCQPVLQGFSEAVSHLLQDWPEHPALEQLLVVMDRIRSFPLSSPISKFLNGLEILLAKAQDWEENASRALSLRKHLDLISQMIIRWRKLELNCWSMSLDNTMKRHTEKSTKHWFSIYQMLEKHMQEQTEEQEDDKQMTLMLLVSTLQAFIEGSSLGEFHVRLQMLLVFHCHVLLMPQVEGKDSLCSVLWNLYHYYKQFFDRVQAKIVELRSPLEKELKEFVKISKWNDVSFWSIKQSVEKTHRTLFKFMKKFEAVLSEPCRSSLVESDKEEQPDFLPRPTDGAASELSSIQNLNRALRETLLAQPAAGQATIPEWCQGAAPSGLEGELLRRLPKLRKRMRKMCLTFMKESPLPRLVEGLDQFTGEVISSVSELQSLKVEPSAEKEKQRSEAKHILMQKQRALSDLFKHLAKIGLSYRKGLAWARSKNPQEMLHLHPLDLQSALSIVSSTQEADSRLLTEISSSWDGCQKYFYRSLARHARLNAALATPAKEMGMGNVERCRGFSAHLMKMLVRQRRSLTTLSEQWIILRNLLSCVQEIHSRLMGPQAYPVAFPPQDGVQQWTERLQHLAMQCQILLEQLSWLLQCCPSVGPAPGHGNVQVLGQPPGPCLEGPELSKGQLCGVVLDLIPSNLSYPSPIPGSQLPSGCRMRKQDHLWQQSTTRLTEMLKTIKTVKADVDKIRQQSCETLFHSWKDFEVCSSALSCLSQVSVHLQGLESLFILPGMEVEQRDSQMALVESLEYVRGEISKAMADFTTWKTHLLTSDSQGGNQMLDEGFVEDFSEQMEIAIRAILCAIQNLEERKNEKAEENTDQASPQEDYGMSEIRQKLVSVPDLIFVFDDLFLWLNSEGWMLETDNCMDRDKRICFLLFIMLLFSLKNEAAGFERLQSGHLTKLLEDDFWADVSTLHVQKIISAISELLERLKSYGEDGTAAKHLFFSQSCSLLVRLVPVLSSYSDLVLFFLTMSLATHRSTAKLLSVLAQVFTELAQKGFCLPKEFMEDSAGEGATEFHDYEGGGIGEGEGMKDVSDQIGNEEQVEDTFQKGQEKDKEDPDSKSDIKGEDNAIEMSEDFDGKMHDGELEEQEEDDEKSDSEGGDLDKHMGDLNGEEADKLDERLWGDDDEEEDEEEEDNKTEETGPGMDEEDSELVAKDDNLDSGNSNKDKSQQDKKEEKEEAEADDGGQGEDKINEQIDERDYDENEVDPYHGNQEKVPEPEALDLPDDLNLDSEDKNGGEDTDNEEGEEENPLEIKEKPEEAGHEAEERGETETDQNESQSPQEPEEGPSEDDKAEGEEEMDTGADDQDGDAAQHPEEHSEEQQQSVEEKDKEADEEGGENGPADQGFQPQEEEEREDSDTEEQVPEALERKEHASCGQTGVENMQNTQAMELAGAAPEKEQGKEEHGSGAADANQAEGHESNFIAQLASQKHTRKNTQSFKRKPGQADNERSMGDHNERVHKRLRTVDTDSHAEQGPAQQPQAQVEDADAFEHIKQGSDAYDAQTYDVASKEQQQSAKDSGKDQEEEEIEDTLMDTEEQEEFKAADVEQLKPEEIKSGTTAPLGFDEMEVEIQTVKTEEDQDPRTDKAHKETENEKPERSRESTIHTAHQFLMDTIFQPFLKDVNELRQELERQLEMWQPRESGNPEEEKVAAEMWQSYLILTAPLSQRLCEELRLILEPTQAAKLKGDYRTGKRLNIRKVIPYIASQFRKDKIWLRRTKPSKRQYQICLAIDDSSSMVDNHTKQLAFESLAVIGNALTLLEVGQIAVCSFGESVKLLHPFHEQFSDYSGSQILRLCKFQQKKTKIAQFLESVANMFAAAQQLSQNISSETAQLLLVVSDGRGLFLEGKERVLAAVQAARNANIFVIFVVLDNPSSRDSILDIKVPIFKGPGEMPEIRSYMEEFPFPYYIILRDVNALPETLSDALRQWFELVTASDHP

SEQ ID NO: 905852 - protein, 846 aa, Homo sapiens
TTYFVTTYFRDYNFRITYFRLHTSDYILPTTYFRLHTSDYILPTTYFRGPGMDEEDSELVAKDDNLDSGNSNKDKSQQDKKEEKEEAEADDGGQGEDKINEQIDERDYDENEVDPYHGNQEKVPEPEALDLPDDLNLDSEDKNGGEDTDNEEGEEENPLEIKEKPEEAGHEAEERGETETDQNESQSPQEPEEGPSEDDKAEGEEEMDTGADDQDGDAAQHPEEHSEEQQQSVEEKDKEADEEGGENGPADQGFQPQEEEEREDSDTEEQVPEALERKEHASCGQTGVENMQNTQAMELAGAAPEKEQGKEEHGSGAADANQAEGHESNFIAQLASQKHTRKNTQSFKRKPGQADNERSMGDHNERVHKRLRTVDTDSHAEQGPAQQPQAQVEDADAFEHIKQGSDAYDAQTYDVASKEQQQSAKDSGKDQEEEEIEDTLMDTEEQEEFKAADVEQLKPEEIKSGTTAPLGFDEMEVEIQTVKTEEDQDPRTDKAHKETENEKPERSRESTIHTAHQFLMDTIFQPFLKDVNELRQELERQLEMWQPRESGNPEEEKVAAEMWQSYLILTAPLSQRLCEELRLILEPTQAAKLKGDYRTGKRLNIRKVIPYIASQFRKDKIWLRRTKPSKRQYQICLAIDDSSSMVDNHTKQLAFESLAVIGNALTLLEVGQIAVCSFGESVKLLHPFHEQFSDYSGSQILRLCKFQQKKTKIAQFLESVANMFAAAQQLSQNISSETAQLLLVVSDGRGLFLEGKERVLAAVQAARNANIFVIFVVLDNPSSRDSILDIKVPIFKGPGEMPEIRSYMEEFPFPYYIILRDVNALPETLSDALRQWFELVTASDHP

SEQ ID NO: 905853 - protein, 487 aa, Homo sapiens [sequence omitted]

SEQ ID NO: 905854 - protein, 1071 aa, Homo sapiens
MALVESLEYVRGEISKAMADFTTWKTHLLTSDSQGGNQMLDEGFVEDFSEQMEIAIRAILCAIQNLEERKNEKAEENTDQASPQEDYAGFERLQSGHLTKLLEDDFWADVSTLHVQKIISAISELLERLKSYGEDGTAAKHLFFSQSCSLLVRLVPVLSSYSDLVLFFLTMSLATHRSTAKLLSVLAQVFTELAQKGFCLPKEFMEDSAGEGATEFHDYEGGGIGEGEGMKDVSDQIGNEEQVEDTFQKGQEKDKEDPDSKSDIKGEDNAIEMSEDFDGKMHDGELEEQEEDDEKSDSEGGDLDKHMGDLNGEEADKLDERLWGDDDEEEDEEEEDNKTEETGPGMDEEDSELVAKDDNLDSGNSNKDKSQQDKKEEKEEAEADDGGQGEDKINEQIDERDYDENEVDPYHGNQEKVPEPEALDLPDDLNLDSEDKNGGEDTDNEEGEEENPLEIKEKPEEAGHEAEERGETETDQNESQSPQEPEEGPSEDDKAEGEEEMDTGADDQDGDAAQHPEEHSEEQQQSVEEKDKEADEEGGENGPADQGFQPQEEEEREDSDTEEQVPEALERKEHASCGQTGVENMQNTQAMELAGAAPEKEQGKEEHGSGAADANQAEGHESNFIAQLASQKHTRKNTQSFKRKPGQADNERSMGDHNERVHKRLRTVDTDSHAEQGPAQQPQAQVEDADAFEHIKQGSDAYDAQTYDVASKEQQQSAKDSGKDQEEEEIEDTLMDTEEQEEFKAADVEQLKPEEIKSGTTAPLGFDEMEVEIQTVKTEEDQDPRTDKAHKETENEKPERSRESTIHTAHQFLMDTIFQPFLKDVNELRQELERQLEMWQPRESGNPEEEKVAAEMWQSYLILTAPLSQRLCEELRLILEPTQAAKLKGDYRTGKRLNIRKVIPYIASQFRKDKIWLRRTKPSKRQYQICLAIDDSSSMVDNHTKQLAFESLAVIGNALTLLEVGQIAVCSFGESVKLLHPFHEQFSDYSGSQILRLCKFQQKKTKIAQDSILDIKVPIFKGPGEMPEIRSYMEEFPFPYYIILRDVNALPETLSDALRQWFELVTASDHP

SEQ ID NO: 905855 - protein, 1140 aa, Homo sapiens [sequence omitted]

SEQ ID NO: 905856 - protein, 1082 aa, Homo sapiens
MALVESLEYVRGEISKAMADFTTWKTHLLTSDSQGGNQMLDEGFVEDFSEQMEIAIRAILCAIQNLEERKNEKAEENTDQASPQEDYAGFERLQSGHLTKLLEDDFWADVSTLHVQKIISAISELLERLKSYGEDGTAAKHLFFSQSCSLLVRLVPVLSSYSDLVLFFLTMSLATHRSTAKLLSVLAQVFTELAQKGFCLPKEFMEDSAGEGATEFHDYEGGGIGEGEGMKDVSDQIGNEEQVEDTFQKGQEKDKEDPDSKSDIKGEDNAIEMSEDFDGKMHDGELEEQEEDDEKSDSEGGDLDKHMGDLNGEEADKLDERLWGDDDEEEDEEEEDNKTEETGPGMDEEDSELVAKDDNLDSGNSNKDKSQQDKKEEKEEAEADDGGQGEDKINEQIDERDYDENEVDPYHGNQEKVPEPEALDLPDDLNLDSEDKNGGEDTDNEEGEEENPLEIKEKPEEAGHEAEERGETETDQNESQSPQEPEEGPSEDDKAEGEEEMDTGADDQDGDAAQHPEEHSEEQQQSVEEKDKEADEEGGENGPADQGFQPQEEEEREDSDTEEQVPEALERKEHASCGQTGVENMQNTQAMELAGAAPEKEQGKEEHGSGAADANQAEGHESNFIAQLASQKHTRKNTQSFKRKPGQADNERSMGDHNERVHKRLRTVDTDSHAEQGPAQQPQAQVEDADAFEHIKQGSDAYDAQTYDVASKEQQQSAKDSGKDQEEEEIEDTLMDTEEQEEFKAADVEQLKPEEIKSGTTAPLGFDEMEVEIQTVKTEEDQDPRTDKAHKETENEKPERSRESTIHTAHQFLMDTIFQPFLKDVNELRQELERQLEMWQPRESGNPEEEKVAAEMWQSYLILTAPLSQRLCEELRLILEPTQAAKLKGDYRTGKRLNIRKVIPYIASQFRKDKIWLRRTKPSKRQYQICLAIDDSSSMVDNHTKQLAFESLAVIGNALTLLEVGQIAVCSFGESVKLLHPFHEQFSDYSGSQILRLCKFQQKKTKIAQFLESVANMFAAAQQLSQNISSETAQLLLVVSDGRGLFLEGKERVLAAVQAARNANIFVIFVVLDNPSSRVSDY

SEQ ID NO: 905857 - protein, 653 aa, Homo sapiens
MALVESLEYVRGEISKAMADFTTWKTHLLTSDSQGGNQMLDEGFVEDFSEQMEIAIRAILCAIQNLEERKNEKAEENTDQASPQEDYAGFERLQSGHLTKLLEDDFWADVSTLHVQKIISAISELLERLKSYGEDGTAAKHLFFSQSCSLLVRLVPVLSSYSDLVLFFLTMSLATHRSTAKLLSVLAQVFTELAQKGFCLPKEFMEDSAGEGATEFHDYEGGGIGEGEGMKDVSDQIGNEEQVEDTFQKGQEKDKEDPDSKSDIKGEDNAIEMSEDFDGKMHDGELEEQEEDDEKSDSEGGDLDKHMGDLNGEEADKLDERLWGDDDEEEDEEEEDNKTEETGPGMDEEDSELVAKDDNLDSGNSNKDKSQQDKKEEKEEAEADDGGQGEDKINEQIDERDYDENEVDPYHGNQEKVPEPEALDLPDDLNLDSEDKNGGEDTDNEEGEEENPLEIKEKPEEAGHEAEERGETETDQNESQSPQEPEEGPSEDDKAEGEEEMDTGADDQDGDAAQHPEEHSEEQQQSVEEKDKEADEEGGENGPADQGFQPQEEEEREDSDTEEQVPEALERKEHASCGQTGVENMQNTQAMELAGAAPEKEQGKEEHGSGAADANQAEGHESNFIAQLASQKHTRKNTQVSITPQLNLGEGSM

SEQ ID NO: 905858 - protein, 530 aa, Homo sapiens
MALVESLEYVRGEISKAMADFTTWKTHLLTSDSQGGNQMLDEGFVEDFSEQMEIAIRAILCAIQNLEERKNEKAEENTDQASPQEDYAGFERLQSGHLTKLLEDDFWADVSTLHVQKIISAISELLERLKSYGEDGTAAKHLFFSQSCSLLVRLVPVLSSYSDLVLFFLTMSLATHRSTAKLLSVLAQVFTELAQKGFCLPKEFMEDSAGEGATEFHDYEGGGIGEGEGMKDVSDQIGNEEQVEDTFQKGQEKDKEDPDSKSDIKGEDNAIEMSEDFDGKMHDGELEEQEEDDEKSDSEGGDLDKHMGDLNGEEADKLDERLWGDDDEEEDEEEEDNKTEETGPGMDEEDSELVAKDDNLDSGNSNKDKSQQDKKEEKEEAEADDGGQGEDKINEQIDERDYDENEVDPYHGNQEKVPEPEALDLPDDLNLDSEDKNGGEDTDNEEGEEENPLEIKEKPEEAGHEAEERGETETDQNESQSPQEPEEGPSEDDKLHCEVCDPFEVVIKDTDSLFNQVSQSMYLKLYHFLF

SEQ ID NO: 905859 - protein, 1121 aa, Homo sapiens
MALVESLEYVRGEISKAMADFTTWKTHLLTSDSQGGNQMLDEGFVEDFSEQMEIAIRAILCAIQNLEERKNEKAEENTDQASPQEDYAGFERLQSGHLTKLLEDDFWADVSTLHVQKIISAISELLERLKSYGEDGTAAKHLFFSQSCSLLVRLVPVLSSYSDLVLFFLTMSLATHRSTAKLLSVLAQVFTELAQKGFCLPKEFMEDSAGEGATEFHDYEGGGIGEGEGMKDVSDQIGNEEQVEDTFQKGQEKDKEDPDSKSDIKGEDNAIEMSEDFDGKMHDGELEEQEEDDEKSDSEGGDLDKHMGDLNGEEADKLDERLWGDDDEEEDEEEEDNKTEETGPGMDEEDSELVAKDDNLDSGNSNKDKSQQDKKEEKEEAEADDGGQGEDKINEQIDERDYDENEVDPYHGNQEKVPEPEALDLPDDLNLDSEDKNGGEDTDNEEGEEENPLEIKEKPEEAGHEAEERGETETDQNESQSPQEPEEGPSEDDKAEGEEEMDTGADDQDGDAAQHPEEHSEEQQQSVEEKDKEADEEGGENGPADQGFQPQEEEEREDSDTEEQVPEALERKEHASCGQTGVENMQNTQAMELAGAAPEKEQGKEEHGSGAADANQAEGHESNFIAQLASQKHTRKNTQSFKRKPGQADNERSMGDHNERVHKRLRTVDTDSHAEQGPAQQPQAQVEDADAFEHIKQGSDAYDAQTYDVASKEQQQSAKDSGKDQEEEEIEDTLMDTEEQEEFKAADVEQLKPEEIKSGTTAPLGFDEMEVEIQTVKTEEDQDPRTDKAHKETENEKPERSRESTIHTAHQFLMDTIFQPFFHVNLETQREKVAAEMWQSYLILTAPLSQRLCEELRLILEPTQAAKLKGDYRTGKRLNIRKVIPYIASQFRKDKIWLRRTKPSKRQYQICLAIDDSSSMVDNHTKQLAFESLAVIGNALTLLEVGQIAVCSFGESVKLLHPFHEQFSDYSGSQILRLCKFQQKKTKIAQFLESVANMFAAAQQLSQNISSETAQLLLVVSDGRGLFLEGKERVLAAVQAARNANIFVIFVVLDNPSSRDSILDIKVPIFKGPGEMPEIRSYMEEFPFPYYIILRDVNALPETLSDALRQWFELVTASDHP

SEQ ID NO: 905860 - protein, 834 aa, Homo sapiens
MGDLNGEEADKLDERLWGDDDEEEDEEEEDNKTEETGPGMDEEDSELVAKDDNLDSGNSNKDKSQQDKKEEKEEAEADDGGQGEDKINEQIDERDYDENEVDPYHGNQEKVPEPEALDLPDDLNLDSEDKNGGEDTDNEEGEEENPLEIKEKPEEAGHEAEERGETETDQNESQSPQEPEEGPSEDDKAEGEEEMDTGADDQDGDAAQHPEEHSEEQQQSVEEKDKEADEEGGENGPADQGFQPQEEEEREDSDTEEQVPEALERKEHASCGQTGVENMQNTQAMELAGAAPEKEQGKEEHGSGAADANQAEGHESNFIAQLASQKHTRKNTQSFKRKPGQADNERSMGDHNERVHKRLRTVDTDSHAEQGPAQQPQAQVEDADAFEHIKQGSDAYDAQTYDVASKEQQQSAKDSGKDQEEEEIEDTLMDTEEQEEFKAADVEQLKPEEIKSGTTAPLGFDEMEVEIQTVKTEEDQDPRTDKAHKETENEKPERSRESTIHTAHQFLMDTIFQPFLKDVNELRQELERQLEMWQPRESGNPEEEKVAAEMWQSYLILTAPLSQRLCEELRLILEPTQAAKLKGDYRTGKRLNIRKVIPYIASQFRKDKIWLRRTKPSKRQYQICLAIDDSSSMVDNHTKQLAFESLAVIGNALTLLEVGQIAVCSFGESVKLLHPFHEQFSDYSGSQILRLCKFQQKKTKIAQFLESVANMFAAAQQLSQNISSETAQLLLVVSDGRGLFLEGKERVLAAVQAARNANIFVIFVVLDNPSSRDSILDIKVPIFKGPGEMPEIRSYMEEFPFPYYIILRDVNALPETLSDALRQWFELVTASDHP

SEQ ID NO: 905861 - protein, 832 aa, Homo sapiens
ISHPWDRSNRQKLCMSKSQPMQKQFLGLSVMIVFSSSDIEEDSELVAKDDNLDSGNSNKDKSQQDKKEEKEEAEADDGGQGEDKINEQIDERDYDENEVDPYHGNQEKVPEPEALDLPDDLNLDSEDKNGGEDTDNEEGEEENPLEIKEKPEEAGHEAEERGETETDQNESQSPQEPEEGPSEDDKAEGEEEMDTGADDQDGDAAQHPEEHSEEQQQSVEEKDKEADEEGGENGPADQGFQPQEEEEREDSDTEEQVPEALERKEHASCGQTGVENMQNTQAMELAGAAPEKEQGKEEHGSGAADANQAEGHESNFIAQLASQKHTRKNTQSFKRKPGQADNERSMGDHNERVHKRLRTVDTDSHAEQGPAQQPQAQVEDADAFEHIKQGSDAYDAQTYDVASKEQQQSAKDSGKDQEEEEIEDTLMDTEEQEEFKAADVEQLKPEEIKSGTTAPLGFDEMEVEIQTVKTEEDQDPRTDKAHKETENEKPERSRESTIHTAHQFLMDTIFQPFLKDVNELRQELERQLEMWQPRESGNPEEEKVAAEMWQSYLILTAPLSQRLCEELRLILEPTQAAKLKGDYRTGKRLNIRKVIPYIASQFRKDKIWLRRTKPSKRQYQICLAIDDSSSMVDNHTKQLAFESLAVIGNALTLLEVGQIAVCSFGESVKLLHPFHEQFSDYSGSQILRLCKFQQKKTKIAQFLESVANMFAAAQQLSQNISSETAQLLLVVSDGRGLFLEGKERVLAAVQAARNANIFVIFVVLDNPSSRDSILDIKVPIFKGPGEMPEIRSYMEEFPFPYYIILRDVNALPETLSDALRQWFELVTASDHP

SEQ ID NO: 905862 - protein, 124 aa, Homo sapiens
MFAAAQQLSQNISSETAQLLLVVSDGRGLFLEGKERVLAAVQAARNANIFVIFVVLDNPSSRDSILDIKVPIFKGPGEMPEIRSYMEEFPFPYYIILRDVNALPETLSDALRQWFELVTASDHP

SEQ ID NO: 905863 - protein, 1071 aa, Homo sapiens; identical to SEQ ID NO: 905854

SEQ ID NO: 905864 - protein, 735 aa, Homo sapiens
MALVESLEYVRGEISKAMADFTTWKTHLLTSDSQGGNQMLDEGFVEDFSEQMEIAIRAILCAIQNLEERKNEKAEENTDQASPQEDYAGFERLQSGHLTKLLEDDFWADVSTLHVQKIISAISELLERLKSYGEDGTAAKHLFFSQSCSLLVRLVPVLSSYSDLVLFFLTMSLATHRSTAKLLSVLAQVFTELAQKGFCLPKEFMEDSAGEGATEFHDYEGGGIGEGEGMKDVSDQIGNEEQVEDTFQKGQEKDKEDPDSKSDIKGEDNAIEMSEDFDGKMHDGELEEQEEDDEKSDSEGGDLDKHMGDLNGEEADKLDERLWGDDDEEEDEEEEDNKTEETGPGMDEEDSELVAKDDNLDSGNSNKDKSQQDKKEEKEEAEADDGGQGEDKINEQIDERDYDENEVDPYHGNQEKVPEPEALDLPDDLNLDSEDKNGGEDTDNEEGEEENPLEIKEKPEEAGHEAEERGETETDQNESQSPQEPEEGPSEDDKAEGEEEMDTGADDQDGDAAQHPEEHSEEQQQSVEEKDKEADEEGGENGPADQGFQPQEEEEREDSDTEEQVPEALERKEHASCGQTGVENMQNTQAMELAGAAPEKEQGKEEHGSGAADANQAEGHESNFIAQLASQKHTRKNTQSFKRKPGQADNERSMGDHNERVHKRLRTVDTDSHAEQGPAQQPQAQVEDADAFEHIKQGSDAYDAQTYDVARINGAIPNPCWSSESHGLCTLPLNH

SEQ ID NO: 905865 - protein, 1158 aa, Homo sapiens
GTAGEQCDWGRKEKGGRGGCRRGLGQGGLGLDQVVGLAGWCKRRKQANPRRNNVTNYNTVVETNSDSDDEDKLHIVEEESVTDAADCEGVPEDDLPTDQTVLPGRSSEREGNAKNCWEDDRKEGQEILGPEAQADEAGCTVKDDECESDAENEQNHDPNVEEFLQQQDTAVIFPEAPEEDQRQGTPEASGHDENGTPDAFSQLLTCPYCDRGYKRFTSLKEHIKYRHEKNEDNFSCSLCSYTFAYRTQLERHMTSHKSGRDQRHVTQSGCNRKFKCTECGKAFKYKHHLKEHLRIHSGEKPYECPNCKKRFSHSGSYSSHISSKKCISLIPVNGRPRTGLKTSQCSSPSLSASPGSPTRPQIRQKIENKPLQEQLSVNQIKTEPVDYEFKPIVVASGINCSTPLQNGVFTGGGPLQATSSPQGMVQAVVLPTVGLVSPISINLSDIQNVLKVAVDGNVIRQVLENNQANLASKEQETINASPIQQGGHSVISAISLPLVDQDGTTKIIINYSLEQPSQLQVVPQNLKKENPVATNSCKSEKLPEDLTVKSEKDKSFEGGVNDSTCLLCDDCPGDINALPELKHYDLKQPTQPPPLPAAEAEKPESSVSSATGDGNLSPSQPPLKNLLSLLKAYYALNAQPSAEELSKIADSVNLPLDVVKKWFEKMQAGQISVQSSEPSSPEPGKVNIPAKNNDQPQSANANEPQDSTVNLQSPLKMTNSPVLPVGSTTNGSRSSTPSPSPLNLSSSRNTQGYLYTAEGAQEEPQVEPLDLSLPKQQGELLERSTITSVYQNSVYSVQEEPLNLSCAKKEPQKDSCVTDSEPVVNVIPPSANPINIAIPTVTAQLPTIVAIADQNSVPCLRALAANKQTILIPQVAYTYSTTVSPAVQEPPLKVIQPNGNQDERQDTSSEGVSNVEDQNDSDSTPPKKKMRKTENGMYACDLCDKIFQKSSSLLRHKYEHTGKRPHECGICKKAFKHKHHLIEHMRLHSGEKPYQCDKCGKRFSHSGSYSQHMNHRYSYCKREAEERDSTEQEEAGPEILSNEHVGARASPSQGDSDERESLTREEDEDSEKEEEEEDKEMEELQEEKECEKPQGDEEEEEEEEEVEEEEVEEAENEGEEAKTEGLMKDDRAESQASSLGQKVGESSEQVSEEKTNEA

SEQ ID NO: 905866 - protein, 1158 aa, Homo sapiens; identical to SEQ ID NO: 905865

SEQ ID NO: 905867 - protein, 1131 aa, Homo sapiens
LDTSERIMADGPRCKRRKQANPRRNNVTNYNTVVETNSDSDDEDKLHIVEEESVTDAADCEGVPEDDLPTDQTVLPGRSSEREGNAKNCWEDDRKEGQEILGPEAQADEAGCTVKDDECESDAENEQNHDPNVEEFLQQQDTAVIFPEAPEEDQRQGTPEASGHDENGTPDAFSQLLTCPYCDRGYKRFTSLKEHIKYRHEKNEDNFSCSLCSYTFAYRTQLERHMTSHKSGRDQRHVTQSGCNRKFKCTECGKAFKYKHHLKEHLRIHSGEKPYECPNCKKRFSHSGSYSSHISSKKCISLIPVNGRPRTGLKTSQCSSPSLSASPGSPTRPQIRQKIENKPLQEQLSVNQIKTEPVDYEFKPIVVASGINCSTPLQNGVFTGGGPLQATSSPQGMVQAVVLPTVGLVSPISINLSDIQNVLKVAVDGNVIRQVLENNQANLASKEQETINASPIQQGGHSVISAISLPLVDQDGTTKIIINYSLEQPSQLQVVPQNLKKENPVATNSCKSEKLPEDLTVKSEKDKSFEGGVNDSTCLLCDDCPGDINALPELKHYDLKQPTQPPPLPAAEAEKPESSVSSATGDGNLSPSQPPLKNLLSLLKAYYALNAQPSAEELSKIADSVNLPLDVVKKWFEKMQAGQISVQSSEPSSPEPGKVNIPAKNNDQPQSANANEPQDSTVNLQSPLKMTNSPVLPVGSTTNGSRSSTPSPSPLNLSSSRNTQGYLYTAEGAQEEPQVEPLDLSLPKQQGELLERSTITSVYQNSVYSVQEEPLNLSCAKKEPQKDSCVTDSEPVVNVIPPSANPINIAIPTVTAQLPTIVAIADQNSVPCLRALAANKQTILIPQVAYTYSTTVSPAVQEPPLKVIQPNGNQDERQDTSSEGVSNVEDQNDSDSTPPKKKMRKTENGMYACDLCDKIFQKSSSLLRHKYEHTGKRPHECGICKKAFKHKHHLIEHMRLHSGEKPYQCDKCGKRFSHSGSYSQHMNHRYSYCKREAEERDSTEQEEAGPEILSNEHVGARASPSQGDSDERESLTREEDEDSEKEEEEEDKEMEELQEEKECEKPQGDEEEEEEEEEVEEEEVEEAENEGEEAKTEGLMKDDRAESQASSLGQKVGESSEQVSEEKTNEA

SEQ ID NO: 905868 - protein, 1123 aa, Homo sapiens
MGQQRNSSLWRHLDQHYDVTNYNTVVETNSDSDDEDKLHIVEEESVTDAADCEGVPEDDLPTDQTVLPGRSSEREGNAKNCWEDDRKEGQEILGPEAQADEAGCTVKDDECESDAENEQNHDPNVEEFLQQQDTAVIFPEAPEEDQRQGTPEASGHDENGTPDAFSQLLTCPYCDRGYKRFTSLKEHIKYRHEKNEDNFSCSLCSYTFAYRTQLERHMTSHKSGRDQRHVTQSGCNRKFKCTECGKAFKYKHHLKEHLRIHSGEKPYECPNCKKRFSHSGSYSSHISSKKCISLIPVNGRPRTGLKTSQCSSPSLSASPGSPTRPQIRQKIENKPLQEQLSVNQIKTEPVDYEFKPIVVASGINCSTPLQNGVFTGGGPLQATSSPQGMVQAVVLPTVGLVSPISINLSDIQNVLKVAVDGNVIRQVLENNQANLASKEQETINASPIQQGGHSVISAISLPLVDQDGTTKIIINYSLEQPSQLQVVPQNLKKENPVATNSCKSEKLPEDLTVKSEKDKSFEGGVNDSTCLLCDDCPGDINALPELKHYDLKQPTQPPPLPAAEAEKPESSVSSATGDGNLSPSQPPLKNLLSLLKAYYALNAQPSAEELSKIADSVNLPLDVVKKWFEKMQAGQISVQSSEPSSPEPGKVNIPAKNNDQPQSANANEPQDSTVNLQSPLKMTNSPVLPVGSTTNGSRSSTPSPSPLNLSSSRNTQGYLYTAEGAQEEPQVEPLDLSLPKQQGELLERSTITSVYQNSVYSVQEEPLNLSCAKKEPQKDSCVTDSEPVVNVIPPSANPINIAIPTVTAQLPTIVAIADQNSVPCLRALAANKQTILIPQVAYTYSTTVSPAVQEPPLKVIQPNGNQDERQDTSSEGVSNVEDQNDSDSTPPKKKMRKTENGMYACDLCDKIFQKSSSLLRHKYEHTGKRPHECGICKKAFKHKHHLIEHMRLHSGEKPYQCDKCGKRFSHSGSYSQHMNHRYSYCKREAEERDSTEQEEAGPEILSNEHVGARASPSQGDSDERESLTREEDEDSEKEEEEEDKEMEELQEEKECEKPQGDEEEEEEEEEVEEEEVEEAENEGEEAKTEGLMKDDRAESQASSLGQKVGESSEQVSEEKTNEA

SEQ ID NO: 905869 - protein, 1131 aa, Homo sapiens; identical to SEQ ID NO: 905867

SEQ ID NO: 905870 - protein, 735 aa, Homo sapiens
MVQAVVLPTVGLVSPISINLSDIQNVLKVAVDGNVIRQVLENNQANLASKEQETINASPIQQGGHSVISAISLPLVDQDGTTKIIINYSLEQPSQLQVVPQNLKKENPVATNSCKSEKLPEDLTVKSEKDKSFEGGVNDSTCLLCDDCPGDINALPELKHYDLKQPTQPPPLPAAEAEKPESSVSSATGDGNLSPSQPPLKNLLSLLKAYYALNAQPSAEELSKIADSVNLPLDVVKKWFEKMQAGQISVQSSEPSSPEPGKVNIPAKNNDQPQSANANEPQDSTVNLQSPLKMTNSPVLPVGSTTNGSRSSTPSPSPLNLSSSRNTQGYLYTAEGAQEEPQVEPLDLSLPKQQGELLERSTITSVYQNSVYSVQEEPLNLSCAKKEPQKDSCVTDSEPVVNVIPPSANPINIAIPTVTAQLPTIVAIADQNSVPCLRALAANKQTILIPQVAYTYSTTVSPAVQEPPLKVIQPNGNQDERQDTSSEGVSNVEDQNDSDSTPPKKKMRKTENGMYACDLCDKIFQKSSSLLRHKYEHTGKRPHECGICKKAFKHKHHLIEHMRLHSGEKPYQCDKCGKRFSHSGSYSQHMNHRYSYCKREAEERDSTEQEEAGPEILSNEHVGARASPSQGDSDERESLTREEDEDSEKEEEEEDKEMEELQEEKECEKPQGDEEEEEEEEEVEEEEVEEAENEGEEAKTEGLMKDDRAESQASSLGQKVGESSEQVSEEKTNEA

SEQ ID NO: 905871 - protein, 735 aa, Homo sapiens; identical to SEQ ID NO: 905870

SEQ ID NO: 905872 - protein, 1131 aa, Homo sapiens; identical to SEQ ID NO: 905867

SEQ ID NO: 905873 - protein, 1131 aa, Homo sapiens; identical to SEQ ID NO: 905867

SEQ ID NO: 905874 - protein, 906 aa, Homo sapiens
MTSHKSGRDQRHVTQSGCNRKFKCTECGKAFKYKHHLKEHLRIHSGEKPYECPNCKKRFSHSGSYSSHISSKKCISLIPVNGRPRTGLKTSQCSSPSLSASPGSPTRPQIRQKIENKPLQEQLSVNQIKTEPVDYEFKPIVVASGINCSTPLQNGVFTGGGPLQATSSPQGMVQAVVLPTVGLVSPISINLSDIQNVLKVAVDGNVIRQVLENNQANLASKEQETINASPIQQGGHSVISAISLPLVDQDGTTKIIINYSLEQPSQLQVVPQNLKKENPVATNSCKSEKLPEDLTVKSEKDKSFEGGVNDSTCLLCDDCPGDINALPELKHYDLKQPTQPPPLPAAEAEKPESSVSSATGDGNLSPSQPPLKNLLSLLKAYYALNAQPSAEELSKIADSVNLPLDVVKKWFEKMQAGQISVQSSEPSSPEPGKVNIPAKNNDQPQSANANEPQDSTVNLQSPLKMTNSPVLPVGSTTNGSRSSTPSPSPLNLSSSRNTQGYLYTAEGAQEEPQVEPLDLSLPKQQGELLERSTITSVYQNSVYSVQEEPLNLSCAKKEPQKDSCVTDSEPVVNVIPPSANPINIAIPTVTAQLPTIVAIADQNSVPCLRALAANKQTILIPQVAYTYSTTVSPAVQEPPLKVIQPNGNQDERQDTSSEGVSNVEDQNDSDSTPPKKKMRKTENGMYACDLCDKIFQKSSSLLRHKYEHTGKRPHECGICKKAFKHKHHLIEHMRLHSGEKPYQCDKCGKRFSHSGSYSQHMNHRYSYCKREAEERDSTEQEEAGPEILSNEHVGARASPSQGDSDERESLTREEDEDSEKEEEEEDKEMEELQEEKECEKPQGDEEEEEEEEEVEEEEVEEAENEGEEAKTEGLMKDDRAESQASSLGQKVGESSEQVSEEKTNEA

SEQ ID NO: 905875 - protein, 929 aa, Homo sapiens
LDTSERIMADGPRCKRRKQANPRRNNVTNYNTVVETNSDSDDEDKLHIVEEESVTDAADCEGVPEDDLPTDQTVLPGRSSEREGNAKNCWEDDRKEGQEILGPEAQADEAGCTVKDDECESDAENEQNHDPNVEEFLQQQDTAVIFPEAPEEDQRQGTPEASGHDENGTPDAFSQLLTCPYCDRGYKRFTSLKEHIKYRHEKNEDNFSCSLCSYTFAYRTQLERHMTSHKSGRDQRHVTQSGCNRKFKCTECGKAFKYKHHLKEHLRIHSGEKPYECPNCKKRFSHSGSYSSHISSKKCISLIPVNGRPRTGLKTSQCSSPSLSASPGSPTRPQIRQKIENKPLQEQLSVNQIKTEPVDYEFKPIVVASGINCSTPLQNGVFTGGGPLQATSSPQGMVQAVVLPTVGLVSPISINLSDIQNVLKVAVDGNVIRQVLENNQANLASKEQETINASPIQQGGHSVISAISLPLVDQDGTTKIIINYSLEQPSQLQVVPQNLKKENPVATNSCKSEKLPEDLTVKSEKDKSFEGGVNDSTCLLCDDCPGDINALPELKHYDLKQPTQPPPLPAAEAEKPESSVSSATGDGNLSPSQPPLKNLLSLLKAYYALNAQPSAEELSKIADSVNLPLDVVKKWFEKMQAGQISVQSSEPSSPEPGKVNIPAKNNDQPQSANANEPQDSTVNLQSPLKMTNSPVLPVGSTTNGSRSSTPSPSPLNLSSSRNTQGYLYTAEGAQEEPQVEPLDLSLPKQQGELLERSTITSVYQNSVYSVQEEPLNLSCAKKEPQKDSCVTDSEPVVNVIPPSANPINIAIPTVTAQLPTIVAIADQNSVPCLRALAANKQTILIPQVAYTYSTTVSPAVQEPPLKVIQPNGNQDERQDTSSEGVSNVEDQNDSDSTPPKKKMRKKKNVKNHKGMRKRRRRRKKWKKKR

SEQ ID NO: 905876 - protein, 1131 aa, Homo sapiens; identical to SEQ ID NO: 905867

SEQ ID NO: 905877 - protein, 689 aa, Homo sapiens
MAQVEKRGGLLRKSSASKKPLKEKVVLMYDEIFMTEDPSKCSPRFWEELFLMKVNLEYLEGKLESLDGEELMKIKDNINCLFQHCIQALGEEHPIRVVNALQTLCALIRGVHQKNKSTSGFDIINMLMGFDKAELCMKNLMESLDSLLCAEGSESLKSLCLKLLLCLVTVTDNISQNTILEYVMINSIFEAILQILSHPPSRREHGYDAVVLLALLVNYRKYESVNPYIVKLSIVDDEATLNGMGLVIAQALSEYNRQYKDKEEEHQSGFFSALTNMVGSMFIADAHEKISVQTNEAILLALYEAVHLNRNFITVLAQSHPEMGLVTTPVSPAPTTPVTPLGTTPPSSDVISSVELPLDADVQTSNLLITFLKYSSIVMQDTKDEHRLHSGKLCLIILTCIAEDQYANAFLHDDNMNFRVNLHRMPMRHRKKAADKNLPCRPLVCAVLDLMVEFIVTHMMKEFPMDLYIRCIQVVHKLLCYQKKCRVRLHYTWRELWSALINLLKFLMSNETVLLAKHNIFTLALMIVNLFNMFITYGDTFLPTPSSYDELYYEIIRMHQSFDNLYSMVLRLSTNAGQWKEAASKVTHALVNIRAIINHFNPKIESYAAVNHISQLSEEQVLEVVRANYDTLTLKLQDGLDQYERYSEQHKEAAFFKELVRSISTNVRRNLVFHTLSQEVLLKEFSTIS

SEQ ID NO: 905878 - protein, 198 aa, Homo sapiens
MAQVEKRGGLLRKSSASKKPLKEKVVLMYDEIFMTEDPSKCSPRFWEELFLMKVNLEYLEGKLESLDGEELMKIKDNINCLFQHCIQALGEEHPIRVVNALQTLCALIRGVHQKNKSTSGFDIINMLMGFDKAELCMKVRHKLQMCLWMAASDSCSWTLSADKCTQRFGLRKIQMIEFGLAFRCFYFTDLLYLNKGKF

SEQ ID NO: 905879 - protein, 447 aa, Homo sapiens
MAQVEKRGGLLRKSSASKKPLKEKVVLMYDEIFMTEDPSKCSPRFWEELFLMKVNLEYLEGKLESLDGEELMKIKDNINCLFQHCIQALGEEHPIRVVNALQTLCALIRGVHQKNKSTSGFDIINMLMGFDKAELCMKNLMESLDSLLCAEGSESLKSLCLKLLLCLVTVTDNISQNTILEYVMINSIFEAILQILSHPPSRREHGYDAVVLLALLVNYRKYESVNPYIVKLSIVDDEATLNGMGLVIAQALSEYNRQYKDKEEEHQSGFFSALTNMVGSMFIADAHEKISVQTNEAILLALYEAVHLNRNFITVLAQSHPEMGLVTTPVSPAPTTPVTPLGTTPPSSDVISSVELPLDADVQTSNLLITFLKYSSIVMQDTKDEHRLHSGKLCLIILTCIAEPMRHRKKAADKNLPCRPLVCAVLDLMVEFIVTHMMKEFPMDLYM

SEQ ID NO: 905880 - protein, 225 aa, Homo sapiens
MSRPRKRLAGTSGSDKGLSGKRTKTENSGEALAKVEDSNPQKTSATKNCLKNLSSHWLMKSEPESRLEKGVDVKFSIEDLKAQPKQTTCWDGVRNYQARNFLRAMKLGEEAFFYHSNCKEPGIAGLMKIVKEAYPDHTQFEKNNPHYDPSSKEDNPKWSMVDVQFVRMMKRFIPLAELKSYHQAHKATGGPLKNMVLFTRQRLSIQPLTQEEFDFVLSLEEKEPS

SEQ ID NO: 905881 - protein, 166 aa, Homo sapiens
MSRPRKRLAGTSGSDKGLSGKRTKTENSGEALAKVEDSNPQKTSATKNCLKNLSSHWLMKSEPESRLEKGVDVKFSIEDLKAQPKQTTCWDGVRNYQARNFLRAMKLGEEAFFYHSNCKEPGIAGLMKIVKEAYPDHTQFEKNNPHYDPSSKEDNPKWSMKSLILF

SEQ ID NO: 905882 - protein, 225 aa, Homo sapiens; identical to SEQ ID NO: 905880

SEQ ID NO: 905883 - protein, 167 aa, Homo sapiens [sequence omitted]

SEQ ID NO: 905884 - protein, 168 aa, Homo sapiens
MSRPRKRLAGTSGSDKGLSGKRTKTENSGEALAKVEDSNPQKTSATKNCLKNLSSHWLMKSEPESRLEKGVDVKFSIEDLKAQPKQTTCWDGVRNYQARNFLRAMKLGEEAFFYHSNCKEPGIAGLMKIVKEAYPDHTQFEKNNPHYDPSSKEDNPKWSMVKTMLSIS

SEQ ID NO: 905885 - protein, 199 aa, Homo sapiens
GVALHSLRRSGGGPQSSLQSVGIVRTKVPCSVTMSRPRKRLAGTSGSDKGLSGKRTKTENSGEALAKVEDSNPQKTSATKNCLKNLSSHWLMKSEPESRLEKGVDVKFSIEDLKAQPKQTTCWDGVRNYQARNFLRAMKLGEEAFFYHSNCKEPGIAGLMKIVKEAYPDHTQFEKNNPHYDPSSKEDNPKWSMKSLILF

SEQ ID NO: 905886 - protein, 155 aa, Homo sapiens
MSRPRKRLAGTSGSDKGLSGKRTKTENSGEALAKVEDSNPQKTSATKNCLKNLSSHWLMKSEPESRLEKGVDVKFSIEDLKAQPKQTTCWDGVRNYQARNFLRAMKLGEEAFFYHSNCKEPGIAGLMKVSWAGFGVNPFSSRETNLSRYKGIYLN

SEQ ID NO: 905887 - protein, 118 aa, Homo sapiens
LTGEAESPGLRTWKFQEYILRIMYLGINEIRKNSPKKEWWDGVRNYQARNFLRAMKLGEEAFFYHSNCKEPGIAGLMKIVKEAYPDHTQFEKNNPHYDPSSKEDNPKWSMVKTMLSIS

SEQ ID NO: 905888 - protein, 225 aa, Homo sapiens; identical to SEQ ID NO: 905880

SEQ ID NO: 905889 - protein, 258 aa, Homo sapiens
GVALHSLRRSGGGPQSSLQSVGIVRTKVPCSVTMSRPRKRLAGTSGSDKGLSGKRTKTENSGEALAKVEDSNPQKTSATKNCLKNLSSHWLMKSEPESRLEKGVDVKFSIEDLKAQPKQTTCWDGVRNYQARNFLRAMKLGEEAFFYHSNCKEPGIAGLMKIVKEAYPDHTQFEKNNPHYDPSSKEDNPKWSMVDVQFVRMMKRFIPLAELKSYHQAHKATGGPLKNMVLFTRQRLSIQPLTQEEFDFVLSLEEKEPS

SEQ ID NO: 905890 - protein, 274 aa, Homo sapiens
MSRPRKRLAGTSGSGTFCLSWDEIESSPFFYNVLNELFLSTFIGTFKEQKGDGPGATVSKKERHKGLSGKRTKTENSGEALAKVEDSNPQKTSATKNCLKNLSSHWLMKSEPESRLEKGVDVKFSIEDLKAQPKQTTCWDGVRNYQARNFLRAMKLGEEAFFYHSNCKEPGIAGLMKIVKEAYPDHTQFEKNNPHYDPSSKEDNPKWSMVDVQFVRMMKRFIPLAELKSYHQAHKATGGPLKNMVLFTRQRLSIQPLTQEEFDFVLSLEEKEPS

SEQ ID NO: 905891 - protein, 211 aa, Homo sapiens
MSRPRKRLAGTSGSDKGLSGKRTKTENSGEALAKVEDSNPQKTSATKNCLKNLSSHWLMKSEPESRLEKGVDVKFSIEDLKAQPKQTTCWDGVRNYQARNFLRAMKLGEEAFFYHSNCKEPGIAGLMKIVKEAYPDHTQFEKNNPHYDPSSKEDNPKWSMVDVQFVRMMKRFIPLAELKSYHQAHKATGGPLKNMVLFTRQSYLLLLPSTL

SEQ ID NO: 905892 - protein, 164 aa, Homo sapiens
MSRPRKRLAGTSGSDKGLSGKRTKTENSGEALAKVEDSNPQKTSATKNCLKNLSSHWLMKSEPESRLEKGVDVKFSIEDLKAQPKQTTCWDGVRNYQARNFLRAMKLGEEAFFYHSNCKEPGIAGLMKIVKEAYPDHTQFEKNNPHYDPSSKEDNPKWSMKSLI

SEQ ID NO: 905893 - protein, 239 aa, Homo sapiens
GVALHSLRRSGGGPQSSLQSVGIVRTKVPCSVTMSRPRKRLAGTSGSDKGLSGKRTKTENSGEALAKVEDSNPQKTSATKNCLKNLSSHWLMKSEPESRLEKGVDVKFSIEDLKAQPKQTTCWDGVRNYQARNFLRAMKLGEEAFFYHSNCKEPGIAGLMKIVKEAYPDHTQFEVDVQFVRMMKRFIPLAELKSYHQAHKATGGPLKNMVLFTRQRLSIQPLTQEEFDFVLSLEEKEPS

SEQ ID NO: 905894 - protein, 218 aa, Homo sapiens
MGRVFLTGEKANSILKRYPRANGFFEEIRQGNIERECKEEFCTFEEAREAFENNEKTKEFWSTYTKAQQGESNRGSDWFQFYLTFPLIFGLFIILLVIFLIWRCFLRNKTRRQTVTEGHIPFPQHLNIITPPPPPDEVFDSSGLSPGFLGYVVGRSDSVSTRLSNCDPPPTYEEATGQVNLQRSETEPHLDPPPEYEDIVNSNSASAIPMVPVVTTIK

SEQ ID NO: 905895 - protein, 218 aa, Homo sapiens; identical to SEQ ID NO: 905894

SEQ ID NO: 905896 - protein, 218 aa, Homo sapiens; identical to SEQ ID NO: 905894

SEQ ID NO: 905897 - protein, 218 aa, Homo sapiens; identical to SEQ ID NO: 905894

SEQ ID NO: 905898 - protein, 253 aa, Homo sapiens
RPRWVPSWGNVIQAKRPRKDWGNHHPGTCQKPQENMGRVFLTGEKANSILKRYPRANGFFEEIRQGNIERECKEEFCTFEEAREAFENNEKTKEFWSTYTKAQQGESNRGSDWFQFYLTFPLIFGLFIILLVIFLIWRCFLRNKTRRQTVTEGHIPFPQHLNIITPPPPPDEVFDSSGLSPGFLGYVVGRSDSVSTRLSNCDPPPTYEEATGQVNLQRSETEPHLDPPPEYEDIVNSNSASAIPMVPVVTTIK

SEQ ID NO: 905899 - protein, 877 aa, Homo sapiens
FSAFRYPGHSHFSPLFLVSSPIPLSPVLPLPLQWFSPLSCHQLLGPGLLRLGRLWLRSPSHTAPAPGLWLSGFGLLRGDHLFLCSAPGPGPPAPEDMVHLRRLQEISVVSAADTPDKKEHLVLVETGRTLYLQGEGRLDFTAWNAAIGGAAGGGGTGLQEQQMSRGDIPIIVDACISFVTQHGLRLEGVYRKGGARARSLRLLAEFRRDARSVKLRPGEHFVEDVTDTLKRFFRELDDPVTSARLLPRWREAAGIPKIPESQGPTRISAFPHQNPWFGSPPPHHFPPWGIIQRLGSGEVGRGQRHIHPAFVPKNPSLCTSCHSFFPGPPQPSSIPSPELPQKNQRLEKYKDVIGCLPRVNRRTLATLIGHLYRVQKCAALNQMCTRNLALLFAPSVFQTDGRGEHEVRVLQELIDGYISVFDIDSDQVAQIDLEVSLITTWKDVQLSQAGDLIMEVYIEQQLPDNCVTLKVSPTLTAEELTNQVLEMRGTAAGMDLWVTFEIREHGELERPLHPKEKVLEQALQWCQLPEPCSASLLLKKVPLAQAGCLFTGIRRESPRVGLLRCREEPPRLLGSRFQERFFLLRGRCLLLLKEKKSSKPEREWPLEGAKVYLGIRKKLKPPTPWGFTLILEKMHLYLSCTDEDEMWDWTTSILKAQHDDQQPVVLRRHSSSDLARQKFGTMPLLPIRGDDSGATLLSANQTLRRLHNRRTLSMFFPMKSSQGSVEEQEELEEPVYEEPVYEEVGAFPELIQDTSTSFSTTREWTVKPENPLTSQKSLDQPFLSKSSTLGQEERPPEPPPGPPSKSSPQARGSLEEQLLQELSSLILRKGETTAGLGSPSQPSSPQSPSPTGLPTQTPGFPTQPPCTSSPPSSQPLT

SEQ ID NO: 905900 - protein, 868 aa, Homo sapiens
FSAFRYPGHSHFSPLFLVSSPIPLSPVLPLPLQWFSPLSCHQLLGPGLLRLGRLWLRSPSHTAPAPGLWLSGFGLLRGDHLFLCSAPGPGPPAPEDMVHLRRLQEISVVSAADTPDKKEHLVLVETGRTLYLQGEGRLDFTAWNAAIGGAAGGGGTGLQEQQMSRGDIPIIVDACISFVTQHGLRLEGVYRKGGARARSLRLLAEFRRDARSVKLRPGEHFVEDVTDTLKRFFRELDDPVTSARLLPRWREAAELPQKNQRLEKYKDVIGCLPRVNRRTLATLIGHLYRVQKCAALNQMCTRNLALLFAPSVFQTDGRGEHEVRVLQELIDGYISVFDIDSDQVAQIDLEVSLITTWKDVQLSQAGDLIMEVYIEQQLPDNCVTLKVSPTLTAEELTNQVLEMRGTAAGMDLWVTFEIREHGELERPLHPKEKVLEQALQWCQLPEPCSASLLLKKVPLAQAGCLFTGIRRESPRVGLLRCREEPPRLLGSRFQERFFLLRGRCLLLLKEKKVRPWGQRCGMLGGHGEEHDCTHPLIHSPYSHQSHCFPAPDFCDPVTTDPICFHDVLTSLTMISHLSISLTLFCSQSSKPEREWPLEGAKVYLGIRKKLKPPTPWGFTLILEKMHLYLSCTDEDEMWDWTTSILKAQHDDQQPVVLRRHSSSDLARQKFGTMPLLPIRGDDSGATLLSANQTLRRLHNRRTLSMFFPMKSSQGSVEEQEELEEPVYEEPVYEEVGAFPELIQDTSTSFSTTREWTVKPENPLTSQKSLDQPFLSKSSTLGQEERPPEPPPGPPSKSSPQARGSLEEQLLQELSSLILRKGETTAGLGSPSQPSSPQSPSPTGLPTQTPGFPTQPPCTSSPPSSQPLT

SEQ ID NO: 905901 - protein, 773 aa, Homo sapiens
FSAFRYPGHSHFSPLFLVSSPIPLSPVLPLPLQWFSPLSCHQLLGPGLLRLGRLWLRSPSHTAPAPGLWLSGFGLLRGDHLFLCSAPGPGPPAPEDMVHLRRLQEISVVSAADTPDKKEHLVLVETGRTLYLQGEGRLDFTAWNAAIGGAAGGGGTGLQEQQMSRGDIPIIVDACISFVTQHGLRLEGVYRKGGARARSLRLLAEFRRDARSVKLRPGEHFVEDVTDTLKRFFQLPQKNQRLEKYKDVIGCLPRVNRRTLATLIGHLYRVQKCAALNQMCTRNLALLFAPSVFQTDGRGEHEVRVLQELIDGYISVFDIDSDQVAQIDLEVSLITTWKDVQLSQAGDLIMEVYIEQQLPDNCVTLKVSPTLTAEELTNQVLEMRGTAAGMDLWVTFEIREHGELERPLHPKEKVLEQALQWCQLPEPCSASLLLKKVPLAQAGCLFTGIRRESPRVGLLRCREEPPRLLGSRFQERFFLLRGRCLLLLKEKKSSKPEREWPLEGAKVYLGIRKKLKPPTPWGFTLILEKMHLYLSCTDEDEMWDWTTSILKAQHDDQQPVVLRRHSSSDLARQKFGTMPLLPIRGDDSGATLLSANQTLRRLHNRRTLSMFFPMKSSQGSVEEQEELEEPVYEEPVYEEVGAFPELIQDTSTSFSTTREWTVKPENPLTSQKSLDQPFLSKSSTLGQEERPPEPPPGPPSKSSPQARGSLEEQLLQELSSLILRKGETTAGLGSPSQPSSPQSPSPTGLPTQTPGFPTQPPCTSSPPSSQPLT

SEQ ID NO: 905902 - protein, 793 aa, Homo sapiens
FSAFRYPGHSHFSPLFLVSSPIPLSPVLPLPLQWFSPLSCHQLLGPGLLRLGRLWLRSPSHTAPAPGLWLSGFGLLRGDHLFLCSAPGPGPPAPEDMVHLRRLQEISVVSAADTPDKKEHLVLVETGRTLYLQGEGRLDFTAWNAAIGGAAGGGGTGLQEQQMSRGDIPIIVDACISFVTQHGLRLEGVYRKGGARARSLRLLAEFRRDARSVKLRPGEHFVEDVTDTLKRFFRELDDPVTSARLLPRWREAAELPQKNQRLEKYKDVIGCLPRVNRRTLATLIGHLYRVQKCAALNQMCTRNLALLFAPSVFQTDGRGEHEVRVLQELIDGYISVFDIDSDQVAQIDLEVSLITTWKDVQLSQAGDLIMEVYIEQQLPDNCVTLKVSPTLTAEELTNQVLEMRGTAAGMDLWVTFEIREHGELERPLHPKEKVLEQALQWCQLPEPCSASLLLKKVPLAQAGCLFTGIRRESPRVGLLRCREEPPRLLGSRFQERFFLLRGRCLLLLKEKKSSKPEREWPLEGAKVYLGIRKKLKPPTPWGFTLILEKMHLYLSCTDEDEMWDWTTSILKAQHDDQQPVVLRRHSSSDLARQKFGTMPLLPIRGDDSGATLLSANQTLRRLHNRRTLSMFFPMKSSQGSVEEQEELEEPVYEEPVYEEVGAFPELIQDTSTSFSTTREWTVKPENPLTSQKSLDQPFLSKSSTLGQEERPPEPPPGPPSKSSPQARGSLEEQLLQELSSLILRKGETTAGLGSPSQPSSPQSPSPTGLPTQTPGFPTQPPCTSSPPSSQPLT

SEQ ID NO: 905903 - protein, 697 aa, Homo sapiens
FSAFRYPGHSHFSPLFLVSSPIPLSPVLPLPLQWFSPLSCHQLLGPGLLRLGRLWLRSPSHTAPAPGLWLSGFGLLRGDHLFLCSAPGPGPPAPEDMVHLRRLQEISVVSAADTPDKKEHLVLVETGRTLYLQGEGRLDFTAWNAAIGGAAGGGGTGLQEQQMSRGDIPIIVDACISFVTQHGLRLEGVYRKGGARARSLRLLAEFRRDARSVKLRPGEHFVEDVTDTLKRFFRELDDPVTSARLLPRWREAAELPQKNQRLEKYKDVIGCLPRVNRRTLATLIGHLYRVQKCAALNQMCTRNLALLFAPSVFQTDGRGEHEVRVLQELIDGYISVFDIDSDQVAQIDLEVSLITTWKDVQLSQAGDLIMEVYIEQQLPDNCVTLKVSPTLTAEELTNQVLEMRGTAAGMDLWVTFEIREHGELERPLHPKEKVLEQALQWCQLPEPCSASLLLKKVPLAQAGCLFTGIRRESPRVGLLRCREEPPRLLGSRFQERFFLLRGRCLLLLKEKKSSKPEREWPLEGAKVYLGIRKKLKPPTPWGFTLILEKMHLYLSCTDEDEMWDWTTSILKAQHDDQQPVVLRRHSSSYNRLAANIAIQTEEDPGNLGGYVSHGRRIGKHRKQPGGRGNAGGLHHQRVNSTKYTKVHWESGVKLTLKRTEGLPMSPAMGWPDAGESKQGAPGGGVMEGPGGLKERGG

SEQ ID NO: 905904 - protein, 174 aa, Homo sapiens
GIDLLLSESHAPISHIPHREATDGPVVGGGSLCTMVSRDGWLSSGLRLEGVYRKGGARARSLRLLAEFRRDARSVKLRPGEHFVEDVTDTLKRFFRELDDPVTSARLLPRWREAAGIPKIPESQGPTRISAFPHQNPWFGSPPPHHFPPWGIIQRLGSGGGGKGAETHPSCICA

SEQ ID NO: 905905 - protein, 793 aa, Homo sapiens; identical to SEQ ID NO: 905902

SEQ ID NO: 905906 - protein, 715 aa, Homo sapiens
AVVGGGSLCTMVSRDGWLSSGLRLEGVYRKGGARARSLRLLAEFRRDARSVKLRPGEHFVEDVTDTLKRFFRELDDPVTSARLLPRWREAAGIPKIPESQGPTRISAFPHQNPWFGSPPPHHFPPWGIIQRLGSGEVGRGQRHIHPAFVPKNPSLCTSCHSFFPGPPQPSSIPSPELPQKNQRLEKYKDVIGCLPRVNRRTLATLIGHLYRVQKCAALNQMCTRNLALLFAPSVFQTDGRGEHEVRVLQELIDGYISVFDIDSDQVAQIDLEVSLITTWKDVQLSQAGDLIMEVYIEQQLPDNCVTLKVSPTLTAEELTNQVLEMRGTAAGMDLWVTFEIREHGELERPLHPKEKVLEQALQWCQLPEPCSASLLLKKVPLAQAGCLFTGIRRESPRVGLLRCREEPPRLLGSRFQERFFLLRGRCLLLLKEKKSSKPEREWPLEGAKVYLGIRKKLKPPTPWGFTLILEKMHLYLSCTDEDEMWDWTTSILKAQHDDQQPVVLRRHSSSDLARQKFGTMPLLPIRGDDSGATLLSANQTLRRLHNRRTLSMFFPMKSSQGSVEEQEELEEPVYEEPVYEEVGAFPELIQDTSTSFSTTREWTVKPENPLTSQKSLDQPFLSKSSTLGQEERPPEPPPGPPSKSSPQARGSLEEQLLQELSSLILRKGETTAGLGSPSQPSSPQSPSPTGLPTQTPGFPTQPPCTSSPPSSQPLT

SEQ ID NO: 905907 - protein, 793 aa, Homo sapiens; identical to SEQ ID NO: 905902

SEQ ID NO: 905908 - protein, 629 aa, Homo sapiens
FSAFRYPGHSHFSPLFLVSSPIPLSPVLPLPLQWFSPLSCHQLLGPGLLRLGRLWLRSPSHTAPAPGLWLSGFGLLRGDHLFLCSAPGPGPPAPEDMVHLRRLQEISVVSAADTPDKKEHLVLVETGRTLYLQGEGRLDFTAWNAAIGGAAGGGGTGLQEQQMSRGDIPIIVDACISFVTQHGLRLEGVYRKGGARARSLRLLAEFRRDARSVKLRPGEHFVEDVTDTLKRFFRELDDPVTSARLLPRWREAAELPQKNQRLEKYKDVIGCLPRVNRRTLATLIGHLYRVQKCAALNQMCTRNLALLFAPSVFQTDGRGEHEVRVLQELIDGYISVFDIDSDQVAQIDLEVSLITTWKDVQLSQAGDLIMEVYIEQQLPDNCVTLKVSPTLTAEELTNQVLEMRGTAAGMDLWVTFEIREHGELERPLHPKEKVLEQALQWCQLPEPCSASLLLKKVPLAQAGCLFTGIRRESPRVGLLRCREEPPRLLGSRFQERFFLLRGRCLLLLKEKKSSKPEREWPLEGAKVYLGIRKKLKPPTPWGFTLILEKMHLYLSCTDEDEMWDWTTSILKAQHDDQQPVVLRRHSSSDLARQKFGTMPLLPIRGDDSGATLFSSTDPWDDFIGKNMDR

SEQ ID NO: 905909 - protein, 869 aa, Homo sapiens
MVLDHLVIQRMDTTGKTVLHTGSAPSSSTPFNKEELSAILKFGAEELFKEPEGEEQEPQEMDIDEILKRAETHENEPGPLTVGDELLSQFKVANFSNMDEDDIELEPERNSKNWEEIIPEDQRRRLEEEERQKELEEIYMLPRMRNCAKQISFNGSEGRRSRSRRYSGSDSDSISEGKRPKKRGRPRTIPRENIKGFSDAEIRRFIKSYKKFGGPLERLDAIARDAELVDKSETDLRRLGELVHNGCIKALKDSSSGTERTGGRLGKVKGPTFRISGVQVNAKLVISHEEELIPLHKSIPSDPEERKQYTIPCHTKAAHFDIDWGKEDDSNLLIGIYEYGYGSWEMIKMDPDLSLTHKILPDDPDKKPQAKQLQTRADYLIKLLSRDLAKKEALSGAGSSKRRKARAKKNKAMKSIKVKEEIKSDSSPLPSEKSDEDDDKDEISSVKHPNKKIKTERDSEEKPEPDVYIKKEPEEKREAKEKENKKELKREIKEKEDKKDIKEKDFKEKRENKVKEAIQKEKDIKEEKLSESKSDGRERSKKSSVSDAPVHITASGEPVPISEESEELDQKTFSICKERMRPVKAALKQLDRPEKGLSEREQLEHTRQCLIKIGDHITECLKEYTNPEQIKQWRKNLWIFVSKFTEFDARKLHKLYKHAIKKRQESQQNSDQNSNLNPHVIRNPDVERLKENTNHDDSSRDSYSSDRHLTQYHDHHKDRHQGDSYKKSDSRKRPYSSFSNGKDHRDWDHYKQDSRYYSDREKHRKLDDHRSRDHRSNLEGSLKDRSHSDHRSHSDHRLHSDHRSSSEYTHHKSSRDYRYHSDWQMDHRASSSGPRSPLDQRSPYGSRSPFEHSVEHKSTPEHTWSSRKT

SEQ ID NO: 905910 - protein, 77 aa, Homo sapiens
FEIVYFQIIASRMMILGQLQALDLVRVLEAVVMEAVASQVAVTLTPDLNQAVSQSLSQTLPEKTKFKQNHRKLMELR

SEQ ID NO: 905911 - protein, 869 aa, Homo sapiens; identical to SEQ ID NO: 905909

SEQ ID NO: 905912 - protein, 869 aa, Homo sapiens; identical to SEQ ID NO: 905909

SEQ ID NO: 905913 - protein, 290 aa, Homo sapiens
MRPVKAALKQLDRPEKGLSEREQLEHTRQCLIKIGDHITECLKEYTNPEQIKQWRKNLWIFVSKFTEFDARKLHKLYKHAIKKRQESQQNSDQNSNLNPHVIRNPDVERLKENTNHDDSSRDSYSSDRHLTQYHDHHKDRHQGDSYKKSDSRKRPYSSFSNGKDHRDWDHYKQDSRYYSDREKHRKLDDHRSRDHRSNLEGSLKDRSHSDHRSHSDHRLHSDHRSSSEYTHHKSSRDYRYHSDWQMDHRASSSGPRSPLDQRSPYGSRSPFEHSVEHKSTPEHTWSSRKT

SEQ ID NO: 905914 - protein, 353 aa, Homo sapiens [sequence omitted]

SEQ ID NO: 905915 - protein, 353 aa, Homo sapiens [sequence omitted]

SEQ ID NO: 905916 - protein, 252 aa, Homo sapiens [sequence omitted]

SEQ ID NO: 905917 - protein, 305 aa, Homo sapiens [sequence omitted]

SEQ ID NO: 905918 - protein, 242 aa, Homo sapiens
VWWNSQSRVEDGEEVSDSLLFDTSDDEELREQLDMHSIIVSCVNDEPLFTADQVIEEIEEMMQESPDPEDDETPTQSDRLSMLSQEIQTLKRSSTGSYEERVKRLSVSELNEILEEIETAIKEYSEELVQQLALRDELEFEKEVKNSFISVLIEVQNKQKEHKETAKKKKKLKNGSSQNGKNERSHMPGTYLTTVIPYEKKNGPPSVEDLQILTKILRAMKEDSEKVPSLLTDYILKVLCPT

SEQ ID NO: 905919 - protein, 208 aa, Homo sapiens
MHSIIVSCVNDEPLFTADQVIEEIEEMMQESPDPEDDETPTQSDRLSMLSQEIQTLKRSSTGSYEERVKRLSVSELNEILEEIETAIKEYSEELVQQLALRDELEFEKEVKNSFISVLIEVQNKQKEHKETAKKKKKLKNGSSQNGKNERSHMPGTYLTTVIPYEKKNGPPSVEDLQILTKILRAMKEDSEKVPSLLTDYILKVLCPT

SEQ ID NO: 905920 - protein, 353 aa, Homo sapiens [sequence omitted]

SEQ ID NO: 905921 - protein, 336 aa, Homo sapiens
MAADGDWQDFYEFQEPARSLLDQENCNASPEPGAEAGAGAGGGADGFPALACSLEEKLSLCFRPSDPGAEPPRTAVRPITERSLLQGDEIWNALTDNYGNVMPVDWKSSHTRTLHLLTLNLSEKGVSDSLLFDTSDDEELREQLDMHSIIVSCVNDEPLFTADQVIEEIEEMMQESPDPEDDETPTQSDRLSMLSQEIQTLKRSSTGSYEERVKRLSVSELNEILEEIETAIKEYSEELVQQLALRDELEFEKEVKNSFISVLIEVQNKQKEHKETAKKKKKLKNGSSQNGKNERSHMPGTVSDVLQEASNTGNRFCGSPSLWGWWQVRQVVHGQE

SEQ ID NO: 905922 - protein, 344 aa, Homo sapiens
MAADGDWQDFYEFQEPARSLLDQENCNASPEPGAEAGAGAGGGADGFPALACSLEEKLSLCFRPSDPGAEPPRTAVRPITERSLLQGDEIWNALTDNYGNVMPVDWKSSHTRTLHLLTLNLSEKGVSDSLLFDTSDDEELREQLDMHSIIVSCVNDEPLFTADQVIEEIEEMMQESPDPEDDETPTQSDRLSMLSQEIQTLKRSSTGSYEERVKRLSVSELNEILEEIETAIKEYSEELVQQLALRDELEFEKEVKNSFISVLIEVQNKQKEHKETAKKKKKLKNGSSQNNAVGNLAWSPPQIKLLLYVGHRTYRIKSVNKLGTFSLSSFMAQRMCRAYDFSHS

SEQ ID NO: 905923 - protein, 252 aa, Homo sapiens [sequence omitted]

SEQ ID NO: 905924 - protein, 353 aa, Homo sapiens [sequence omitted]

SEQ ID NO: 905925 - protein, 380 aa, Homo sapiens [sequence omitted]

SEQ ID NO: 905926 - protein, 363 aa, Homo sapiens
MAADGDWQDFYEFQEPARSLLDQENCNASPEPGAEAGAGAGGGADGFPALACSLEEKLSLCFRPSDPGAEPPRTAVRPITERSLLQGDEIWNALTDNYGNVMPVDWKSSHTRTLHLLTLNLSEKGVSDSLLFDTSDDEELREQLDMHSIIVSCVNDEPLFTADQVIEEIEEMMQESPDPEDDETPTQSDRLSMLSQEIQTLKRSSTGSYEERVKRLSVSELNEILEEIETAIKEYSEELVQQLALRDELEFEKEVKNSFISVLIEVQNKQKEHKETAKKKKKLKNGSSQNGKNERSHMPGTRFSMEGISNVIQNGLRHTFGNSGGEKQYLTTVIPYEKKNGPPSVEDLQILTKSEQRQNETIT

SEQ ID NO: 905927 - protein, 381 aa, Homo sapiens
MAADGDWQDFYEFQEPARSLLDQENCNASPEPGAEAGAGAGGGADGFPALACSLEEKLSLCFRPSDPGAEPPRTAVRPITERSLLQGDEIWNALTDNYGNVMPVDWKSSHTRTLHLLTLNLSEKGVSDSLLFDTSDDEELREQLDMHSIIVSCVNDEPLFTADQVIEEIEEMMQESPDPEDDETPTQSDRLSMLSQEIQTLKRSSTGSYEERVKRLSVSELNEILEEIETAIKEYSEELVQQLALRDELEFEKEVKNSFISVLIEVQNKQKEHKETAKKKKKLKNGSSQNGKNERSHMPGTYLTTVIPYEKKNGPPSVEDLQILTKKRRLLVNNPVPLFLSPLFGNFKSGKQLSVLRAMKEDSEKVPSLLTDYILKVLCPT

SEQ ID NO: 905928 - protein, 352 aa, Homo sapiens
GRPGRGARLLRAAMAADGDWQDFYEFQEPARSLLDQENCNASPEPGAEAGAGAGGGADGFPALACSLEEKLSLCFRPSDPGAEPPRTAVRPITERSLLQGDEIWNALTDNYGNVMPVDWKSSHTRTLHLLTLNLSEKGVSDSLLFDTSDDEELREQLDMHSIIVSCVNDEPLFTADQVIEEIEEMMQESPDPEDDETPTQSDRLSMLSQEIQTLKRSSTGSYEERVKRLSVSELNEILEEIETAIKEYSEELVQQLALRDELEFEKEVKNSFISVLIEVQNKQKEHKETAKKKKKLKNGSSQNGKNERSHMPGTYLTTVIPYEKKNGPPSVEDLQILTKILRAMKEDILCPT

SEQ ID NO: 905929 - protein, 51 aa, Homo sapiens [sequence omitted]

SEQ ID NO: 905930 - protein, 1132 aa, Homo sapiens
MGMACLTMTEMEGTSTSSIYQNGDISGNANSMKQIDPVLQVYLYHSLGKSEADYLTFPSGEYVAEEICIAASKACGITPVYHNMFALMSETERIWYPPNHVFHIDESTRHNVLYRIRFYFPRWYCSGSNRAYRHGISRGAEAPLLDDFVMSYLFAQWRHDFVHGWIKVPVTHETQEECLGMAVLDMMRIAKENDQTPLAIYNSISYKTFLPKCIRAKIQDYHILTRKRIRYRFRRFIQQFSQCKATARNLKLKYLINLETLQSAFYTEKFEVKEPGSGPSGEEIFATIIITGNGGIQWSRGKHKESETLTEQDLQLYCDFPNIIDVSIKQANQEGSNESRVVTIHKQDGKNLEIELSSLREALSFVSLIDGYYRLTADAHHYLCKEVAPPAVLENIQSNCHGPISMDFAISKLKKAGNQTGLYVLRCSPKDFNKYFLTFAVERENVIEYKHCLITKNENEEYNLSGTKKNFSSLKDLLNCYQMETVRSDNIIFQFTKCCPPKPKDKSNLLVFRTNGVSDVPTSPTLQRPTHMNQMVFHKIRNEDLIFNESLGQGTFTKIFKGVRREVGDYGQLHETEVLLKVLDKAHRNYSESFFEAASMMSKLSHKHLVLNYGVCVCGDENILVQEFVKFGSLDTYLKKNKNCINILWKLEVAKQLAWAMHFLEENTLIHGNVCAKNILLIREEDRKTGNPPFIKLSDPGISITVLPKDILQERIPWVPPECIENPKNLNLATDKWSFGTTLWEICSGGDKPLSALDSQRKLQFYEDRHQLPAPKWAELANLINNCMDYEPDFRPSFRAIIRDLNSLFTPDYELLTENDMLPNMRIGALGFSGAFEDRDPTQFEERHLKFLQQLGKGNFGSVEMCRYDPLQDNTGEVVAVKKLQHSTEEHLRDFEREIEILKSLQHDNIVKYKGVCYSAGRRNLKLIMEYLPYGSLRDYLQKHKERIDHIKLLQYTSQICKGMEYLGTKRYIHRDLATRNILVENENRVKIGDFGLTKVLPQDKEYYKVKEPGESPIFWYAPESLTESKFSVASDVWSFGVVLYELFTYIEKSKSPPAEFMRMIGNDKQGQMIVFHLIELLKNNGRLPRPDGCPDEIYMIMTECWNNNVNQRPSFRDLALRVDQIRDNMAG

SEQ ID NO: 905931 - protein, 1132 aa, Homo sapiens; identical to SEQ ID NO: 905930

SEQ ID NO: 905932 - protein, 1047 aa, Homo sapiens
MGMACLTMTEMEGTSTSSIYQNGDISGNANSMKQIDPVLQVYLYHSLGKSEADYLTFPSGEYVAEEICIAASKACGITPVYHNMFALMSETERIWYPPNHVFHIDESTRHNVLYRIRFYFPRWYCSGSNRAYRHGISRGAEAPLLDDFVMSYLFAQWRHDFVHGWIKVPVTHETQEECLGMAVLDMMRIAKENDQTPLAIYNSISYKTFLPKCIRAKIQDYHILTRKRIRYRFRRFIQQFSQCKATARNLKLKYLINLETLQSAFYTEKFEVKEPGSGPSGEEIFATIIITGNGGIQWSRGKHKESETLTEQDLQLYCDFPNIIDVSIKQANQEGSNESRVVTIHKQDGKNLEIELSSLREALSFVSLIDGYYRLTADAHHYLCKEVAPPAVLENIQSNCHGPISMDFAISKLKKAGNQTGLYVLRCSPKDFNKYFLTFAVERENVIEYKHCLITKNENEEYNLSGTKKNFSSLKDLLNCYQMETVRSDNIIFQFTKCCPPKPKDKSNLLVFRTNGVSDVPTSPTLQRPTHMNQMVFHKIRNEDLIFNESLGQGTFTKIFKGVRREVGDYGQLHETEVLLKVLDKAHRNYSESFFEAASMMSKLSHKHLVLNYGVCVCGDENILVQEFVKFGSLDTYLKKNKNCINILWKLEVAKQLAWAMHFLEENTLIHGNVCAKNILLIREEDRKTGNPPFIKLSDPGISITVLPKDILQERIPWVPPECIENPKNLNLATDKWSFGTTLWEICSGGDKPLSALDSQRKLQFYEDRHQLPAPKWAELANLINNCMDYEPDFRPSFRAIIRDLNSLFTPDYELLTENDMLPNMRIGALGFSGAFEDRDPTQFEERHLKFLQQLGKGNFGSVEMCRYDPLQDNTGEVVAVKKLQHSTEEHLRDFEREIEILKSLQHDNIVKYKGVCYSAGRRNLKLIMEYLPYGSLRDYLQKHKERIDHIKLLQYTSQICKGMEYLGTKRYIHRDLATRNILVENENRVKIGDFGLTKVLPQDKEYYKVKEPGESPIFCTSLAYPVCRNVIPIILMHTPHEILSHP

SEQ ID NO: 905933 - protein, 939 aa, Homo sapiens
MGMACLTMTEMEGTSTSSIYQNGDISGNANSMKQIDPVLQVYLYHSLGKSEADYLTFPSGEYVAEEICIAASKACGITPVYHNMFALMSETERIWYPPNHVFHIDESTRHNVLYRIRFYFPRWYCSGSNRAYRHGISRGAEAPLLDDFVMSYLFAQWRHDFVHGWIKVPVTHETQEECLGMAVLDMMRIAKENDQTPLAIYNSISYKTFLPKCIRAKIQDYHILTRKRIRYRFRRFIQQFSQCKATARNLKLKYLINLETLQSAFYTEKFEVKEPGSGPSGEEIFATIIITGNGGIQWSRGKHKESETLTEQDLQLYCDFPNIIDVSIKQANQEGSNESRVVTIHKQDGKNLEIELSSLREALSFVSLIDGYYRLTADAHHYLCKEVAPPAVLENIQSNCHGPISMDFAISKLKKAGNQTGLYVLRCSPKDFNKYFLTFAVERENVIEYKHCLITKNENEEYNLSGTKKNFSSLKDLLNCYQMETVRSDNIIFQFTKCCPPKPKDKSNLLVFRTNGVSDVPTSPTLQRPTHMNQMVFHKIRNEDLIFNESLGQGTFTKIFKGVRREVGDYGQLHETEVLLKVLDKAHRNYSESFFEAASMMSKLSHKHLVLNYGVCVCGDENILVQEFVKFGSLDTYLKKNKNCINILWKLEVAKQLAWAMHFLEENTLIHGNVCAKNILLIREEDRKTGNPPFIKLSDPGISITVLPKDILQERIPWVPPECIENPKNLNLATDKWSFGTTLWEICSGGDKPLSALDSQRKLQFYEDRHQLPAPKWAELANLINNCMDYEPDFRPSFRAIIRDLNSLFTPDYELLTENDMLPNMRIGALGFSGAFEDRDPTQFEERHLKFLQQLGKGNFGSVEMCRYDPLQDNTGEVVAVKKLQHSTEEHLRDFEREIEILKSLQHDNIVKYKGVCYSAGKLPIETYFKFKVCVWHPV

SEQ ID NO: 905934 - protein, 1132 aa, Homo sapiens; identical to SEQ ID NO: 905930

SEQ ID NO: 905935 - protein, 1132 aa, Homo sapiens; identical to SEQ ID NO: 905930

SEQ ID NO: 905936 - protein, 132 aa, Homo sapiens
IIFFISPDYELLTENDMLPNMRIGALGFSGAFEDRDPTQFEERHLKFLQQLGKGNFGSVEMCRYDPLQDNTGEVVAVKKLQHSTEEHLRDFEREIEILKSLHIISRCILLACSSMYCKYFSHKGNKCLVLFV

SEQ ID NO: 905937 - protein, 208 aa, Homo sapiens [sequence omitted]

SEQ ID NO: 905938 - protein, 208 aa, Homo sapiens [sequence omitted]

SEQ ID NO: 905939 - protein, 208 aa, Homo sapiens [sequence omitted]

SEQ ID NO: 905940 - protein, 208 aa, Homo sapiens [sequence omitted]

SEQ ID NO: 905941 - protein, 208 aa, Homo sapiens [sequence omitted]

SEQ ID NO: 905942 - protein, 208 aa, Homo sapiens [sequence omitted]

SEQ ID NO: 905943 - protein, 208 aa, Homo sapiens [sequence omitted]

SEQ ID NO: 905944 - protein, 216 aa, Homo sapiens
MSSFDINSSAPAHVNMMPVTGGTINMMEYLLQGSVLDHSLESLIHRLRGLCDNMEPETFLDHEMVFLLKGQQASPFVLRARRSMDRAGAPWHLRYLGQPEMGDKNRHALVRNCVDIATSENLTDFLMEMGFRMDHEFVAKGHLFRKGIMKIMVYKIFRILVPGNTDSTEALSLSYLVELSVVAPAGQDMVSDDMKNFAEQLKPLVHLEKIDPKRLM

SEQ ID NO: 905945 - protein, 131 aa, Homo sapiens
MFSDNSHCPDCGQQWFPSLELGHWLYQTELVENECYQVFLDRINRADYCPECYPDNPANRSLVLPWSFPLEWAPQNLTRWTFEKACHPFLLGPPLVRKRIHDSRVAGFNPALQLILTRTDKTLNKKLGQNK

SEQ ID NO: 905946 - protein, 127 aa, Homo sapiens
MADSGLREPQEDSQKDLENDPSVNSQAQETTIIASNAEEAEILHSACGLSKDHQEVETEGPESADTGDKSESPDEANVGKHPKDKTEDENKQSFLDGGKGHHLPSENLGRADAHLGSSSVALPKEAS

SEQ ID NO: 905947 - protein, 123 aa, Homo sapiens
MADSGLREPQEDSQKDLENDPSVNSQAQETTIIASNAEEAEILHSACGLSKDHQEVETEGPESADTGDKSESPDEANVGKHPKDKTEDENKQSFLDGGKGHHLPSENLGKEPLDPDPSHSPSD

SEQ ID NO: 905948 - protein, 109 aa, Homo sapiens
SVSSGPPTLADSACPAPLPAAVETASGQAGLLLSQALVWRGGAAAAAGCSRAVWSGENTRRALLILTVLRFKTSPEFRQGLTVLPRLVSNSWLQAILPPQPPKVLGLQA

SEQ ID NO: 905949 - protein, 123 aa, Homo sapiens; identical to SEQ ID NO: 905947

SEQ ID NO: 905950 - protein, 570 aa, Homo sapiens
MTLLWCVVSLYFYGILQSDASERCDDWGLDTMRQIQVFEDEPARIKCPLFEHFLKFNYSTAHSAGLTLIWYWTRQDRDLEEPINFRLPENRISKEKDVLWFRPTLLNDTGNYTCMLRNTTYCSKVAFPLEVVQKDSCFNSPMKLPVHKLYIEYGIQRITCPNVDGYFPSSVKPTITWYMGCYKIQNFNNVIPEGMNLSFLIALISNNGNYTCVVTYPENGRTFHLTRTLTVKVVGSPKNAVPPVIHSPNDHVVYEKEPGEELLIPCTVYFSFLMDSRNEVWWTIDGKKPDDITIDVTINESISHSRTEDETRTQILSIKKVTSEDLKRSYVCHARSAKGEVAKAAKVKQKVPAPRYTVELACGFGATVLLVVILIVVYHVYWLEMVLFYRAHFGTDETILDGKEYDIYVSYARNAEEEEFVLLTLRGVLENEFGYKLCIFDRDSLPGGIVTDETLSFIQKSRRLLVVLSPNYVLQGTQALLELKAGLENMASRGNINVILVQYKAVKETKVKELKRAKTVLTVIKWKGEKSKYPQGRFWKQLQVAMPVKKSPRRSSSDEQGLSYSSLKNV

SEQ ID NO: 905951 - protein, 397 aa, Homo sapiens
RLPGSRSPGSALARGAEGSSARRHCTHPGCFCCALSASQERMTLLWCVVSLYFYGILQSDASERCDDWGLDTMRQIQVFEDEPARIKCPLFEHFLKFNYSTAHSAGLTLIWYWTRQDRDLEEPINFRLPENRISKEKDVLWFRPTLLNDTGNYTCMLRNTTYCSKVAFPLEVVQKDSCFNSPMKLPVHKLYIEYGIQRITCPNVDGYFPSSVKPTITWYMGCYKIQNFNNVIPEGMNLSFLIALISNNGNYTCVVTYPENGRTFHLTRTLTVKVVGSPKNAVPPVIHSPNDHVVYEKEPGEELLIPCTVYFSFLMDSRNEVWWTIDGKKPDDITIDVTINESISHSRTEDETRTQILSIKKVTSEDLKRSYVCHARSAKGEVAKAAKVKQKGNRCGQ

SEQ ID NO: 905952 - protein, 192 aa, Homo sapiens
FIHIGTSKHIEVKTQGCYKIQNFNNVIPEGMNLSFLIALISNNGNYTCVVTYPENGRTFHLTRTLTVKVVGSPKNAVPPVIHSPNDHVVYEKEPGEELLIPCTVYFSFLMDSRNEVWWTIDGKKPDDITIDVTINESISHSRTEDETRTQILSIKKVTSEDLKRSYVCHARSAKGEVAKAAKVKQKGNRCGQ

SEQ ID NO: 905953 - protein, 178 aa, Homo sapiens
FIHIGTSKHIEVKTQGCYKIQNFNNVIPEGMNLSFLIALISNNGNYTCVVTYPENGRTFHLTRTLTVKVVGSPKNAVPPVIHSPNDHVVYEKEPGEELLIPCTVYFSFLMDSRNEVWWTIDGNISHSRTEDETRTQILSIKKVTSEDLKRSYVCHARSAKGEVAKAAKVKQKGNRCGQ

SEQ ID NO: 905954 - protein, 80 aa, Homo sapiens
RLPGSRSPGSALARGAEGSSARRHCTHPGCFCCALSASQERKPRLIELRSMAYVLVCVHAADKDRPKTGQFAKERGSLDL

SEQ ID NO: 905955 - protein, 288 aa, Homo sapiens
  misc_feature (5)..(5): Xaa can be any naturally occurring amino acid
  misc_feature (7)..(7): Xaa can be any naturally occurring amino acid
MWYWXRXGGGVEEGIKLGVGENRISKEKDVLWFRPTLLNDTGNYTCMLRNTTYCSKVAFPLEVVQKDSCFNSPMKLPVHKLYIEYGIQRITCPNVDGYFPSSVKPTITWYMGCYKIQNFNNVIPEGMNLSFLIALISNNGNYTCVVTYPENGRTFHLTRTLTVKVVGSPKNAVPPVIHSPNDHVVYEKEPGEELLIPCTVYFSFLMDSRNEVWWTIDGKKPDDITIDVTINESISHSRTEDETRTQILSIKKVTSEDLKRSYVCHARSAKGEVAKAAKVKQKGNRCGQ

SEQ ID NO: 905956 - protein, 517 aa, Homo sapiens
KNWNWAGHRGKRRVKSAPSPYPTFKGWAVEGRLGLEQRRGGPSLAPPPTGLGRARSVTLSLCRRSSSVSCAVAPVAAAPVAALADAGAMAATDIARQVGEGCRTVPLAGHVGFDSLPDQLVNKSVSQGFCFNILCVGETGLGKSTLMDTLFNTKFEGEPATHTQPGVQLQSNTYDLQESNVRLKLTIVSTVGFGDQINKEDSYKPIVEFIDAQFEAYLQEELKIRRVLHTYHDSRIHVCLYFIAPTGHSLKSLDLVTMKKLDSKVNIIPIIAKADAISKSELTKFKIKITSELVSNGVQIYQFPTDDESVAEINGTMNAHLPFAVIGSTEELKIGNKMMRARQYPWGTVQVENEAHCDFVKLREMLIRVNMEDLREQTHTRHYELYRRCKLEEMGFKDTDPDSKPFSLQETYEAKRNEFLGELQKKEEEMRQMFVQRVKEKEAELKEAEKELHEKFDRLKKLHQDEKKKLEDKKKSLDDEVNAFKQRKTAAELLQSQGSQAGGSQTLKRDKEKKNFF

SEQ ID NO: 905957 - protein, 434 aa, Homo sapiens
TAQAKRRGAGVSLGQKAGEGCRTVPLAGHVGFDSLPDQLVNKSVSQGFCFNILCVGETGLGKSTLMDTLFNTKFEGEPATHTQPGVQLQSNTYDLQESNVRLKLTIVSTVGFGDQINKEDSYKPIVEFIDAQFEAYLQEELKIRRVLHTYHDSRIHVCLYFIAPTGHSLKSLDLVTMKKLDSKVNIIPIIAKADAISKSELTKFKIKITSELVSNGVQIYQFPTDDESVAEINGTMNAHLPFAVIGSTEELKIGNKMMRARQYPWGTVQVENEAHCDFVKLREMLIRVNMEDLREQTHTRHYELYRRCKLEEMGFKDTDPDSKPFSLQETYEAKRNEFLGELQKKEEEMRQMFVQRVKEKEAELKEAEKELHEKFDRLKKLHQDEKKKLEDKKKSLDDEVNAFKQRKTAAELLQSQGSQAGGSQTLKRDKEKKN

SEQ ID NO: 905958 - protein, 522 aa, Homo sapiens
KNWNWAGHRGKRRVKSAPSPYPTFKGWAVEGRLGLEQRRGGPSLAPPPTGLGRARSVTLSLCRRSSSVSCAVAPVAAAPVAALADAGAMAATDIARQVGEGCRTVPLAGHVGFDSLPDQLVNKSVSQGFCFNILCVGETGLGKSTLMDTLFNTKFEGEPATHTQPGVQLQSNTYDLQESNVRLKLTIVSTVGFGDQINKEDSYKPIVEFIDAQFEAYLQEELKIRRVLHTYHDSRIHVCLYFIAPTGHSLKSLDLVTMKKLDSKVNIIPIIAKADAISKSELTKFKIKITSELVSNGVQIYQFPTDDESVAEINGTMNAHLPFAVIGSTEELKIGNKMMRARQYPWGTVQVENEAHCDFVKLREMLIRVNMEDLREQTHTRHYELYRRCKLEEMGFKDTDPDSKPFSLQETYEAKRNEFLGELQKKEEEMRQMFVQRVKEKEAELKEAEKELHEKFDRLKKLHQDEKKKLEDKKKSLDDEVNAFKQRKTAAELLQSQGSQAGGSQTLKRDKEKKNNPWLCTE

SEQ ID NO: 905959 - protein, 522 aa, Homo sapiens; identical to SEQ ID NO: 905958

SEQ ID NO: 905960 - protein, 522 aa, Homo sapiens; identical to SEQ ID NO: 905958

SEQ ID NO: 905961 - protein, 515 aa, Homo sapiens
KNWNWAGHRGKRRVKSAPSPYPTFKGWAVEGRLGLEQRRGGPSLAPPPTGLGRARSVTLSLCRRSSSVSCAVAPVAAAPVAALADAGAMAATDIARQVGEGCRTVPLAGHVGFDSLPDQLVNKSVSQGFCFNILCVGETGLGKSTLMDTLFNTKFEGEPATHTQPGVQLQSNTYDLQESNVRLKLTIVSTVGFGDQINKEDSYKPIVEFIDAQFEAYLQEELKIRRVLHTYHDSRIHVCLYFIAPTGHSLKSLDLVTMKKLDSKVNIIPIIAKADAISKSELTKFKIKITSELVSNGVQIYQFPTDDESVAEINGTMNAHLPFAVIGSTEELKIGNKMMRARQYPWGTVQVENEAHCDFVKLREMLIRVNMEDLREQTHTRHYELYRRCKLEEMGFKDTDPDSKPFSLQETYEAKRNEFLGELQKKEEEMRQMFVQRVKEKEAELKEAEKELHEKFDRLKKLHQDEKKKLEDKKKSLDDEVNAFKQRKTAAELLQSQGSQAGGSQTLKRDKEKKN

SEQ ID NO: 905962 - protein, 515 aa, Homo sapiens; identical to SEQ ID NO: 905961

SEQ ID NO: 905963 - protein, 515 aa, Homo sapiens; identical to SEQ ID NO: 905961

SEQ ID NO: 905964 - protein, 515 aa, Homo sapiens; identical to SEQ ID NO: 905961

SEQ ID NO: 905965 - protein, 484 aa, Homo sapiens
KNWNWAGHRGKRRVKSAPSPYPTFKGWAVEGRLGLEQRRGGPSLAPPPTGLGRARSVTLSLCRRSSSVSCAVAPVAAAPVAALADAGAMAATDIARQVGEGCRTVPLAGHVGFDSLPDQLVNKSVSQGFCFNILCVGETGLGKSTLMDTLFNTKFEGEPATHTQPGVQLQSNTYDLQESNVRLKLTIVSTVGFGDQINKEDSYKPIVEFIDAQFEAYLQEELKIRRVLHTYHDSRIHVCLYFIAPTGHSLKSLDLVTMKKLDSKVNIIPIIAKADAISKSELTKFKIKITSELVSNGVQIYQFPTDDESVAEINGTMNAHLPFAVIGSTEELKIGNKMMRARQYPWGTVQVENEAHCDFVKLREMLIRVNMEDLREQTHTRHYELYRRCKLEEMGFKDTDPDSKPFSLQETYEAKRNEFLGELQKKEEEMRQMFVQRVKEKEAELKEAEKELHEKFDRLKKLHQDEKKKAGGSQTLKRDKEKKK

SEQ ID NO: 905966 - protein, 270 aa, Homo sapiens
PSDRSRINQPIDCPKQDAIFPEGRLEALNKKVFKIKITSELVSNGVQIYQFPTDDESVAEINGTMNAHLPFAVIGSTEELKIGNKMMRARQYPWGTVQVENEAHCDFVKLREMLIRVNMEDLREQTHTRHYELYRRCKLEEMGFKDTDPDSKPFSLQETYEAKRNEFLGELQKKEEEMRQMFVQRVKEKEAELKEAEKELHEKFDRLKKLHQDEKKKLEDKKKSLDDEVNAFKQRKTAAELLQSQGSQAGGSQTLKRDKEKKNNPWLCTE

SEQ ID NO: 905967 - protein, 116 aa, Homo sapiens
MVRGPICYSFPPAPLFQFWLLLVSLRYLQPPWLGNHRSAQLSPWSPVSQSLVLPGPPHPHPQEPQPFLRGFQKDSLWRLFLLTFESSPFQFSFTRSNCTQAVLKIGNAFIYTKPFP

SEQ ID NO: 905968 - protein, 515 aa, Homo sapiens; identical to SEQ ID NO: 905961

SEQ ID NO: 905969 - protein, 598 aa, Homo sapiens
GKLGRYPPWPGKIVNPPKDLKKPRGKKCFFVKFFGTEDHAWIKVEQLKPYHAHKEEMIKINKGKRFQQAVDAVEEFLRRAKGKDQTSSHNSSDDKNRRNSSEERSRPNSGDEKRKLSLSEGKVKKNMGEGKKRVSSGSSERGSKSPLKRAQEQSPRKRGRPPKDEKDLTIPESSTVKGMMAGPMAAFKWQPTASEPVKDADPHFHHFLLSQTEKETGSTSIQAADSTAVNGSITPTDKKIGFLGLGLMGSGIVSNLLKMGHTVTVWNRTAEKCDLFIQEGARLGRTPAEVVSTCDITFACVSDPKAAKDLVLGPSGVLQGIRPGKCYVDMSTVDADTVTELAQVIVSRGGRFLEAPVSGNQQLSNDGMLVILAAGDRGLYEDCSSCFQAMGKTSFFLGEVGNAAKMMLIVNMVQGSFMATIAEGLTLAQVTGQSQQTLLDILNQGQLASIFLDQKCQNILQGNFKPDFYLKYIQKDLRLAIALGDAVNHPTPMAAAANEVYKRAKALDQSDNDMSAVYRAYYTKLSTPRPHPSNPPSDPLFLTWGRGPGSSFWTSPPISISFYTDFETCHQHSTQQHPSPEAGGEGTSVSRIGVWESS

SEQ ID NO: 905970 - protein, 522 aa, Homo sapiens; identical to SEQ ID NO: 905958

SEQ ID NO: 905971 - protein, 515 aa, Homo sapiens; identical to SEQ ID NO: 905961

SEQ ID NO: 905972 - protein, 519 aa, Homo sapiens
KNWNWAGHRGKRRVKSAPSPYPTFKGWAVEGRLGLEQRRGGPSLAPPPTGLGRARSVTLSLCRRSSSVSCAVAPVAAAPVAALADAGAMAATDIARQVGEGCRTVPLAGHVGFDSLPDQLVNKSVSQGFCFNILCVGETGLGKSTLMDTLFNTKFEGEPATHTQPGVQLQSNTYDLQESNVRLKLTIVSTVGFGDQINKEDSYKPIVEFIDAQFEAYLQEELKIRRVLHTYHDSRIHVCLYFIAPTGHSLKSLDLVTMKKLDSKVNIIPIIAKADAISKSELTKFKIKITSELVSNGVQIYQFPTDDESVAEINGTMNAHLPFAVIGSTEELKIGNKMMRARQYPWGTVQVENEAHCDFVKLREMLIRVNMEDLREQTHTRHYELYRRCKLEEMGFKDTDPDSKPFSLQETYEAKRNEFLGELQKKEEEMRQMFVQRVKEKEAELKEAEKELHEKFDRLKKLHQDEKKKLEDKKKSLDDEVNAFKQRKTAAELLQSQGSQAGGSQTLKRDKEKKNLGFL

SEQ ID NO: 905973 - protein, 451 aa, Homo sapiens
LVANSARGAPVAAAPVAALADAGAMAATDIARQVGEGCRTVPLAGHVGFDSLPDQLVNKSVSQGFCFNILCVGETGLGKSTLMDTLFNTKFEGEPATHTQPGVQLQSNTYDLQESNVRLKLTIVSTVGFGDQINKEDSYKPIVEFIDAQFEAYLQEELKIRRVLHTYHDSRIHVCLYFIAPTGHSLKSLDLVTMKKLDSKVNIIPIIAKADAISKSELTKFKIKITSELVSNGVQIYQFPTDDESVAEINGTMNAHLPFAVIGSTEELKIGNKMMRARQYPWGTVQVENEAHCDFVKLREMLIRVNMEDLREQTHTRHYELYRRCKLEEMGFKDTDPDSKPFSLQETYEAKRNEFLGELQKKEEEMRQMFVQRVKEKEAELKEAEKELHEKFDRLKKLHQDEKKKLEDKKKSLDDEVNAFKQRKTAAELLQSQGSQAGGSQTLKRDKEKKN

SEQ ID NO: 905974 - protein, 515 aa, Homo sapiens
KNWNWAGHRGKRRVKSAPSPYPTFKGWAVEGRLGLEQRRGGPSLAPPPTGLGRARSVTLSLCRRSSSVSCAVAPVAAAPVAALADAGAMAATDIARQVGEGCRTVPLAGHVGFDSLPDQLVNKSVSQGFCFNILCVGETGLGKSTLMDTLFNTKFEGEPATHTQPGVQLQSNTYDLQESNVRLKLTIVSTVGFGDQINKEDSYKPIVEFIDAQFEAYLQEELKIRRVLHTYHDSRIHVCLYFIAPTGHSLKSLDLVTMKKLDSKVNIIPIIAKADAISKSELTKFKIKITSELVSNGVQIYQFPTDDESVAEINGTMNAHLPFAVIGSTEELKIGNKMMRARQYPWGTVQVENEAHCDFVKLREMLIRVNMEDLREQTHTRHYELYRRCKLEEMGFKDTDPDSKPFSLQETYEAKRNEFLGELQKKEEEMRQMFVQRVKEKEAELKEAEKELHEKFDRLKKLHQDEKKKLEDKKKSLDDEVNAFKQRKTAAELLQSQGSQAGGSQTLKRDKEKKK

SEQ ID NO: 905975 - protein, 355 aa, Homo sapiens
KNWNWAGHRGKRRVKSAPSPYPTFKGWAVEGRLGLEQRRGGPSLAPPPTGLGRARSVTLSLCRRSSSVSCAVAPVAAAPVAALADAGAMAATDIARQVGEGCRTVPLAGHVGFDSLPDQLVNKSVSQGFCFNILCVGETGLGKSTLMDTLFNTKFEGEPATHTQPGVQLQSNTYDLQESNVRLKLTIVSTVGFGDQINKEDSYKPIVEFIDAQFEAYLQEELKIRRVLHTYHDSRIHVCLYFIAPTGHSLKSLDLVTMKKLDSKVNIIPIIAKADAISKSELTKFKIKITSELVSNGVQIYQFPTDDESVAEINGTMNAHLPFAVIGSTEELKIGNKMMRARQYPWGTVQAAREV

SEQ ID NO: 905976 - protein, 363 aa, Homo sapiens
KNWNWAGHRGKRRVKSAPSPYPTFKGWAVEGRLGLEQRRGGPSLAPPPTGLGRARSVTLSLCRRSSSVSCAVAPVAAAPVAALADAGAMAATDIARQVGEGCRTVPLAGHVGFDSLPDQLVNKSVSQGFCFNILCVGETGLGKSTLMDTLFNTKFEGEPATHTQPGVQLQSNTYDLQESNVRLKLTIVSTVGFGDQINKEDSYKPIVEFIDAQFEAYLQEELKIRRVLHTYHDSRIHVCLYFIAPTGHSLKSLDLVTMKKLDSKVNIIPIIAKADAISKSELTKFKIKITSELVSNGVQIYQFPTDDESVAEINGTMNAHLPFAVIGSTEELKIGNKMMRARQYPWGTVQVYRRHMRPKGTSS

SEQ ID NO: 905977 - protein, 1019 aa, Homo sapiens [sequence omitted]

SEQ ID NO: 905978 - protein, 1005 aa, Homo sapiens
EFIIRGGRVPSHCLHFSRSFQKKTYSKMNNPAIKRIGNHITKSPEDKREYRGLELANGIKVLLISDPTTDKSSAALDVHIGSLSDPPNIAGLSHFCEHMLFLGTKKYPKENEYSQFLSEHAGSSNAFTSGEHTNYYFDVSHEHLEGALDRFAQFFLCPLFDESCKDREVNAVDSEHEKNVMNDAWRLFQLEKATGNPKHPFSKFGTGNKYTLETRPNQEGIDVRQELLKFHSAYYSSNLMAVCVLGRESLDDLTNLVVKLFSEVENKNVPLPEFPEHPFQEEHLKQLYKIVPIKDIRNLYVTFPIPDLQKYYKSNPGHYLGHLIGHEGPGSLLSELKSKGWVNTLVGGQKEGARGFMFFIINVDLTEEGLLHVEDIILHMFQYIQKLRAEGPQEWVFQECKDLNAVAFRFKDKERPRGYTSKIAGILHYYPLEEVLTAEYLLEEFRPDLIEMVLDKLRPENVRVAIVSKSFEGKTDRTEEWYGTQYKQEAIPDEVIKKWQNADLNGKFKLPTKNEFIPTNFEILPLEKEATPYPALIKDTAMSKLWFKQDDKFFLPKACLNFEFFSPFAYVDPLHCNMAYLYLELLKDSLNEYAYAAELAGLSYDLQNTIYGMYLSVKGYNDKQPILLKKIIEKMATFEIDEKRFEIIKEAYMRSLNNFRAEQPHQHAMYYLRLLMTEVAWTKDELKEALDDVTLPRLKAFIPQLLSRLHIEALLHGNITKQAALGIMQMVEDTLIEHAHTKPLLPSQLVRYREVQLPDRGWFVYQQRNEVHNNCGIEIYYQTDMQSTSENMFLELFCQIISEPCFNTLRTKEQLGYIVFSGPRRANGIQGLRFIIQSEKPPHYLESRVEAFLITMEKSIEDMTEEAFQKHIQALAIRRLDKPKKLSAECAKYWGEIISQQYNFDRDNTEVAYLKTLTKEDIIKFYKEMLAVDAPRRHKVSVHVLAREMDSCPVVGEFPCQNDINLSQAPALPQPEVIQNMTEFKRGLPLFPLVKPHINFMAAKL

SEQ ID NO: 905979 - protein, 1067 aa, Homo sapiens
MRYRLAWLLHPALPSTFRSVLGARLPPPERLCGFQKKTYSKMNNPAIKRIGNHITKSPEDKREYRGLELANGIKVLLISDPTTDKSSAALDVHIGSLSDPPNIAGLSHFCEHMLFLGTKKYPKENEYSQFLSEHAGSSNAFTSGEHTNYYFDVSHEHLEGALDRFAQFFLCPLFDESCKDREVNAVDSEHEKNVMNDAWRLFQLEKATGNPKHPFSKFGTGNKYTLETRPNQEGIDVRQELLKFHSAYYSSNLMAVCVLGRESLDDLTNLVVKLFSEVENKNVPLPEFPEHPFQEEHLKQLYKIVPIKDIRNLYVTFPIPDLQKYYKSNPGHYLGHLIGHEGPGSLLSELKSKGWVNTLVGGQKEGARGFMFFIINVDLTEEGLLHVEDIILHMFQYIQKLRAEGPQEWVFQECKDLNAVAFRFKDKERPRGYTSKIAGILHYYPLEEVLTAEYLLEEFRPDLIEMVLDKLRPENVRVAIVSKSFEGKTDRTEEWYGTQYKQEAIPDEVIKKWQNADLNGKFKLPTKNEFIPTNFEILPLEKEATPYPALIKDTAMSKLWFKQDDKFFLPKACLNFEFFSPFAYVDPLHCNMAYLYLELLKDSLNEYAYAAELAGLSYDLQNTIYGMYSYIYADPLHCNMTYLFIRLLKDDLKEYTYAARLSGLSYGIASGMNAILLSVKGYNDKQPILLKKIIEKMATFEIDEKRFEIIKEAYMRSLNNFRAEQPHQHAMYYLRLLMTEVAWTKDELKEALDDVTLPRLKAFIPQLLSRLHIEALLHGNITKQAALGIMQMVEDTLIEHAHTKPLLPSQLVRYREVQLPDRGWFVYQQRNEVHNNCGIEIYYQTDMQSTSENMFLELFCQIISEPCFNTLRTKEQLGYIVFSGPRRANGIQGLRFIIQSEKPPHYLESRVEAFLITMEKSIEDMTEEAFQKHIQALAIRRLDKPKKLSAECAKYWGEIISQQYNFDRDNTEVAYLKTLTKEDIIKFYKEMLAVDAPRRHKVSVHVLAREMDSCPVVGEFPCQNDINLSQAPALPQPEVIQNMTEFKRGLPLFPLVKPHINFMAAKL

SEQ ID NO: 905980 - protein, 464 aa, Homo sapiens
MSKLWFKQDDKFFLPKACLNFEFFSPFAYVDPLHCNMAYLYLELLKDSLNEYAYAAELAGLSYDLQNTIYGMYLSVKGYNDKQPILLKKIIEKMATFEIDEKRFEIIKEAYMRSLNNFRAEQPHQHAMYYLRLLMTEVAWTKDELKEALDDVTLPRLKAFIPQLLSRLHIEALLHGNITKQAALGIMQMVEDTLIEHAHTKPLLPSQLVRYREVQLPDRGWFVYQQRNEVHNNCGIEIYYQTDMQSTSENMFLELFCQIISEPCFNTLRTKEQLGYIVFSGPRRANGIQGLRFIIQSEKPPHYLESRVEAFLITMEKSIEDMTEEAFQKHIQALAIRRLDKPKKLSAECAKYWGEIISQQYNFDRDNTEVAYLKTLTKEDIIKFYKEMLAVDAPRRHKVSVHVLAREMDSCPVVGEFPCQNDINLSQAPALPQPEVIQNMTEFKRGLPLFPLVKPHINFMAAKL

SEQ ID NO: 905981 - protein, 428 aa, Homo sapiens
MAYLYLELLKDSLNEYAYAAELAGLSYDLQNTIYGMYLSVKGYNDKQPILLKKIIEKMATFEIDEKRFEIIKEAYMRSLNNFRAEQPHQHAMYYLRLLMTEVAWTKDELKEALDDVTLPRLKAFIPQLLSRLHIEALLHGNITKQAALGIMQMVEDTLIEHAHTKPLLPSQLVRYREVQLPDRGWFVYQQRNEVHNNCGIEIYYQTDMQSTSENMFLELFCQIISEPCFNTLRTKEQLGYIVFSGPRRANGIQGLRFIIQSEKPPHYLESRVEAFLITMEKSIEDMTEEAFQKHIQALAIRRLDKPKKLSAECAKYWGEIISQQYNFDRDNTEVAYLKTLTKEDIIKFYKEMLAVDAPRRHKVSVHVLAREMDSCPVVGEFPCQNDINLSQAPALPQPEVIQNMTEFKRGLPLFPLVKPHINFMAAKL

SEQ ID NO: 905982 - protein, 374 aa, Homo sapiens
TRVYAQVEIDQKKYEIIKEAYMRSLNNFRAEQPHQHAMYYLRLLMTEVAWTKDELKEALDDVTLPRLKAFIPQLLSRLHIEALLHGNITKQAALGIMQMVEDTLIEHAHTKPLLPSQLVRYREVQLPDRGWFVYQQRNEVHNNCGIEIYYQTDMQSTSENMFLELFCQIISEPCFNTLRTKEQLGYIVFSGPRRANGIQGLRFIIQSEKPPHYLESRVEAFLITMEKSIEDMTEEAFQKHIQALAIRRLDKPKKLSAECAKYWGEIISQQYNFDRDNTEVAYLKTLTKEDIIKFYKEMLAVDAPRRHKVSVHVLAREMDSCPVVGEFPCQNDINLSQAPALPQPEVIQNMTEFKRGLPLFPLVKPHINFMAAKL

SEQ ID NO: 905983 - protein, 181 aa, Homo sapiens
MSKLWFKQDDKFFLPKACLNFEFFSPFAYVDPLHCNMAYLYLELLKDSLNEYAYAAELAGLSYDLQNTIYGMYLSVKGYNDKQPILLKKIIEKMATFEIDEKRFEIIKEAYMRSLNNFRAEQPHQHAMYYLRLLMTEVAWTKDELKEALDGETFDLKLNAFFIFFLNSFWFILILTVYTFK

SEQ ID NO: 905984 - protein, 1019 aa, Homo sapiens [sequence omitted]

SEQ ID NO: 905985 - protein, 1174 aa, Homo sapiens
WRRAGSKRKQEAFAVIPATALANAVPASVASAPRTAQHLPLSPRRPPAASGAPVWELPGCFSKQRHYFAFPPAVCENSNFSISLTTLAICTFVISHPGGYEVVSHWNFDFHFPDDHCKSFKIYSLGRACWLMPVIPALWEDEAGGSPAVQEFRTSLTNKLLHVASESYAVKRFKQFFCLSLPSSWDYSFQKKTYSKMNNPAIKRIGNHITKSPEDKREYRGLELANGIKVLLISDPTTDKSSAALDVHIGSLSDPPNIAGLSHFCEHMLFLGTKKYPKENEYSQFLSEHAGSSNAFTSGEHTNYYFDVSHEHLEGALDRFAQFFLCPLFDESCKDREVNAVDSEHEKNVMNDAWRLFQLEKATGNPKHPFSKFGTGNKYTLETRPNQEGIDVRQELLKFHSAYYSSNLMAVCVLGRESLDDLTNLVVKLFSEVENKNVPLPEFPEHPFQEEHLKQLYKIVPIKDIRNLYVTFPIPDLQKYYKSNPGHYLGHLIGHEGPGSLLSELKSKGWVNTLVGGQKEGARGFMFFIINVDLTEEGLLHVEDIILHMFQYIQKLRAEGPQEWVFQECKDLNAVAFRFKDKERPRGYTSKIAGILHYYPLEEVLTAEYLLEEFRPDLIEMVLDKLRPENVRVAIVSKSFEGKTDRTEEWYGTQYKQEAIPDEVIKKWQNADLNGKFKLPTKNEFIPTNFEILPLEKEATPYPALIKDTAMSKLWFKQDDKFFLPKACLNFEFFSPFAYVDPLHCNMAYLYLELLKDSLNEYAYAAELAGLSYDLQNTIYGMYLSVKGYNDKQPILLKKIIEKMATFEIDEKRFEIIKEAYMRSLNNFRAEQPHQHAMYYLRLLMTEVAWTKDELKEALDDVTLPRLKAFIPQLLSRLHIEALLHGNITKQAALGIMQMVEDTLIEHAHTKPLLPSQLVRYREVQLPDRGWFVYQQRNEVHNNCGIEIYYQTDMQSTSENMFLELFCQIISEPCFNTLRTKEQLGYIVFSGPRRANGIQGLRFIIQSEKPPHYLESRVEAFLITMEKSIEDMTEEAFQKHIQALAIRRLDKPKKLSAECAKYWGEIISQQYNFDRDNTEVAYLKTLTKEDIIKFYKEMLAVDAPRRHKVSVHVLAREMDSCPVVGEFPCQNDINLSQAPALPQPEVIQNMTEFKRGLPLFPLVKPHINFMAAKL

SEQ ID NO: 905986 - protein, 428 aa, Homo sapiens; identical to SEQ ID NO: 905981

SEQ ID NO: 905987 - protein, 450 aa, Homo sapiens [sequence omitted]

SEQ ID NO: 905988 - protein, 736 aa, Homo sapiens
MRYRLAWLLHPALPSTFRSVLGARLPPPERLCGFQKKTYSKMNNPAIKRIGNHITKSPEDKREYRGLELANGIKVLLISDPTTDKSSAALDVHIGSLSDPPNIAGLSHFCEHMLFLGTKKYPKENEYSQFLSEHAGSSNAFTSGEHTNYYFDVSHEHLEGALDRFAQFFLCPLFDESCKDREVNAVDSEHEKNVMNDAWRLFQLEKATGNPKHPFSKFGTGNKYTLETRPNQEGIDVRQELLKFHSAYYSSNLMAVCVLGRESLDDLTNLVVKLFSEVENKNVPLPEFPEHPFQEEHLKQLYKIVPIKDIRNLYVTFPIPDLQKYYKSNPGHYLGHLIGHEGPGSLLSELKSKGWVNTLVGGQKEGARGFMFFIINVDLTEEGLLHVEDIILHMFQYIQKLRAEGPQEWVFQECKDLNAVAFRFKDKERPRGYTSKIAGILHYYPLEEVLTAEYLLEEFRPDLIEMVLDKLRPENVRVAIVSKSFEGKTDRTEEWYGTQYKQEAIPDEVIKKWQNADLNGKFKLPTKNEFIPTNFEILPLEKEATPYPALIKDTAMSKLWFKQDDKFFLPKACLNFEFFSPFAYVDPLHCNMAYLYLELLKDSLNEYAYAAELAGLSYDLQNTIYGMYLSVKGYNDKQPILLKKIIEKMATFEIDEKRFEIIKEAYMRSLNNFRAEQPHQHAMYYLRLLMTEVAWTKDELKEALDGETFDLKLNAFFIFFLNSFWFILILTVYTFK

SEQ ID NO: 905989 - protein, 382 aa, Homo sapiens
MGDWSALGKLLDKVQAYSTAGGKVWLSVLFIFRILLLGTAVESAWGDEQSAFRCNTQQPGCENVCYDKSFPISHVRFWVLQIIFVSVPTLLYLAHVFYVMRKEEKLNKKEEELKVAQTDGVNVDMHLKQIEIKKFKYGIEEHGKVKMRGGLLRTYIISILFKSIFEVAFLLIQWYIYGFSLSAVYTCKRDPCPHQVDCFLSRPTEKTIFIIFMLVVSLVSLALNIIELFYVFFKGVKDRVKGKSDPYHATSGALSPAKDCGSQKYAYFNGCSSPTAPLSPMSPPGYKLVTGDRNNSSCRNYNKQASEQNWANYSAEQNRMGQAGSTISNSHAQPFDFPDDNQNSKKLAAGHELQPLAIVDQRPSSRASSRASSRPRPDDLEI

SEQ ID NO: 905990 - protein, 382 aa, Homo sapiens; identical to SEQ ID NO: 905989

SEQ ID NO: 905991 - protein, 382 aa, Homo sapiens; identical to SEQ ID NO: 905989

SEQ ID NO: 905992 - protein, 382 aa, Homo sapiens; identical to SEQ ID NO: 905989

SEQ ID NO: 905993 - protein, 382 aa, Homo sapiens; identical to SEQ ID NO: 905989

SEQ ID NO: 905994 - protein, 382 aa, Homo sapiens; identical to SEQ ID NO: 905989

SEQ ID NO: 905995 - protein, 382 aa, Homo sapiens; identical to SEQ ID NO: 905989

SEQ ID NO: 905996 - protein, 758 aa, Homo sapiens
MLRACQLSGVTAAAQSCLCGKFVLRPLRPCRRYSTSGSSGLTTGKIAGAGLLFVGGGIGGTILYAKWDSHFRESVEKTIPYSDKLFEMVLGPAAYNVPLPKKSIQSGPLKISSVSEVMKESKQPASQLQKQKGDTPASATAPTEAAQIISAAGDTLSVPAPAVQPEESLKTDHPEIGEGKPTPALSEEASSSSIRERPPEEVAARLAQQEKQEQVKIESLAKSLEDALRQTASVTLQAIAAQNAAVQAVNAHSNILKAAMDNSEIAGEKKSAQWRTVEGALKERRKAVDEAADALLKAKEELEKMKSVIENAKKKEVAGAKPHITAAEGKLHNMIVDLDNVVKKVQAAQSEAKVVSQYHELVVQARDDFKRELDSITPEVLPGWKGMSVSDLADKLSTDDLNSLIAHAHRRIDQLNRELAEQKATEKQHITLALEKQKLEEKRAFDSAVAKALEHHRSEIQAEQDRKIEEVRDAMENEMRTQLRRQAAAHTDHLRDVLRVQEQELKSEFEQNLSEKLSEQELQFRRLSQEQVDNFTLDINTAYARLRGIEQAVQSHAVAEEEARKAHQLWLSVEALKYSMKTSSAETPTIPLGSAVEAIKANCSDNEFTQALTAAIPPESLTRGVYSEETLRARFYAVQKLARRVAMIDETRNSLYQYFLSYLQSLLLFPPQQLKPPPELCPEDINTFKLLSYASYCIEHGDLELAAKFVNQLKGESRRVAQDWLKEARMTLETKQIVEILTAYASAVGIGTTQVQPE

SEQ ID NO: 905997 - protein, 270 aa, Homo sapiens
  misc_feature (256)..(256): Xaa can be any naturally occurring amino acid
  misc_feature (268)..(269): Xaa can be any naturally occurring amino acid
MLRACQLSGVTAAAQSCLCGKFVLRPLRPCRRYSTSGSSGLTTGKIAGAGLLFVGGGIGGTILYAKWDSHFRESVEKTIPYSDKLFEMVLGPAAYNVPLPKKSIQSGPLKISSVSEVMKESKQPASQLQKQKGDTPASATAGDTLSVPAPAVQPEESLKTDHPEIGEGKPTPALSEEASSSSIRERPPEEVAARLAQQEKQEQVKIESLAKSLEDALRQTASVTLQAIAAQNAAVQAVNAHSNILKAAMDNSENCXAKKKNLAPLGAXXG

SEQ ID NO: 905998 - protein, 747 aa, Homo sapiens
MLRACQLSGVTAAAQSCLCGKFVLRPLRPCRRYSTSGSSGLTTGKIAGAGLLFVGGGIGGTILYAKWDSHFRESVEKTIPYSDKLFEMVLGPAAYNVPLPKKSIQSGPLKISSVSEVMKESKQPASQLQKQKGDTPASATAGDTLSVPAPAVQPEESLKTDHPEIGEGKPTPALSEEASSSSIRERPPEEVAARLAQQEKQEQVKIESLAKSLEDALRQTASVTLQAIAAQNAAVQAVNAHSNILKAAMDNSEIAGEKKSAQWRTVEGALKERRKAVDEAADALLKAKEELEKMKSVIENAKKKEVAGAKPHITAAEGKLHNMIVDLDNVVKKVQAAQSEAKVVSQYHELVVQARDDFKRELDSITPEVLPGWKGMSVSDLADKLSTDDLNSLIAHAHRRIDQLNRELAEQKATEKQHITLALEKQKLEEKRAFDSAVAKALEHHRSEIQAEQDRKIEEVRDAMENEMRTQLRRQAAAHTDHLRDVLRVQEQELKSEFEQNLSEKLSEQELQFRRLSQEQVDNFTLDINTAYARLRGIEQAVQSHAVAEEEARKAHQLWLSVEALKYSMKTSSAETPTIPLGSAVEAIKANCSDNEFTQALTAAIPPESLTRGVYSEETLRARFYAVQKLARRVAMIDETRNSLYQYFLSYLQSLLLFPPQQLKPPPELCPEDINTFKLLSYASYCIEHGDLELAAKFVNQLKGESRRVAQDWLKEARMTLETKQIVEILTAYASAVGIGTTQVQPE

SEQ ID NO: 905999 - protein, 641 aa, Homo sapiens
MKESKQPASQLQKQKGDTPASATAPTEAAQIISAAGDTLSVPAPAVQPEESLKTDHPEIGEGKPTPALSEEASSSSIRERPPEEVAARLAQQEKQEQVKIESLAKSLEDALRQTASVTLQAIAAQNAAVQAVNAHSNILKAAMDNSEIAGEKKSAQWRTVEGALKERRKAVDEAADALLKAKEELEKMKSVIENAKKKEVAGAKPHITAAEGKLHNMIVDLDNVVKKVQAAQSEAKVVSQYHELVVQARDDFKRELDSITPEVLPGWKGMSVSDLADKLSTDDLNSLIAHAHRRIDQLNRELAEQKATEKQHITLALEKQKLEEKRAFDSAVAKALEHHRSEIQAEQDRKIEEVRDAMENEMRTQLRRQAAAHTDHLRDVLRVQEQELKSEFEQNLSEKLSEQELQFRRLSQEQVDNFTLDINTAYARLRGIEQAVQSHAVAEEEARKAHQLWLSVEALKYSMKTSSAETPTIPLGSAVEAIKANCSDNEFTQALTAAIPPESLTRGVYSEETLRARFYAVQKLARRVAMIDETRNSLYQYFLSYLQSLLLFPPQQLKPPPELCPEDINTFKLLSYASYCIEHGDLELAAKFVNQLKGESRRVAQDWLKEARMTLETKQIVEILTAYASAVGIGTTQVQPE

SEQ ID NO: 906000 - protein, 726 aa, Homo sapiens
MLRACQLSGVTAAAQSCLCGKFVLRPLRPCRRYSTSGSSGLTTGKIAGAGLLFVGGGIGGTILYAKWDSHFRESVEKTIPYSDKLFEMVLGPAAYNVPLPKKSIQSGPLKISSVSEVMKESKQPASQLQKQKGDTPASATAPTEAAQIISAAGDTLSVPAPAVQPEESLKTDHPEIGEGKPTPALSALAKSLEDALRQTASVTLQAIAAQNAAVQAVNAHSNILKAAMDNSEIAGEKKSAQWRTVEGALKERRKAVDEAADALLKAKEELEKMKSVIENAKKKEVAGAKPHITAAEGKLHNMIVDLDNVVKKVQAAQSEAKVVSQYHELVVQARDDFKRELDSITPEVLPGWKGMSVSDLADKLSTDDLNSLIAHAHRRIDQLNRELAEQKATEKQHITLALEKQKLEEKRAFDSAVAKALEHHRSEIQAEQDRKIEEVRDAMENEMRTQLRRQAAAHTDHLRDVLRVQEQELKSEFEQNLSEKLSEQELQFRRLSQEQVDNFTLDINTAYARLRGIEQAVQSHAVAEEEARKAHQLWLSVEALKYSMKTSSAETPTIPLGSAVEAIKANCSDNEFTQALTAAIPPESLTRGVYSEETLRARFYAVQKLARRVAMIDETRNSLYQYFLSYLQSLLLFPPQQLKPPPELCPEDINTFKLLSYASYCIEHGDLELAAKFVNQLKGESRRVAQDWLKEARMTLETKQIVEILTAYASAVGIGTTQVQPE

SEQ ID NO: 906001 - protein, 729 aa, Homo sapiens
MLRACQLSGVTAAAQSCLCGKFVLRPLRPCRRYSTSGSSGLTTGKIAGAGLLFVGGGIGGTILYAKWDSHFRESVEKTIPYSDKLFEMVLGPAAYNVPLPKKSIQSGPLKISSVSEVMKESKQPASQLQKQKGDTPASATAGDTLSVPAPAVQPEESLKTDHPEIGEGKPTPALSEEASSSSIRERPPEEVAARLAQQEKQEQVKIESLAKSLEDALRQTASVTLQAIAAQNAAVQAVNAHSNILKAAMDNSEIAGEKKSAQWRTVEGALKERRKAVDEAADALLKAKEELEKMKSVIENAKKKEVAGAKPHITAAEGKLHNMIVDLDNVVKKVQAAQSEAKVVSQYHELVVQARDDFKRELDSITPEVLPGWKGMSVSDLADKLSTDDLNSLIAHAHRRIDQLNRELAEQKATEKQHITLALEKQKLEEKRAFDSAVAKALEHHRSEIQAEQDRKIEEVRDAMENEMRTQLRRQAAAHTDHLRDVLRVQEQELKSEFEQNLSEKLSEQELQFRRLSQEQVDNFTLDINTAYARLRGIEQAVQSHAVAEEEARKAHQLWLSVEALKYSMKTSSAETPTIPLGSAVEAIKANCSDNEFTQALTAAIPPESLTRGVYSEETLRARFYAVQYFLSYLQSLLLFPPQQLKPPPELCPEDINTFKLLSYASYCIEHGDLELAAKFVNQLKGESRRVAQDWLKEARMTLETKQIVEILTAYASAVGIGTTQVQPE

SEQ ID NO: 906002 - protein, 519 aa, Homo sapiens
SGTRIDGPWRVLNIGRGLKAHGHSEIAGEKKSAQWRTVEGALKERRKAVDEAADALLKAKEELEKMKSVIENAKKKEVAGAKPHITAAEGKLHNMIVDLDNVVKKVQAAQSEAKVVSQYHELVVQARDDFKRELDSITPEVLPGWKGMSVSDLADKLSTDDLNSLIAHAHRRIDQLNRELAEQKATEKQHITLALEKQKLEEKRAFDSAVAKALEHHRSEIQAEQDRKIEEVRDAMENEMRTQLRRQAAAHTDHLRDVLRVQEQELKSEFEQNLSEKLSEQELQFRRLSQEQVDNFTLDINTAYARLRGIEQAVQSHAVAEEEARKAHQLWLSVEALKYSMKTSSAETPTIPLGSAVEAIKANCSDNEFTQALTAAIPPESLTRGVYSEETLRARFYAVQKLARRVAMIDETRNSLYQYFLSYLQSLLLFPPQQLKPPPELCPEDINTFKLLSYASYCIEHGDLELAAKFVNQLKGESRRVAQDWLKEARMTLETKQIVEILTAYASAVGIGTTQVQPE

SEQ ID NO: 906003 - protein, 711 aa, Homo sapiens
MLRACQLSGVTAAAQSCLCGKFVLRPLRPCRRYSTSGSSGLTTGKIAGAGLLFVGGGIGGTILYAKWDSHFRESVEKTIPYSDKLFEMVLGPAAYNVPLPKKSIQSGPLKISSVSEVMKESKQPASQLQKQKGDTPASATAGDTLSVPAPAVQPEESLKTDHPEIGEGKPTPALSEEASSSSIRERPPEEVAARLAQQEKQEQVKIESLAKSLEDALRQTASVTLQAIAAQNAAVQAVNAHSNILKAAMDNSEIAGEKKSAQWRTVEGALKERRKAVDEAADALLKAKEELEKMKSVIENAKKKEVAGAKPHITAAEGKLHNMIVDLDNVVKKVQAAQSEAKVVSQYHELVVQARDDFKRELDSITPEVLPGWKGMSVSDLADKLSTDDLNSLIAHAHRRIDQLNRELAEQKATEKQHITLALEKQKLEEKRAFDSAVAKALEHHRSEIQAEQDRKIEEVRDAMENEMRTQLRRQAAAHTDHLRDVLRVQEQELKSEFEQNLSEKLSEQELQFRRLSQEQVDNFTLDINTAYARLRGIEQAVQSHAVAEEEARKAHQLWLSVEALKYSMKTSSAETPTIPLGSAVEAIKANCSDNEFTQALTAAIPPESLTRGVYSEETLRARFYAVQKLARRVAMIDETRNSLYQYFLSYLQSLLLFPPQQLKPPPELCPEDINTFKLLSYASYCIEHGDLELAAKFVNQLKGESRRSEV

SEQ ID NO: 906004 - protein, 685 aa, Homo sapiens
MLRACQLSGVTAAAQSCLCGKFVLRPLRPCRRYSTSGSSGLTTGKIAGAGLLFVGGGIGGTILYAKWDSHFRESVEKTIPYSDKLFEMVLGPAAYNVPLPKKSIQSGPLKISSVSEVMKESKQPASQLQKQKGDTPASATAGDTLSVPAPAVQPEESLKTDHPEIGEGKPTPALSEEASSSSIRERPPEEVAARLAQQEKQEQVKIESLAKSLEDALRQTASVTLQAIAAQNAAVQAVNAHSNILKAAMDNSEIAGEKKSAQWRTVEGALKERRKAVDEAADALLKAKEELEKMKSVIENAKKKEVAGAKPHITAAEGKLHNMIVDLDNVVKKVQAAQSEAKVVSQYHELVVQARDDFKRELDSITPEVLPGWKGMSVSDLADKLSTDDLNSLIAHAHRRIDQLNRELAEQKATEKQHITLALEKQKLEEKRAFDSAVAKALEHHRSEIQAEQDRKIEEVRDAMENEMRTQLRRQAAAHTDHLRDVLRVQEQELKSEFEQNTVWQKLSEHRLTIPADSRQAAQGTTNTPRHNITRPMPNTQRNSNRRGTQPRHVAEKSNTKSHHTRGHTGDHTTHESTPIANKHPTKTDCDYIAQRGPQKTQPEPQARAPTDDIRETDTTPRHRGHLSSDARNDSDHKQITQQQKQNSHAQRTTDDNKPNHENTLYLQAADRTTNIEHTRPAPYS

SEQ ID NO: 906005 - protein, 380 aa, Homo sapiens
MLRACQLSGVTAAAQSCLCGKFVLRPLRPCRRYSTSGSSGLTTGKIAGAGLLFVGGGIGGTILYAKWDSHFRESVEKTIPYSDKLFEMVLGPAAYNVPLPKKSIQSGPLKISSVSEVMKESKQPASQLQKQKGDTPASATAGDTLSVPAPAVQPEESLKTDHPEIGEGKPTPALSEEASSSSIRERPPEEVAARLAQQEKQEQVKIESLAKSLEDALRQTASVTLQAIAAQNAAVQAVNAHSNILKAAMDNSEIAGEKKSAQWRTVEGALKERRKAVDEAADALLKAKEELEKMKSVIENAKKKEVAGAKPHITAAEGKLHNMIVDLDNVVKKVQAAQSEAKVVSQYHELVVQARDDFKRELDSITPEVLPGWKGMSEYN

SEQ ID NO: 906006 - protein, 194 aa, Homo sapiens
MLRACQLSGVTAAAQSCLCGKFVLRPLRPCRRYSTSGSSGLTTGKIAGAGLLFVGGGIGGTILYAKWDSHFRESVEKTIPYSDKLFEMVLGPAAYNVPLPKKSIQSGPLKISSVSEVMKESKQPASQLQKQKGDTPASATAGDTLSVPAPAVQPEESLKTDHPEIGEGKPTPALSGNLIISICSFIHDTLIRTI

SEQ ID NO: 906007 - protein, 141 aa, Homo sapiens
FRCAGRGRGHAHTQARLHLTRAAAAARVHQQRRPLDRDAAGLSVIGCDRRRPELSLWEVCPPSIATMPQILYFRQLWVDYWQNCWSWPFVCWWRYWWHYPICQMGFPFPGKCRENHTLLRQTLRDGSFITSDTLEIFSGPD

SEQ ID NO: 906008 - protein, 154 aa, Homo sapiens
AETGPKGSEDRVKAEISVYQYFLSYLQSLLLFLVSSIMATLRARFYAVQKLARRVAMIDETRNSLYQYFLSYLQLLQVGSSEQGLRGLKKEHDQSKRERRRRTSQWKNENTKKRRTSATRGTMQAPEIWMCKNGEDHVRLRRWTSEAESYDDGP

SEQ ID NO: 906009 - protein, 801 aa, Homo sapiens
  misc_feature (1)..(1): Xaa can be any naturally occurring amino acid
XNLLNVSLTGLSSTGPCALVPDTFCATARGQLESTSSAVRLTEMLRACQLSGVTAAAQSCLCGKFVLRPLRPCRRYSTSGSSGLTTGKIAGAGLLFVGGGIGGTILYAKWDSHFRESVEKTIPYSDKLFEMVLGPAAYNVPLPKKSIQSGPLKISSVSEVMKESKQPASQLQKQKGDTPASATAPTEAAQIISAAGDTLSVPAPAVQPEESLKTDHPEIGEGKPTPALSEEASSSSIRERPPEEVAARLAQQEKQEQVKIESLAKSLEDALRQTASVTLQAIAAQNAAVQAVNAHSNILKAAMDNSEIAGEKKSAQWRTVEGALKERRKAVDEAADALLKAKEELEKMKSVIENAKKKEVAGAKPHITAAEGKLHNMIVDLDNVVKKVQAAQSEAKVVSQYHELVVQARDDFKRELDSITPEVLPGWKGMSVSDLADKLSTDDLNSLIAHAHRRIDQLNRELAEQKATEKQHITLALEKQKLEEKRAFDSAVAKALEHHRSEIQAEQDRKIEEVRDAMENEMRTQLRRQAAAHTDHLRDVLRVQEQELKSEFEQNLSEKLSEQELQFRRLSQEQVDNFTLDINTAYARLRGIEQAVQSHAVAEEEARKAHQLWLSVEALKYSMKTSSAETPTIPLGSAVEAIKANCSDNEFTQALTAAIPPESLTRGVYSEETLRARFYAVQKLARRVAMIDETRNSLYQYFLSYLQSLLLFPPQQLKPPPELCPEDINTFKLLSYASYCIEHGDLELAAKFVNQLKGESRRVAQDWLKEARMTLETKQIVEILTAYASAVGIGTTQVQPE

SEQ ID NO: 906010 - protein, 499 aa, Homo sapiens
MDNSEIAGEKKSAQWRTVEGALKERRKAVDEAADALLKAKEELEKMKSVIENAKKKEVAGAKPHITAAEGKLHNMIVDLDNVVKKVQAAQSEAKVVSQYHELVVQARDDFKRELDSITPEVLPGWKGMSVSDLADKLSTDDLNSLIAHAHRRIDQLNRELAEQKATEKQHITLALEKQKLEEKRAFDSAVAKALEHHRSEIQAEQDRKIEEVRDAMENEMRTQLRRQAAAHTDHLRDVLRVQEQELKSEFEQNLSEKLSEQELQFRRLSQEQVDNFTLDINTAYARLRGIEQAVQSHAVAEEEARKAHQLWLSVEALKYSMKTSSAETPTIPLGSAVEAIKANCSDNEFTQALTAAIPPESLTRGVYSEETLRARFYAVQKLARRVAMIDETRNSLYQYFLSYLQSLLLFPPQQLKPPPELCPEDINTFKLLSYASYCIEHGDLELAAKFVNQLKGESRRVAQDWLKEARMTLETKQIVEILTAYASAVGIGTTQVQPE

SEQ ID NO: 906011 - protein, 731 aa, Homo sapiens
CVFLLQSCLCGKFVLRPLRPCRRYSTSGSSGLTTGKIAGAGLLFVGGGIGGTILYAKWDSHFRESVEKTIPYSDKLFEMVLGPAAYNVPLPKKSIQSGPLKISSVSEVMKESKQPASQLQKQKGDTPASATAPTEAAQIISAAGDTLSVPAPAVQPEESLKTDHPEIGEGKPTPALSEEASSSSIRERPPEEVAARLAQQVRQTASVTLQAIAAQNAAVQAVNAHSNILKAAMDNSEIAGEKKSAQWRTVEGALKERRKAVDEAADALLKAKEELEKMKSVIENAKKKEVAGAKPHITAAEGKLHNMIVDLDNVVKKVQAAQSEAKVVSQYHELVVQARDDFKRELDSITPEVLPGWKGMSVSDLADKLSTDDLNSLIAHAHRRIDQLNRELAEQKATEKQHITLALEKQKLEEKRAFDSAVAKALEHHRSEIQAEQDRKIEEVRDAMENEMRTQLRRQAAAHTDHLRDVLRVQEQELKSEFEQNLSEKLSEQELQFRRLSQEQVDNFTLDINTAYARLRGIEQAVQSHAVAEEEARKAHQLWLSVEALKYSMKTSSAETPTIPLGSAVEAIKANCSDNEFTQALTAAIPPESLTRGVYSEETLRARFYAVQKLARRVAMIDETRNSLYQYFLSYLQSLLLFPPQQLKPPPELCPEDINTFKLLSYASYCIEHGDLELAAKFVNQLKGESRRVAQDWLKEARMTLETKQIVEILTAYASAVGIGTTQVQPE

SEQ ID NO: 906012 - protein, 747 aa, Homo sapiens; identical to SEQ ID NO: 905998

SEQ ID NO: 906013 - protein, 608 aa, Homo sapiens
MLRACQLSGVTAAAQSCLCGKFVLRPLRPCRRYSTSGSSGLTTGKIAGAGLLFVGGGIGGTILYAKWDSHFRESVEKTIPYSDKLFEMVLGPAAYNVPLPKKSIQSGPLKISSVSEVMKESKQPASQLQKQKGDTPASATAGDTLSVPAPAVQPEESLKTDHPEIGEGKPTPALSEEASSSSIRERPPEEVAARLAQQEKQEQVKIESLAKSLEDALRQTASVTLQAIAAQNAAVQAVNAHSNILKAAMDNSEIAGEKKSAQWRTVEGALKERRKAVDEAADALLKAKEELEKMKSVIENAKKKEVAGAKPHITAAEGKLHNMIVDLDNVVKKVQAAQSEAKVVSQYHELVVQARDDFKRELDSITPEVLPGWKGMSVSDLADKLSTDDLNSLIAHAHRRIDQLNRELAEQKATEKQHITLALEKQKLEEKRAFDSAVAKALEHHRSEIQAEQDRKIEEVRDAMENEMRTQLRRQAAAHTDHLRDVLRVQEQELKSEFEQNLSEKLSEQELQFRRLSQEQVDNFTLDINTAYARLRGIEQAVQSHAVAEEEARKAHQLWLSVEALKYSMKTSSAETPTIPLGSAVEAIKANCSDNEFTQALTAARPVS

SEQ ID NO: 906014 - protein, 405 aa, Homo sapiens
MLRACQLSGVTAAAQSCLCGKFVLRPLRPCRRYSTSGSSGLTTGKIAGAGLLFVGGGIGGTILYAKWDSHFRESVEKTIPYSDKLFEMVLGPAAYNVPLPKKSIQSGPLKISSVSEVMKESKQPASQLQKQKGDTPASATAGDTLSVPAPAVQPEESLKTDHPEIGEGKPTPALSEEASSSSIRERPPEEVAARLAQQEKQEQVKIESLAKSLEDALRQTASVTLQAIAAQNAAVQAVNAHSNILKAAMDNSEIAGEKKSAQWRTVEGALKERRKAVDEAADALLKAKEELEKMKSVIENAKKKEVAGAKPHITAAEGKLHNMIVDLDNVVKKVCFLSLIVFYILKYNLLKDFKDLGKQQIPTISPSFLLQSVFVVTVLKNLPWLGVVVHTCNPSTLAGRGGQIT

SEQ ID NO: 906015 - protein, 120 aa, Homo sapiens
MLRACQLSGVTAAAQSCLCGKFVLRPLRPCRRYSTSGSSGLTTGKIAGAGLLFVGGGIGGTILYAKWDSHFRESVEKTIPYSDKLFEMVLGPAAYNVPLPKKSETLFMCIYESFCSGVEG

SEQ ID NO: 906016 - protein, 462 aa, Homo sapiens
MIQTVPDPAAHIKEALSVVSEDQSLFECAYGTPHLAKTEMTASSSSDYGQTSKMSPRVPQQDWLSQPPARVTIKMECNPSQVNGSRNSPDECSVAKGGKMVGSPDTVGMNYGSYMEEKHMPPPNMTTNERRVIVPADPTLWSTDHVRQWLEWAVKEYGLPDVNILLFQNIDGKELCKMTKDDFQRLTPSYNADILLSHLHYLRETPLPHLTSDDVDKALQNSPRLMHARNTDLPYEPPRRSAWTGHGHPTPQSKAAQPSPSTVPKTEDQRPQLDPYQILGPTSSRLANPGSGQIQLWQFLLELLSDSSNSSCITWEGTNGEFKMTDPDEVARRWGERKSKPNMNYDKLSRALRYYYDKNIMTKVHGKRYAYKFDFHGIAQALQPHPPESSLYKYPSDLPYMGSYHAHPQKMNFVAPHPPALPVTSSSFFAAPNPYWNSPTGGIYPNTRLPTSHMPSHLGTYY

SEQ ID NO: 906017 - protein, 363 aa, Homo sapiens
MVGSPDTVGMNYGSYMEEKHMPPPNMTTNERRVIVPADPTLWSTDHVRQWLEWAVKEYGLPDVNILLFQNIDGKELCKMTKDDFQRLTPSYNADILLSHLHYLRETPLPHLTSDDVDKALQNSPRLMHARNTDLPYEPPRRSAWTGHGHPTPQSKAAQPSPSTVPKTEDQRPQLDPYQILGPTSSRLANPGSGQIQLWQFLLELLSDSSNSSCITWEGTNGEFKMTDPDEVARRWGERKSKPNMNYDKLSRALRYYYDKNIMTKVHGKRYAYKFDFHGIAQALQPHPPESSLYKYPSDLPYMGSYHAHPQKMNFVAPHPPALPVTSSSFFAAPNPYWNSPTGGIYPNTRLPTSHMPSHLGTYY

SEQ ID NO: 906018 - protein, 455 aa, Homo sapiens
MASTIKEALSVVSEDQSLFECAYGTPHLAKTEMTASSSSDYGQTSKMSPRVPQQDWLSQPPARVTIKMECNPSQVNGSRNSPDECSVAKGGKMVGSPDTVGMNYGSYMEEKHMPPPNMTTNERRVIVPADPTLWSTDHVRQWLEWAVKEYGLPDVNILLFQNIDGKELCKMTKDDFQRLTPSYNADILLSHLHYLRETPLPHLTSDDVDKALQNSPRLMHARNTDLPYEPPRRSAWTGHGHPTPQSKAAQPSPSTVPKTEDQRPQLDPYQILGPTSSRLANPGSGQIQLWQFLLELLSDSSNSSCITWEGTNGEFKMTDPDEVARRWGERKSKPNMNYDKLSRALRYYYDKNIMTKVHGKRYAYKFDFHGIAQALQPHPPESSLYKYPSDLPYMGSYHAHPQKMNFVAPHPPALPVTSSSFFAAPNPYWNSPTGGIYPNTRLPTSHMPSHLGTYY

SEQ ID NO: 906019 - protein, 428 aa, Homo sapiens
MASTIKEALSVVSEDQSLFECAYGTPHLAKTEMTASSSSDYGQTSKMSPRVPQQDWLSQPPARVTIKMECNPSQVNGSRNSPDECSVAKGGKMVGSPDTVGMNYGSYMEEKHMPPPNMTTNERRVIVPADPTLWSTDHVRQWLEWAVKEYGLPDVNILLFQNIDGKELCKMTKDDFQRLTPSYNADILLSHLHYLRENLPYEPPRRSAWTGHGHPTPQSKAAQPSPSTVPKTEDQRPQLDPYQILGPTSSRLANPGSGQIQLWQFLLELLSDSSNSSCITWEGTNGEFKMTDPDEVARRWGERKSKPNMNYDKLSRALRYYYDKNIMTKVHGKRYAYKFDFHGIAQALQPHPPESSLYKYPSDLPYMGSYHAHPQKMNFVAPHPPALPVTSSSFFAAPNPYWNSPTGGIYPNTRLPTSHMPSHLGTYY

SEQ ID NO: 906020 - protein, 254 aa, Homo sapiens
MASTIKEALSVVSEDQSLFECAYGTPHLAKTEMTASSSSDYGQTSKMSPRVPQQDWLSQPPARVTIKMECNPSQVNGSRNSPDECSVAKGGKMVGSPDTVGMNYGSYMEEKHMPPPNMTTNERRVIVPADPTLWSTDHVRQWLEWAVKEYGLPDVNILLFQNIDGKELCKMTKDDFQRLTPSYNADILLSHLHYLRETPLPHLTSDDVDKALQNSPRLMHARNTGGAAFIFPNTSVYPEATQRITTRPDTKTPL

SEQ ID NO: 906021 - protein, 256 aa, Homo sapiens
MASTIKEALSVVSEDQSLFECAYGTPHLAKTEMTASSSSDYGQTSKMSPRVPQQDWLSQPPARVTIKMECNPSQVNGSRNSPDECSVAKGGKMVGSPDTVGMNYGSYMEEKHMPPPNMTTNERRVIVPADPTLWSTDHVRQWLEWAVKEYGLPDVNILLFQNIDGKELCKMTKDDFQRLTPSYNADILLSHLHYLRETPLPHLTSDDVDKALQNSPRLMHARNTDLPYEPPRRSAWTGHGHPTPQSKAVTSLHSAK

SEQ ID NO: 906022 - protein, 259 aa, Homo sapiens
PTSYPPQTGSYSQAPSQYSQQSSSYGQQNLPYEPPRRSAWTGHGHPTPQSKAAQPSPSTVPKTEDQRPQLDPYQILGPTSSRLANPGSGQIQLWQFLLELLSDSSNSSCITWEGTNGEFKMTDPDEVARRWGERKSKPNMNYDKLSRALRYYYDKNIMTKVHGKRYAYKFDFHGIAQALQPHPPESSLYKYPSDLPYMGSYHAHPQKMNFVAPHPPALPVTSSSFFAAPNPYWNSPTGGIYPNTRLPTSHMPSHLGTYY

SEQ ID NO: 906023 - protein, 425 aa, Homo sapiens
MASTIKEALSVVSEDQSLFECAYGTPHLAKTEMTASSSSDYGQTSKMSPRVPQQDWLSQPPARVTIKMECNPSQVNGSRNSPDECSVAKGGKMVGSPDTVGMNYGSYMEEKHMPPPNMTTNERRVIVPADPTLWSTDHVRQWLEWAVKEYGLPDVNILLFQNIDGKELCKMTKDDFQRLTPSYNADILLSHLHYLRETPLPHLTSDDVDKALQNSPRLMHARNTDLPYEPPRRSAWTGHGHPTPQSKAAQPSPSTVPKTEDQRPQLDPYQILGPTSSRLANPGSGQIQLWQFLLELLSDSSNSSCITWEGTNGEFKMTDPDEVARRWGERKSKPNMNYDKLSRALRYYYDKNIMTKYPSDLPYMGSYHAHPQKMNFVAPHPPALPVTSSSFFAAPNPYWNSPTGGIYPNTRLPTSHMPSHLGTYY

SEQ ID NO: 906024 - protein, 1247 aa, Homo sapiens [sequence omitted]

SEQ ID NO: 906025 - protein, 1247 aa, Homo sapiens [sequence omitted]

SEQ ID NO: 906026 - protein, 1094 aa, Homo sapiens
DCGSSQQEKYKKPSRYPDQKGKRNTFQAVLASSDSSSYAIFLYPEDGLQFHTTFSKKENNQVPAVVAFSQGSVGFLWKSNGAYNIFANDRESVENLAKSSNSGQQGVWVFEIGSPATTNGVVPADVILGTEDGAEYDDEDEDYDLATTRLGLEDVGTTPFSYKALRRGGADTYSVPSVLSPRRAATERPLGPPTERTRSFQLAVETFHQQHPQVIDVDEVEETGVVFSYNTDSRQTCANNRHQCSVHAECRDYATGFCCSCVAGYTGNGRQCVAEGSPQRVNGKVKGRIFVGSSQVPIVFENTDLHSYVVMNHGRSYTAISTIPETVGYSLLPLAPVGGIIGWMFAVEQDGFKNGFSITGGEFTRQAEVTFVGHPGNLVIKQRFSGIDEHGHLTIDTELEGRVPQIPFGSSVHIEPYTELYHYSTSVITSSSTREYTVTEPERDGASPSRIYTYQWRQTITFQECVHDDSRPALPSTQQLSVDSVFVLYNQEEKILRYALSNSIGPVREGSPDALQNPCYIGTHGCDTNAACRPGPRTQFTCECSIGFRGDGRTCYDIDECSEQPSVCGSHTICNNHPGTFRCECVEGYQFSDEGTCVAVVDQRPINYCETGLHNCDIPQRAQCIYTGGSSYTCSCLPGFSGDGQACQDVDECQPSRCHPDAFCYNTPGSFTCQCKPGYQGDGFRCVPGEVEKTRCQHEREHILGAAGATDPQRPIPPGLFVPECDAHGHYAPTQCHGSTGYCWCVDRDGREVEGTRTRPGMTPPCLSTVAPPIHQGPAVPTAVIPLPPGTHLLFAQTGKIERLPLEGNTMRKTEAKAFLHVPAKVIIGLAFDCVDKMVYWTDITEPSIGRASLHGGEPTTIIRQDLGSPEGIAVDHLGRNIFWTDSNLDRIEVAKLDGTQRRVLFETDLVNPRGIVTDSVRGNLYWTDWNRDNPKIETSYMDGTNRRILVQDDLGLPNGLTFDAFSSQLCWVDAGTNRAECLNPSQPSRRKALEGLQYPFAVTSYGKNLYFTDWKMNSVVALDLAISKETDAFQPHKQTRLYGITTALSQCPQGHNYCSVNNGGCTHLCLATPGSRTCRCPDNTLGVDCIERK

SEQ ID NO: 906027 - protein, 1247 aa, Homo sapiens [sequence omitted]

SEQ ID NO: 906028 - protein, 270 aa, Homo sapiens
MLASSSRIRAAWTRALLLPLLLAGPVGCLSRQELFPFGPGQGDLELEDGDDFVSPALELSGALRFYDRSDIDAVYVSEPREGGRGAAGRGGPGAPVEPDGLGRSRRGPGPAGRRGTGHGAGSPASAGSAKVFPTRSLLSEERVAGSGWLRAPRAVTPAPMDPAELPPRRLWAASPQGGQSASLGCPVPSGLGPGRSRVEPGSRAEPPQGKSRSWIAVCARAPGLLWLRESFAGSLLYLCVDSGCVLAVMLLSSWARFRVQSPERETQGSQ

SEQ ID NO: 906029 - protein, 50 aa, Homo sapiens
MYYSVDLIPCPTFKSFARRLYKLACSEIGYFPYGFNVDQHSGYINSRRVA

SEQ ID NO: 906030 - protein, 270 aa, Homo sapiens; identical to SEQ ID NO: 906028

SEQ ID NO: 906031 - protein, 1247 aa, Homo sapiens [sequence omitted]

SEQ ID NO: 906032 - protein, 1247 aa, Homo sapiens [sequence omitted]

SEQ ID NO: 906033 - protein, 1247 aa, Homo sapiens [sequence omitted]

SEQ ID NO: 906034 - protein, 113 aa, Homo sapiens
HQLWLTFCGRRKPARAPEDSLGSNVSVFTEGSPDALQNPCYIGTHGCDTNAACRPGPRTQFTCECSIGFRGDGRTCYGTAFDSDLLGLGNQARRRHPRSVNQRTGCSKEARMR

SEQ ID NO: 906035 - protein, 397 aa, Homo sapiens
HALTFASPLPADLGTTDVQKKKLVDAIVSGDTSKLMKILQPQDVDLALDSGASLLHLAVEAGQEECAKWLLLNNANPNLSNRRGSTPLHMAVERRVRGVVELLLARKISVNAKDEDQWTALHFAAQNGDESSTRLLLEKNASVNEVDFEGRTPMHVACQHGQENIVRILLRRGVDVSLQGKDAWLPLHYAAWQGHLPIVKLLAKQPGVSVNAQTLDGRTPLHLAAQRGHYRVARILIDLCSDVNVCSLLAQTPLHVAAETGHTSTARLLLHRGAGKEAVTSDGYTALHLAARNGHLATVKLLVEEKADVLARGPLNQTALHLAAAHGHSEVVEELVSADVIDLFDEQGLSALHLAAQGRHAQTVETLLRHGAHINLQSLKFQGGHGPAATLLRRSKT

SEQ ID NO: 906036 - protein, 707 aa, Homo sapiens
MEGDGGTPWALALLRTFDAGEFTGWEKVGSGGFGQVYKVRHVHWKTWLAIKCSPSLHVDDRERMELLEEAKKMEMAKFRYILPVYGICREPVGLVMEYMETGSLEKLLASEPLPWDLRFRIIHETAVGMNFLHCMAPPLLHLDLKPANILLDAHYHVKISDFGLAKCNGLSHSHDLSMDGLFGTIAYLPPERIREKSRLFDTKHDVYSFAIVIWGVLTQKKPFADEKNILHIMVKVVKGHRPELPPVCRARPRACSHLIRLMQRCWQGDPRVRPTFQEITSETEDLCEKPDDEVKETAHDLDVKSPPEPRSEVVPARLKRASAPTFDNDYSLSELLSQLDSGVSQAVEGPEELSRSSSESKLPSSGSGKRLSGVSSVDSAFSSRGSLSLSFEREPSTSDLGTTDVQKKKLVDAIVSGDTSKLMKILQPQDVDLALDSGASLLHLAVEAGQEECAKWLLLNNANPNLSNRRGSTPLHMAVERRVRGVVELLLARKISVNAKDEDQWTALHFAAQNGDESSTRLLLEKNASVNEVDFEGRTPMHVACQHGQENIVRILLRRGVDVSLQGKDAWLPLHYAAWQGHLPIVKLLAKQPGVSVNAQTLDGRTPLHLAAQRGHYRVARILIDLCSDVNVCSLLAQTPLHVAAETGHTSTARLLLHRGAGKEAVTSDGYTALHLAARNGHLATVKLLVEEKADLAQVHMPAPSSI

SEQ ID NO: 906037 - protein, 707 aa, Homo sapiens; identical to SEQ ID NO: 906036

SEQ ID NO: 906038 - protein, 717 aa, Homo sapiens [sequence omitted]

SEQ ID NO: 906039 - protein, 784 aa, Homo sapiens [sequence omitted]

SEQ ID NO: 906040 - protein, 109 aa, Homo sapiens
VEERYTTSIPCMTGPACRDQNDVIQARKAYDLQSDAIYKSDLEWLRGIGWVPIGSVEVEKVKRAGEILSDRKCRQPADQLKFTCITDTPEIVHVGPLGLPGELRLGRGV

SEQ ID NO: 906041 - protein, 572 aa, Homo sapiens
VEERYTTSIPCMTGPACRDQNDVIQARKAYDLQSDAIYKSDLEWLRGIGWVPIGSVEVEKVKRAGEILSDRKCRQPADQLKFTCITDTPEIVHVGPLGLPGELRLGRGVGEIPQLVGALRLYGTRVYAEVIIRVTCPLSSPQEITSETEDLCEKPDDEVKETAHDLDVKSPPEPRSEVVPARLKRASAPTFDNDYSLSELLSQLDSGVSQAVEGPEELSRSSSESKLPSSGSGKRLSGVSSVDSAFSSRGSLSLSFEREPSTSDLGTTDVQKKKLVDAIVSGDTSKLMKILQPQDVDLALDSGASLLHLAVEAGQEECAKWLLLNNANPNLSNRRGSTPLHMAVERRVRGVVELLLARKISVNAKDEDQWTALHFAAQNGDESSTRLLLEKNASVNEVDFEGRTPMHVACQHGQENIVRILLRRGVDVSLQGKDAWLPLHYAAWQGHLPIVKLLAKQPGVSVNAQTLDGRTPLHLAAQRGHYRVARILIDLCSDVNVCSLLAQTPLHVAAETGHTSTARLLLHRGAGKEAVTSDGYTALHLAARNGHLATVKLLVEEKADLAQVHMPAPSSI

SEQ ID NO: 906042 - protein, 106 aa, Homo sapiens
GATCWVSPQPPVHRSFSVLPPGLCPSTPSARCSGVGRTGWEGVVLRGGLWRNEDRALAAAMAFPCKKYFVIQNQYFGQAQWLMPVIPALWVAEVGGSFEVRSLRPA

SEQ ID NO: 906043 - protein, 639 aa, Homo sapiens
MEPAMEPETLEARINRATNPLNKELDWASINGFCEQLNEDFEGPPLATRLLAHKIQSPQEWEAIQALTVLETCMKSCGKRFHDEVGKFRFLNELIKVVSPKYLGSRTSEKVKNKILELLYSWTVGLPEEVKIAEAYQMLKKQGIVKSDPKLPDDTTFPLPPPRPKNVIFEDEEKSKMLARLLKSSHPEDLRAANKLIKEMVQEDQKRMEKISKRVNAIEEVNNNVKLLTEMVMSHSQGGAAAGSSEDLMKELYQRCERMRPTLFRLASDTEDNDEALAEILQANDNLTQVINLYKQLVRGEEVNGDATAGSIPGSTSALLDLSGLDLPPAGTTYPAMPTRPGEQASPEQPSASVSLLDDELMSLGLSDPTPPSGPSLDGTGWNSFQSSDATEPPAPALAQAPSMESRPPAQTSLPASSGLDDLDLLGKTLLQQSLPPESQQVRWEKQQPTPRLTLRDLQNKSSSCSSPSSSATSLLHTVSPEPPRPPQQPVPTELSLASITVPLESIKPSNILPVTVYDQHGFRILFHFARDPLPGRSDVLVVVVSMLSTAPQPIRNIVFQSAVPKVMKVKLQPPSGTELPAFNPIVHPSAITQVLLLANPQKEKVRLRYKLTFTMGDQTYNEMGDVDQFPPPETWGSL

SEQ ID NO: 906044 - protein, 639 aa, Homo sapiens; identical to SEQ ID NO: 906043

SEQ ID NO: 906045 - protein, 684 aa, Homo sapiens
GRGTGRPLLTPRPRPGRGGVLSRPLRPWSDGGPRPRRGPAVGAGAAHLSDPWAMTPGTANRATNPLNKELDWASINGFCEQLNEDFEGPPLATRLLAHKIQSPQEWEAIQALTVLETCMKSCGKRFHDEVGKFRFLNELIKVVSPKYLGSRTSEKVKNKILELLYSWTVGLPEEVKIAEAYQMLKKQGIVKSDPKLPDDTTFPLPPPRPKNVIFEDEEKSKMLARLLKSSHPEDLRAANKLIKEMVQEDQKRMEKISKRVNAIEEVNNNVKLLTEMVMSHSQGGAAAGSSEDLMKELYQRCERMRPTLFRLASDTEDNDEALAEILQANDNLTQVINLYKQLVRGEEVNGDATAGSIPGSTSALLDLSGLDLPPAGTTYPAMPTRPGEQASPEQPSASVSLLDDELMSLGLSDPTPPSGPSLDGTGWNSFQSSDATEPPAPALAQAPSMESRPPAQTSLPASSGLDDLDLLGKTLLQQSLPPESQQVRWEKQQPTPRLTLRDLQNKSSSCSSPSSSATSLLHTVSPEPPRPPQQPVPTELSLASITVPLESIKPSNILPVTVYDQHGFRILFHFARDPLPGRSDVLVVVVSMLSTAPQPIRNIVFQSAVPKVMKVKLQPPSGTELPAFNPIVHPSAITQVLLLANPQKEKVRLRYKLTFTMGDQTYNEMGDVDQFPPPETWGSL

SEQ ID NO: 906046 - protein, 566 aa, Homo sapiens
MKSCGKRFHDEVGKFRFLNELIKVVSPKYLGSRTSEKVKNKILELLYSWTVGLPEEVKIAEAYQMLKKQGIVKSDPKLPDDTTFPLPPPRPKNVIFEDEEKSKMLARLLKSSHPEDLRAANKLIKEMVQEDQKRMEKISKRVNAIEEVNNNVKLLTEMVMSHSQGGAAAGSSEDLMKELYQRCERMRPTLFRLASDTEDNDEALAEILQANDNLTQVINLYKQLVRGEEVNGDATAGSIPGSTSALLDLSGLDLPPAGTTYPAMPTRPGEQASPEQPSASVSLLDDELMSLGLSDPTPPSGPSLDGTGWNSFQSSDATEPPAPALAQAPSMESRPPAQTSLPASSGLDDLDLLGKTLLQQSLPPESQQVRWEKQQPTPRLTLRDLQNKSSSCSSPSSSATSLLHTVSPEPPRPPQQPVPTELSLASITVPLESIKPSNILPVTVYDQHGFRILFHFARDPLPGRSDVLVVVVSMLSTAPQPIRNIVFQSAVPKVMKVKLQPPSGTELPAFNPIVHPSAITQVLLLANPQKEKVRLRYKLTFTMGDQTYNEMGDVDQFPPPETWGSL

SEQ ID NO: 906047 - protein, 552 aa, Homo sapiens
MEPAMEPETLEARINRATNPLNKELDWASINGFCEQLNEDFEGPPLATRLLAHKIQSPQEWEAIQALTVLETCMKSCGKRFHDEVGKFRFLNELIKVVSPKYLGSRTSEKVKNKILELLYSWTVGLPEEVKIAEAYQMLKKQGIVKSDPKLPDDTTFPLPPPRPKNVIFEDEEKSKMLARLLKSSHPEDLRAANKLIKEMVQEDQKRMEKISKRVNAIEEVNNNVKLLTEMVMSHSQGGAAAGSSEDLMKELYQRCERMRPTLFRLASDTEDNDEALGLSDPTPPSGPSLDGTGWNSFQSSDATEPPAPALAQAPSMESRPPAQTSLPASSGLDDLDLLGKTLLQQSLPPESQQVRWEKQQPTPRLTLRDLQNKSSSCSSPSSSATSLLHTVSPEPPRPPQQPVPTELSLASITVPLESIKPSNILPVTVYDQHGFRILFHFARDPLPGRSDVLVVVVSMLSTAPQPIRNIVFQSAVPKVMKVKLQPPSGTELPAFNPIVHPSAITQVLLLANPQKEKVRLRYKLTFTMGDQTYNEMGDVDQFPPPETWGSL

SEQ ID NO: 906048 - protein, 425 aa, Homo sapiens
MEPAMEPETLEARINRATNPLNKELDWASINGFCEQLNEDFEGPPLATRLLAHKIQSPQEWEAIQALTVLETCMKSCGKRFHDEVGKFRFLNELIKVVSPKYLGSRTSEKVKNKILELLYSWTVGLPEEVKIAEAYQMLKKQGIVKSDPKLPDDTTFPLPPPRPKNVIFEDEEKSKMLARLLKSSHPEDLRAANKLIKEMVQEDQKRMEKISKRVNAIEEVNNNVKLLTEMVMSHSQGGAAAGSSEDLMKELYQRCERMRPTLFRLASDTEDNDEALAEILQANDNLTQVINLYKQLVRGEEVNGDATAGSIPGSTSALLDLSGLDLPPAGTTYPAMPTRPGEQASPEQPSASVSLLDDELMSLGLSDPTPPSGPSLDGTGWNSFQSSDATEPPAPALAQAPSMESRPPAQPSATSCSSQLSPRL

SEQ ID NO: 906049 - protein, 417 aa, Homo sapiens
PAVSDLEDPFGLHSGLGAAAGSSEDLMKELYQRCERMRPTLFRLASDTEDNDEALAEILQANDNLTQVINLYKQLVRGEEVNGDATAGSIPGSTSALLDLSGLDLPPAGTTYPAMPTRPGEQASPEQPSASVSLLDDELMSLGLSDPTPPSGPSLDGTGWNSFQSSDATEPPAPALAQAPSMESRPPAQTSLPASSGLDDLDLLGKTLLQQSLPPESQQVRWEKQQPTPRLTLRDLQNKSSSCSSPSSSATSLLHTVSPEPPRPPQQPVPTELSLASITVPLESIKPSNILPVTVYDQHGFRILFHFARDPLPGRSDVLVVVVSMLSTAPQPIRNIVFQSAVPKVMKVKLQPPSGTELPAFNPIVHPSAITQVLLLANPQKEKVRLRYKLTFTMGDQTYNEMGDVDQFPPPETWGSL

SEQ ID NO: 906050 - protein, 236 aa, Homo sapiens
MESRPPAQTSLPASSGLDDLDLLGKTLLQQSLPPESQQVRWEKQQPTPRLTLRDLQNKSSSCSSPSSSATSLLHTVSPEPPRPPQQPVPTELSLASITVPLESIKPSNILPVTVYDQHGFRILFHFARDPLPGRSDVLVVVVSMLSTAPQPIRNIVFQSAVPKVMKVKLQPPSGTELPAFNPIVHPSAITQVLLLANPQKEKVRLRYKLTFTMGDQTYNEMGDVDQFPPPETWGSL

SEQ ID NO: 906051 - protein, 219 aa, Homo sapiens
VGITGVSYHAGQESLLNALSPRLREKQQPTPRLTLRDLQNKSSSCSSPSSSATSLLHTVSPEPPRPPQQPVPTELSLASITVPLESIKPSNILPVTVYDQHGFRILFHFARDPLPGRSDVLVVVVSMLSTAPQPIRNIVFQSAVPKVMKVKLQPPSGTELPAFNPIVHPSAITQVLLLANPQKEKVRLRYKLTFTMGDQTYNEMGDVDQFPPPETWGSL

SEQ ID NO: 906052 - protein, 444 aa, Homo sapiens
MEPAMEPETLEARINRATNPLNKELDWASINGFCEQLNEDFEGPPLATRLLAHKIQSPQEWEAIQALTVLETCMKSCGKRFHDEVGKFRFLNELIKVVSPKYLGSRTSEKVKNKILELLYSWTVGLPEEVKIAEAYQMLKKQGIVKSDPKLPDDTTFPLPPPRPKNVIFEDEEKSKMLARLLKSSHPEDLRAANKLIKEMVQEDQKRMEKISKRVNAIEEVNNNVKLLTEMVMSHSQGGAAAGSSEDLMKELYQRCERMRPTLFRLASDTEDNDEALAEILQANDNLTQVINLYKQLVRGEEVNGDATAGSIPGSTSALLDLSGLDLPPAGTTYPAMPTRPGEQASPEQPSASVSLLDDELMSLGLSDPTPPSGPSLDGTGWNSFQSSDATEPPAPALAQAPSMESRPPAQTSLPASSGLDDLDLLGKTLLQQSLPPESQQVRW

SEQ ID NO: 906053 - protein, 303 aa, Homo sapiens
MEPAMEPETLEARINRATNPLNKELDWASINGFCEQLNEDFEGPPLATRLLAHKIQSPQEWEAIQALTVLETCMKSCGKRFHDEVGKFRFLNELIKVVSPKYLGSRTSEKVKNKILELLYSWTVGLPEEVKIAEAYQMLKKQGIVKSDPKLPDDTTFPLPPPRPKNVIFEDEEKSKMLARLLKSSHPEDLRAANKLIKEMVQEDQKRMEKISKRVNAIEEVNNNVKLLTEMVMSHSQGGAAAGSSEDLMKELYQRCERMRPTLFRLASDTEDNDEALGEPRAGAEVRSPPLPPPPAPTSPRPC

SEQ ID NO: 906054 - protein, 69 aa, Homo sapiens
PQSFSLASPLLPVPAEILQANDNLTQVINLYKQLVRGEEVNGDATAGSIPGEEVAGELGGHPSGWRGTE

SEQ ID NO: 906055 - protein, 146 aa, Homo sapiens
GRGTGRPLLTPRPRPGRGGVLSRPLRPWSDGGPRPRRGPAVGAGAAHLSDPWAMTPGTASELRREPPGRREQPPTPKAHIASRSSGPGKEHASGSPGLHLTPGREGPYYFQAPNPPLSGPAWRSWSPQVVTFAHYPVLEGRTHCPI

SEQ ID NO: 906056 - protein, 146 aa, Homo sapiens; identical to SEQ ID NO: 906055

SEQ ID NO: 906057 - protein, 775 aa, Homo sapiens
MKELYQRCERMRPTLFRLASDTEDNDEALAETLQANDKLTQVINLYKQLVRGGGGQPGDATAGLHPLGAPRACCISSVPWISRLLGTPTQLCPTCLASRPALSSPVPQFPWLDDELMSLGLSDPKSPFRPKPGLYRMEPAMEPETLEARINRATNPLNKELDWASINGFCEQLNEDFEGPPLATRLLAHKIQSPQEWEAIQALTVLETCMKSCGKRFHDEVGKFRFLNELIKVVSPKYLGSRTSEKVKNKILELLYSWTVGLPEEVKIAEAYQMLKKQGIVKSDPKLPDDTTFPLPPPRPKNVIFEDEEKSKMLARLLKSSHPEDLRAANKLIKEMVQEDQKRMEKISKRVNAIEEVNNNVKLLTEMVMSHSQGGAAAGSSEDLMKELYQRCERMRPTLFRLASDTEDNDEALAEILQANDNLTQVINLYKQLVRGEEVNGDATAGSIPGSTSALLDLSGLDLPPAGTTYPAMPTRPGEQASPEQPSASVSLLDDELMSLGLSDPTPPSGPSLDGTGWNSFQSSDATEPPAPALAQAPSMESRPPAQTSLPASSGLDDLDLLGKTLLQQSLPPESQQVRWEKQQPTPRLTLRDLQNKSSSCSSPSSSATSLLHTVSPEPPRPPQQPVPTELSLASITVPLESIKPSNILPVTVYDQHGFRILFHFARDPLPGRSDVLVVVVSMLSTAPQPIRNIVFQSAVPKVMKVKLQPPSGTELPAFNPIVHPSAITQVLLLANPQKEKVRLRYKLTFTMGDQTYNEMGDVDQFPPPETWGSL

SEQ ID NO: 906058 - protein, 644 aa, Homo sapiens
MARYEAGFKFGARLWQARINRATNPLNKELDWASINGFCEQLNEDFEGPPLATRLLAHKIQSPQEWEAIQALTVLETCMKSCGKRFHDEVGKFRFLNELIKVVSPKYLGSRTSEKVKNKILELLYSWTVGLPEEVKIAEAYQMLKKQGIVKSDPKLPDDTTFPLPPPRPKNVIFEDEEKSKMLARLLKSSHPEDLRAANKLIKEMVQEDQKRMEKISKRVNAIEEVNNNVKLLTEMVMSHSQGGAAAGSSEDLMKELYQRCERMRPTLFRLASDTEDNDEALAEILQANDNLTQVINLYKQLVRGEEVNGDATAGSIPGSTSALLDLSGLDLPPAGTTYPAMPTRPGEQASPEQPSASVSLLDDELMSLGLSDPTPPSGPSLDGTGWNSFQSSDATEPPAPALAQAPSMESRPPAQTSLPASSGLDDLDLLGKTLLQQSLPPESQQVRWEKQQPTPRLTLRDLQNKSSSCSSPSSSATSLLHTVSPEPPRPPQQPVPTELSLASITVPLESIKPSNILPVTVYDQHGFRILFHFARDPLPGRSDVLVVVVSMLSTAPQPIRNIVFQSAVPKVMKVKLQPPSGTELPAFNPIVHPSAITQVLLLANPQKEKVRLRYKLTFTMGDQTYNEMGDVDQFPPPETWGSL

SEQ ID NO: 906059 - protein, 566 aa, Homo sapiens; identical to SEQ ID NO: 906046

SEQ ID NO: 906060 - protein, 587 aa, Homo sapiens
MEPAMEPETLEARINRATNPLNKELDWASINGFCEQLNEDFEGPPLATRLLAHKIQSPQEWEAIQALTVLETCMKSCGKRFHDEVGKFRFLNELIKVVSPKYLGSRTSEKVKNKILELLYSWTVGLPEEVKIAEAYQMLKKQGIVKSDPKLPDDTTFPLPPPRPKNVIFEDEEKSKMLARLLKSSHPEDLRAANKLIKEMVQEDQKRMEKISKRVNAIEEVNNNVKLLTEMVMSHSQGGAAAGSSEDLMKELYQRCERMRPTLFRLASDTEDNDEALAEILQANDNLTQVINLYKQLVRGEEVNGDATAGSIPGSTSALLDLSGLDLPPAGTTYSSDATEPPAPALAQAPSMESRPPAQTSLPASSGLDDLDLLGKTLLQQSLPPESQQVRWEKQQPTPRLTLRDLQNKSSSCSSPSSSATSLLHTVSPEPPRPPQQPVPTELSLASITVPLESIKPSNILPVTVYDQHGFRILFHFARDPLPGRSDVLVVVVSMLSTAPQPIRNIVFQSAVPKVMKVKLQPPSGTELPAFNPIVHPSAITQVLLLANPQKEKVRLRYKLTFTMGDQTYNEMGDVDQFPPPETWGSL

SEQ ID NO: 906061 - protein, 236 aa, Homo sapiens; identical to SEQ ID NO: 906050

SEQ ID NO: 906062 - protein, 270 aa, Homo sapiens
MARYRGSETGWYRMEQLSSDATEPPAPALAQAPSMESRPPAQTSLPASSGLDDLDLLGKTLLQQSLPPESQQVRWEKQQPTPRLTLRDLQNKSSSCSSPSSSATSLLHTVSPEPPRPPQQPVPTELSLASITVPLESIKPSNILPVTVYDQHGFRILFHFARDPLPGRSDVLVVVVSMLSTAPQPIRNIVFQSAVPKVMKVKLQPPSGTELPAFNPIVHPSAITQVLLLANPQKEKVRLRYKLTFTMGDQTYNEMGDVDQFPPPETWGSL

SEQ ID NO: 906063 - protein, 464 aa, Homo sapiens
MEPAMEPETLEARINRATNPLNKELDWASINGFCEQLNEDFEGPPLATRLLAHKIQSPQEWEAIQALTVLETCMKSCGKRFHDEVGKFRFLNELIKVVSPKYLGSRTSEKVKNKILELLYSWTVGLPEEVKIAEAYQMLKKQGIVKSDPKLPDDTTFPLPPPRPKNVIFEDEEKSKMLARLLKSSHPEDLRAANKLIKEMVQEDQKRMEKISKRVNAIEEVNNNVKLLTEMVMSHSQGGAAAGSSEDLMKELYQRCERMRPTLFRLASDTEDNDEALAEILQANDNLTQVINLYKQLVRGEEVNGDATAGSIPGSTSALLDLSGLDLPPAGTTYPAMPTRPGEQASPEQPSASVSLLDDELMSLGLSDPTPPSGPSLDGTGWNSFQSSDATEPPAPALAQAPSMESRPPAQTSLPASSGLDDLDLLGKTLLQQSLPPESQQVRWENAASKTHTTGITSPGASST

SEQ ID NO: 906064 - protein, 146 aa, Homo sapiens; identical to SEQ ID NO: 906055

SEQ ID NO: 906065 - protein, 1013 aa, Homo sapiens
MGDKKDDKDSPKKNKGKERRDLDDLKKEVAMTEHKMSVEEVCRKYNTDCVQGLTHSKAQEILARDGPNALTPPPTTPEWVKFCRQLFGGFSILLWIGAILCFLAYGIQAGTEDDPSGDNLYLGIVLAAVVIITGCFSYYQEAKSSKIMESFKNMVPQQALVIREGEKMQVNAEEVVVGDLVEIKGGDRVPADLRIISAHGCKVDNSSLTGESEPQTRSPDCTHDNPLETRNITFFSTNCVEGTARGVVVATGDRTVMGRIATLASGLEVGKTPIAIEIEHFIQLITGVAVFLGVSFFILSLILGYTWLEAVIFLIGIIVANVPEGLLATVTVCLTLTAKRMARKNCLVKNLEAVETLGSTSTICSDKTGTLTQNRMTVAHMWFDNQIHEADTTEDQSGTSFDKSSHTWVALSHIAGLCNRAVFKGGQDNIPVLKRDVAGDASESALLKCIELSSGSVKLMRERNKKVAEIPFNSTNKYQLSIHETEDPNDNRYLLVMKGAPERILDRCSTILLQGKEQPLDEEMKEAFQNAYLELGGLGERVLGFCHYYLPEEQFPKGFAFDCDDVNFTTDNLCFVGLMSMIDPPRAAVPDAVGKCRSAGIKVIMVTGDHPITAKAIAKGVGIISEGNETVEDIAARLNIPVSQVNPRDAKACVIHGTDLKDFTSEQIDEILQNHTEIVFARTSPQQKLIIVEGCQRQGAIVAVTGDGVNDSPALKKADIGVAMGIAGSDVSKQAADMILLDDNFASIVTGVEEGRLIFDNLKKSIAYTLTSNIPEITPFLLFIMANIPLPLGTITILCIDLGTDMVPAISLAYEAAESDIMKRQPRNPRTDKLVNERLISMAYGQIGMIQALGGFFSYFVILAENGFLPGNLVGIRLNWDDRTVNDLEDSYGQQWTYEQRKVVEFTCHTAFFVSIVVVQWADLIICKTRRNSVFQQGMKNKILIFGLFEETALAAFLSYCPGMDVALRMYPLKPSWWFCAFPYSFLIFVYDEIRKLILRRNPGGWVEKETYY

SEQ ID NO: 906066 - protein, 983 aa, Homo sapiens
MTEHKMSVEEVCRKYNTDCVQGLTHSKAQEILARDGPNALTPPPTTPEWVKFCRQLFGGFSILLWIGAILCFLAYGIQAGTEDDPSGDNLYLGIVLAAVVIITGCFSYYQEAKSSKIMESFKNMVPQQALVIREGEKMQVNAEEVVVGDLVEIKGGDRVPADLRIISAHGCKVDNSSLTGESEPQTRSPDCTHDNPLETRNITFFSTNCVEGTARGVVVATGDRTVMGRIATLASGLEVGKTPIAIEIEHFIQLITGVAVFLGVSFFILSLILGYTWLEAVIFLIGIIVANVPEGLLATVTVCLTLTAKRMARKNCLVKNLEAVETLGSTSTICSDKTGTLTQNRMTVAHMWFDNQIHEADTTEDQSGTSFDKSSHTWVALSHIAGLCNRAVFKGGQDNIPVLKRDVAGDASESALLKCIELSSGSVKLMRERNKKVAEIPFNSTNKYQLSIHETEDPNDNRYLLVMKGAPERILDRCSTILLQGKEQPLDEEMKEAFQNAYLELGGLGERVLGFCHYYLPEEQFPKGFAFDCDDVNFTTDNLCFVGLMSMIDPPRAAVPDAVGKCRSAGIKVIMVTGDHPITAKAIAKGVGIISEGNETVEDIAARLNIPVSQVNPRDAKACVIHGTDLKDFTSEQIDEILQNHTEIVFARTSPQQKLIIVEGCQRQGAIVAVTGDGVNDSPALKKADIGVAMGIAGSDVSKQAADMILLDDNFASIVTGVEEGRLIFDNLKKSIAYTLTSNIPEITPFLLFIMANIPLPLGTITILCIDLGTDMVPAISLAYEAAESDIMKRQPRNPRTDKLVNERLISMAYGQIGMIQALGGFFSYFVILAENGFLPGNLVGIRLNWDDRTVNDLEDSYGQQWTYEQRKVVEFTCHTAFFVSIVVVQWADLIICKTRRNSVFQQGMKNKILIFGLFEETALAAFLSYCPGMDVALRMYPLKPSWWFCAFPYSFLIFVYDEIRKLILRRNPGGWVEKETYY

SEQ ID NO: 906067 - protein, 895 aa, Homo sapiens
HWGAHRWVESNPTVGFGFSYYQEAKSSKIMESFKNMVPQQALVIREGEKMQVNAEEVVVGDLVEIKGGDRVPADLRIISAHGCKVDNSSLTGESEPQTRSPDCTHDNPLETRNITFFSTNCVEGTARGVVVATGDRTVMGRIATLASGLEVGKTPIAIEIEHFIQLITGVAVFLGVSFFILSLILGYTWLEAVIFLIGIIVANVPEGLLATVTVCLTLTAKRMARKNCLVKNLEAVETLGSTSTICSDKTGTLTQNRMTVAHMWFDNQIHEADTTEDQSGTSFDKSSHTWVALSHIAGLCNRAVFKGGQDNIPVLKRDVAGDASESALLKCIELSSGSVKLMRERNKKVAEIPFNSTNKYQLSIHETEDPNDNRYLLVMKGAPERILDRCSTILLQGKEQPLDEEMKEAFQNAYLELGGLGERVLGFCHYYLPEEQFPKGFAFDCDDVNFTTDNLCFVGLMSMIDPPRAAVPDAVGKCRSAGIKVIMVTGDHPITAKAIAKGVGIISEGNETVEDIAARLNIPVSQVNPRDAKACVIHGTDLKDFTSEQIDEILQNHTEIVFARTSPQQKLIIVEGCQRQGAIVAVTGDGVNDSPALKKADIGVAMGIAGSDVSKQAADMILLDDNFASIVTGVEEGRLIFDNLKKSIAYTLTSNIPEITPFLLFIMANIPLPLGTITILCIDLGTDMVPAISLAYEAAESDIMKRQPRNPRTDKLVNERLISMAYGQIGMIQALGGFFSYFVILAENGFLPGNLVGIRLNWDDRTVNDLEDSYGQQWTYEQRKVVEFTCHTAFFVSIVVVQWADLIICKTRRNSVFQQGMKNKILIFGLFEETALAAFLSYCPGMDVALRMYPLKPSWWFCAFPYSFLIFVYDEIRKLILRRNPGGWVEKETYY

SEQ ID NO: 906068 - protein, 916 aa, Homo sapiens
MGDKKDDKDSPKKNKGKERRDLDDLKKEVAMTEHKMSVEEVCRKYNTDCVQGLTHSKAQEILARDGPNALTPPPTTPEWVKFCRQLFGGFSILLWIGAILCFLAYGIQAGTEDDPSGDNLYLGIVLAAVVIITGCFSYYQEAKSSKIMESFKNMVPQQALVIREGEKMQVNAEEVVVGDLVEIKGGDRVPADLRIISAHGCKVDNSSLTGESEPQTRSPDCTHDNPLETRNITFFSTNCVEGTARGVVVATGDRTVMGRIATLASGLEVGKTPIAIEIEHFIQLITGVAVFLGVSFFILSLILGYTWLEAVIFLIGIIVANVPEGLLATVTVCLTLTAKRMARKNCLVKNLEAVETLGSTSTICSDKTGTLTQNRMTVAHMWFDNQIHEADTTEDQSGTSFDKSSHTWVALSHIAGLCNRAVFKGGQDNIPVLKRDVAGDASESALLKCIELSSGSVKLMRERNKKVAEIPFNSTNKYQLSIHETEDPNDNRYLLVMKGAPERILDRCSTILLQGKEQPLDEEMKEAFQNAYLELGGLGERVLGFCHYYLPEEQFPKGFAFDCDDVNFTTDNLCFVGLMSMIDPPRAAVPDAVGKCRSAGIKVIMVTGDHPITAKAIAKGVGIISEGNETVEDIAARLNIPVSQVNPRDAKACVIHGTDLKDFTSEQIDEILQNHTEIVFARTSPQQKLIIVEGCQRQGAIVAVTGDGVNDSPALKKADIGVAMGIAGSDVSKQAADMILLDDNFASIVTGVEEGRLIFDNLKKSIAYTLTSNIPEITPFLLFIMANIPLPAQLVVLCLPLQFPHLRLRRNPQTHPAQEPRGLGGEGNLLLTSAPPHRPYFVFWGEEPSLPVAPPWPPPPPLSPAAPTLAGFSPLPQTSLLSLFCVSFSPSPHPSIHSSRPSHLPGLFFTPLQPPG

SEQ ID NO: 906069 - protein, 334 aa, Homo sapiens
MEEARHRLLIVSDAGGRLAAISDWGVGDGVNDSPALKKADIGVAMGIAGSDVSKQAADMILLDDNFASIVTGVEEGRLIFDNLKKSIAYTLTSNIPEITPFLLFIMANIPLPLGTITILCIDLGTDMVPAISLAYEAAESDIMKRQPRNPRTDKLVNERLISMAYGQIGMIQALGGFFSYFVILAENGFLPGNLVGIRLNWDDRTVNDLEDSYGQQWTYEQRKVVEFTCHTAFFVSIVVVQWADLIICKTRRNSVFQQGMKNKILIFGLFEETALAAFLSYCPGMDVALRMYPLKPSWWFCAFPYSFLIFVYDEIRKLILRRNPGGWVEKETYY

SEQ ID NO: 906070 - protein, 1107 aa, Homo sapiens
MGDKKDDKDSPKKNKGKERRDLDDLKKEVAMTEHKMSVEEVCRKYNTDCVQGLTHSKAQEILARDGPNALTPPPTTPEWVKFCRQLFGGFSILLWIGAILCFLAYGIQAGTEDDPSGDNLYLGIVLAAVVIITGCFSYYQEAKSSKIMESFKNMVPQQALVIREGEKMQVNAEEVVVGDLVEIKGGDRVPADLRIISAHGCKVDNSSLTGESEPQTRSPDCTHDNPLETRNITFFSTNCVEGTARGVVVATGDRTVMGRIATLASGLEVGKTPIAIEIEHFIQLITGVAVFLGVSFFILSLILGYTWLEAVIFLIGIIVANVPEGLLATVTVCLTLTAKRMARKNCLVKNLEAVETLGSTSTICSDKTGTLTQNRMTVAHMWFDNQIHEADTTEDQSGTSFDKSSHTWVALSHIAGLCNRAVFKGGQDNIPVLKRDVAGDASESALLKCIELSSGSVKLMRERNKKVAEIPFNSTNKYQLSIHETEDPNDNRYLLVMKGAPERILDRCSTILLQGKEQPLDEEMKEAFQNAYLELGGLGERVLGFCHYYLPEEQFPKGFAFDCDDVNFTTDNLCFVGLMSMIDPPRAAVPDAVGKCRSAGIKVIMVTGDHPITAKAIAKGVGIISEGNETVEDIAARLNIPVSQVNPRDAKACVIHGTDLKDFTSEQIDEILQNHTEIVFARTSPQQKLIIVEGCQRQGAIVAVTGDGVNDSPALKKADIGVAMGIAGSDVSKQAADMILLDDNFASIVTGVEEGRLIFDNLKKSIAYTLTSNIPEITPFLLFIMANIPLPLGTITILCIDLGTDMVPAISLAYEAAESDIMKRQPRNPRTDKLVNERLISMAYGQIGMIQALGGFFSYFVILAENGFLPGNLVGIRLNWDDRTVNDLEDSYGQQWTYEQRKVVEFTCHTAFFVSIVVVQWADLIICKTRRNSVFQQGMKNKILIFGLFEETALAAFLSYCPGMDVALRMYPLKPSWWFCAFPYSFLIFVYDEIRKLILRRNPGGEGARQGSRGGRGAAGSQAAGPRLPSPCWMALPPGSHSSLSSHLSGHPLCLLTGLCCVVSLSLSLSVPLSAGRLALPVSLHLLLCLFLSFFVSPGWVEKETYY

SEQ ID NO: 906071 - protein, 930 aa, Homo sapiens
MYDGVASLLMLCERGRCCTLAYGIQAGTEDDPSGDNLYLGIVLAAVVIITGCFSYYQEAKSSKIMESFKNMVPQQALVIREGEKMQVNAEEVVVGDLVEIKGGDRVPADLRIISAHGCKVDNSSLTGESEPQTRSPDCTHDNPLETRNITFFSTNCVEGTARGVVVATGDRTVMGRIATLASGLEVGKTPIAIEIEHFIQLITGVAVFLGVSFFILSLILGYTWLEAVIFLIGIIVANVPEGLLATVTVCLTLTAKRMARKNCLVKNLEAVETLGSTSTICSDKTGTLTQNRMTVAHMWFDNQIHEADTTEDQSGTSFDKSSHTWVALSHIAGLCNRAVFKGGQDNIPVLKRDVAGDASESALLKCIELSSGSVKLMRERNKKVAEIPFNSTNKYQLSIHETEDPNDNRYLLVMKGAPERILDRCSTILLQGKEQPLDEEMKEAFQNAYLELGGLGERVLGFCHYYLPEEQFPKGFAFDCDDVNFTTDNLCFVGLMSMIDPPRAAVPDAVGKCRSAGIKVIMVTGDHPITAKAIAKGVGIISEGNETVEDIAARLNIPVSQVNPRDAKACVIHGTDLKDFTSEQIDEILQNHTEIVFARTSPQQKLIIVEGCQRQGAIVAVTGDGVNDSPALKKADIGVAMGIAGSDVSKQAADMILLDDNFASIVTGVEEGRLIFDNLKKSIAYTLTSNIPEITPFLLFIMANIPLPLGTITILCIDLGTDMVPAISLAYEAAESDIMKRQPRNPRTDKLVNERLISMAYGQIGMIQALGGFFSYFVILAENGFLPGNLVGIRLNWDDRTVNDLEDSYGQQWTYEQRKVVEFTCHTAFFVSIVVVQWADLIICKTRRNSVFQQGMKNKILIFGLFEETALAAFLSYCPGMDVALRMYPLKPSWWFCAFPYSFLIFVYDEIRKLILRRNPGGWVEKETYY

SEQ ID NO: 906072 - protein, 427 aa, Homo sapiens
MGDKKDDKDSPKKNKGKERRDLDDLKKEVAMTEHKMSVEEVCRKYNTDCVQGLTHSKAQEILARDGPNALTPPPTTPEWVKFCRQLFGGFSILLWIGAILCFLAYGIQAGTEDDPSGDNLYLGIVLAAVVIITGCFSYYQEAKSSKIMESFKNMVPQQALVIREGEKMQVNAEEVVVGDLVEIKGGDRVPADLRIISAHGCKVDNSSLTGESEPQTRSPDCTHDNPLETRNITFFSTNCVEGTARGVVVATGDRTVMGRIATLASGLEVGKTPIAIEIEHFIQLITGVAVFLGVSFFILSLILGYTWLEAVIFLIGIIVANVPEGLLATVTVCLTLTAKRMARKNCLVKNLEAVETLGSTSTICSDKTGTLTQNRMTVAHMWFDNQIHEADTTEDQSGLIAEFWHLGACSIVGSERALHGAGHRGQG

SEQ ID NO: 906073 - protein, 1687 aa, Homo sapiens
MTSSSPAGLEGSDLSSINTMMSAVMSVGKVTENGGSPQGIKSPSKPPGPNRIGRRNQETKEEKSSYNCPLCEKICTTQHQLTMHIRQHNTDTGGADHSCSICGKSLSSASSLDRHMLVHSGERPYKCTVCGQSFTTNGNMHRHMKIHEKDPNSATATAPPSPLKLVGDMSSKRKLSHDAESEREDPAPAKKMVEDGQSGDLEKKADEVFHCPVCFKEFVCKYGLETHMETHSDNPLRCDICCVTFRTHRGLLRHNALVHKQLPRDAMGRPFIQNNPSIPAGFHDLGFTDFSCRKFPRISQAWCETNLRRCISEQHRFVCDTCDKAFPMLCSLALHKQTHVAADQGQEKPQATPLPGDALDQKGFLALLGLQHTKDVRPAPAEEPLPDDNQAIQLQTLKCQLPQDPGCTNLLSLSPFEAASLGGSLTVLPATKDSIKHLSLQPFQKGFIIQPDSSIVVKPISGESAIELADIQQILKMAASAPPQISLPPFSKAPAAPLQAIFKHMPPLKPKPLVTPRTVVATSTPPPLINAQQASPGCISPSLPPPPLKLLKGSVEAASNAHLLQSKSGTQPHAATRLSLQQPRAELPGQPEMKTQLEQDSIIEALLPLSMEAKIKQEITEGELKAFMTAPGGKKTPAMRKVLYPCRFCNQVFAFSGVLRAHVRSHLGISPYQCNICDYIAADKAALIRHLRTHSGERPYICKICHYPFTVKANCERHLRKKHLKATRKDIEKNIEYVSSSAAELVDAFCAPDTVCRLCGEDLKHYRALRIHMRTHCGRGLGGGHKGRKPFECKECSAAFAAKRNCIHHILKQHLHVPEQDIESYVLAADGLGPAEAPAAEASGRGEDSGCAALGDCKPLTAFLEPQNGFLHRGPTQPPPPHVSIKLEPASSFAVDFNEPLDFSQKGLALVQVKQENISFLSPSSLVPYDCSMEPIDLSIPKNFRKGDKDLATPSEAKKPEEEAGSSEQPSPCPAPGPSLPVTLGPSGILESPMAPAPAATPEPPAQPLQGPVQLAVPIYSSALVSSPPLVGSSALLSGTALLRPLRPKPPLLLPKPPVTEELPPLASIAQIISSVSSAPTLLKTKVADPGPASTGSNTTASDSLGGSVPKAATTATPAATTSPKESSEPPAPASSPEAASPTEQGPAGTSKKRGRKRGMRSRPRANSGGVDLDSSGEFASIEKMLATTDTNKFSPFLQTAEDNTQDEVAGAPADHHGPSDEEQGSPPEDKLLRAKRNSYTNCLQKITCPHCPRVFPWASSLQRHMLTHTDSQSDAETAAAAGEVLDLTSRDREQPSEGATELRQVAGDAPVEQATAETASPVHREEHGRGESHEPEEEHGTEESTGDADGGRGRVEQPEPGPGLRHQAHGLQAGGGRRRGRPGGAASQEQKLACDTCGKSFKFLGTLSRHRKAHGRQEPKDEKGDGASTAEEGPQPAPEQEEKPPETPAEVVESAPGAGEAPAEKLAEETEGPSDGESAAEKRSSEKSDDDKKPKTDSPKSVASKADKRKKVCSVCNKRFWSLQDLTRHMRSHTGERPYKCQTCERTFTLKHSLVRHQRIHQKARHAKHHGKDSDKEERGEEDSENESTHSGNNAVSENEAELAPNASNHMAVTRSRKEGLASATKDCSHREEKVTAGWPSEPGQGDLNPESPAALGQDLLEPRSKRPAHPILATADGASQLVGME

SEQ ID NO: 906074 - protein, 1687 aa, Homo sapiens; identical to SEQ ID NO: 906073

SEQ ID NO: 906075 - protein, 1687 aa, Homo sapiens; identical to SEQ ID NO: 906073

SEQ ID NO: 906076 - protein, 1687 aa, Homo sapiens; identical to SEQ ID NO: 906073

SEQ ID NO: 906077 - protein, 1742 aa, Homo sapiens
MTSSSPAGLEGSDLSSINTMMSAVMSVGKVTENGGSPQGIKSPSKPPGPNRIGRRNQETKEEKSSYNCPLCEKICTTQHQLTMHIRQHNTDTGGADHSCSICGKSLSSASSLDRHMLVHSGERPYKCTVCGQSFTTNGNMHRHMKIHEKDPNSATATAPPSPLKLVGDMSSKRKLSHDAESEREDPAPAKKMVEDGQSGDLEKKADEVFHCPVCFKEFVCKYGLETHMETHSDNPLRCDICCVTFRTHRGLLRHNALVHKQLPRDAMGRPFIQNNPSIPAGFHDLGFTDFSCRKFPRISQAWCETNLRRCISEQHRFVCDTCDKAFPMLCSLALHKQTHVAADQGQEKPQATPLPGDALDQKGFLALLGLQHTKDVRPAPAEEPLPDDNQAIQLQTLKCQLPQDPGCTNLLSLSPFEAASLGGSLTVLPATKDSIKHLSLQPFQKGFIIQPDSSIVVKPISGESAIELADIQQILKMAASAPPQISLPPFSKAPAAPLQAIFKHMPPLKPKPLVTPRTVVATSTPPPLINAQQASPGCISPSLPPPPLKLLKGSVEAASNAHLLQSKSGTQPHAATRLSLQQPRAELPGQPEMKTQLEQDSIIEALLPLSMEAKIKQEITEGELKAFMTAPGGKKTPAMRKVLYPCRFCNQVFAFSGVLRAHVRSHLGISPYQCNICDYIAADKAALIRHLRTHSGERPYICKICHYPFTVKANCERHLRKKHLKATRKDIEKNIEYVSSSAAELVDAFCAPDTVCRLCGEDLKHYRALRIHMRTHCGRGLGGGHKGRKPFECKECSAAFAAKRNCIHHILKQHLHVPEQDIESYVLAADGLGPAEAPAAEASGRGEDSGCAALGDCKPLTAFLEPQNGFLHRGPTQPPPPHVSIKLEPASSFAVDFNEPLDFSQKGLALVQVKQENISFLSPSSLVPYDCSMEPIDLSIPKNFRKGDKDLATPSEAKKPEEEAGSSEQPSPCPAPGPSLPVTLGPSGILESPMAPAPAATPEPPAQPLQGPVQLAVPIYSSALVSSPPLVGSSALLSGTALLRPLRPKPPLLLPKPPVTEELPPLASIAQIISSVSSAPTLLKTKVADPGPASTGSNTTASDSLGGSVPKAATTATPAATTSPKESSEPPAPASSPEAASPTEQGPAGTSKKRGRKRGMRSRPRANSGGVDLDSSGEFASIEKMLATTDTNKFSPFLQTAEDNTQDEVAGAPADHHGPSDEEQGSPPEDKLLRAKRNSYTNCLQKITCPHCPRVFPWASSLQRHMLTHTGQKPFPCQKCDAFFSTKSNCERHQLRKHGVTTCSLRRNGLIPQSKESDVGSHDSTDSQSDAETAAAAGEVLDLTSRDREQPSEGATELRQVAGDAPVEQATAETASPVHREEHGRGESHEPEEEHGTEESTGDADGGRGRVEQPEPGPGLRHQAHGLQAGGGRRRGRPGGAASQEQKLACDTCGKSFKFLGTLSRHRKAHGRQEPKDEKGDGASTAEEGPQPAPEQEEKPPETPAEVVESAPGAGEAPAEKLAEETEGPSDGESAAEKRSSEKSDDDKKPKTDSPKSVASKADKRKKVCSVCNKRFWSLQDLTRHMRSHTGERPYKCQTCERTFTLKHSLVRHQRIHQKARHAKHHGKDSDKEERGEEDSENESTHSGNNAVSENEAELAPNASNHMAVTRSRKEGLASATKDCSHREEKVTAGWPSEPGQGDLNPESPAALGQDLLEPRSKRPAHPILATADGASQLVGME

SEQ ID NO: 906078 - protein, 435 aa, Homo sapiens
MGVPGGAPLSPPRCACPTDSQSDAETAAAAGEVLDLTSRDREQPSEGATELRQVAGDAPVEQATAETASPVHREEHGRGESHEPEEEHGTEESTGDADGGRGRVEQPEPGPGLRHQAHGLQAGGGRRRGRPGGAASQEQKLACDTCGKSFKFLGTLSRHRKAHGRQEPKDEKGDGASTAEEGPQPAPEQEEKPPETPAEVVESAPGAGEAPAEKLAEETEGPSDGESAAEKRSSEKSDDDKKPKTDSPKSVASKADKRKKVCSVCNKRFWSLQDLTRHMRSHTGERPYKCQTCERTFTLKHSLVRHQRIHQKARHAKHHGKDSDKEERGEEDSENESTHSGNNAVSENEAELAPNASNHMAVTRSRKEGLASATKDCSHREEKVTAGWPSEPGQGDLNPESPAALGQDLLEPRSKRPAHPILATADGASQLVGME

SEQ ID NO: 906079 - protein, 1392 aa, Homo sapiens
MTSSSPAGLEGSDLSSINTMMSAVMSVGKVTENGGSPQGIKSPSKPPGPNRIGRRNQETKEEKSSYNCPLCEKICTTQHQLTMHIRQHNTDTGGADHSCSICGKSLSSASSLDRHMLVHSGERPYKCTVCGQSFTTNGNMHRHMKIHEKDPNSATATAPPSPLKLVGDMSSKRKLSHDAESEREDPAPAKKMVEDGQSGDLEKKADEVFHCPVCFKEFVCKYGLETHMETHSDNPLRCDICCVTFRTHRGLLRHNALVHKQLPRDAMGRPFIQNNPSIPAGFHDLGFTDFSCRKFPRISQAWCETNLRRCISEQHRFVCDTCDKAFPMLCSLALHKQTHVAADQGQEKPQATPLPGDALDQKGFLALLGLQHTKDVRPAPAEEPLPDDNQAIQLQTLKCQLPQDPGCTNLLSLSPFEAASLGGSLTVLPATKDSIKHLSLQPFQKGFIIQPDSSIVVKPISGESAIELADIQQILKMAASAPPQISLPPFSKAPAAPLQAIFKHMPPLKPKPLVTPRTVVATSTPPPLINAQQASPGCISPSLPPPPLKLLKGSVEAASNAHLLQSKSGTQPHAATRLSLQQPRAELPGQPEMKTQLEQDSIIEALLPLSMEAKIKQEITEGELKAFMTAPGGKKTPAMRKVLYPCRFCNQVFAFSGVLRAHVRSHLGISPYQCNICDYIAADKAALIRHLRTHSGERPYICKICHYPFTVKANCERHLRKKHLKATRKDIEKNIEYVSSSAAELVDAFCAPDTVCRLCGEDLKHYRALRIHMRTHCGRGLGGGHKGRKPFECKECSAAFAAKRNCIHHILKQHLHVPEQDIESYVLAADGLGPAEAPAAEASGRGEDSGCAALGDCKPLTAFLEPQNGFLHRGPTQPPPPHVSIKLEPASSFAVDFNEPLDFSQKGLALVQVKQENISFLSPSSLVPYDCSMEPIDLSIPKNFRKGDKDLATPSEAKKPEEEAGSSEQPSPCPAPGPSLPVTLGPSGILESPMAPAPAATPEPPAQPLQGPVQLAVPIYSSALVSSPPLVGSSALLSGTALLRPLRPKPPLLLPKPPVTEELPPLASIAQIISSVSSAPTLLKTKVADPGPASTGSNTTASDSLGGSVPKAATTATPAATTSPKESSEPPAPASSPEAASPTEQGPAGTSKKRGRKRGMRSRPRANSGGVDLDSSGEFASIEKMLATTDTNKFSPFLQTAEDNTQDEVAGAPADHHGPSDEEQGSPPEDKLLRAKRNSYTNCLQKITCPHCPRVFPWASSLQRHMLTHTGKRATGLPGSESYFLVGGATSGGQKRDPSPTVPVIPSLASSPVSEAPSLSGGAVFPMCSQYPHGLCAGAEPSKGSILLSVHPGRFEVKVVTGPQITHGVASSLPEVVARLSAGLNREAAPQT

SEQ ID NO: 906080 - protein, 96 aa, Homo sapiens
EAGRGAETGAGTTAGAPGSPAPRPPPSLWEKRRRGSDCGVDELCTSRNAILIPFPEQVCISPRSLPEAHRSPTHHAREPSVLPGRCSDCVFQEWWL

SEQ ID NO: 906081 - protein, 1687 aa, Homo sapiens; identical to SEQ ID NO: 906073

SEQ ID NO: 906082 - protein, 1687 aa, Homo sapiens; identical to SEQ ID NO: 906073

SEQ ID NO: 906083 - protein, 1687 aa, Homo sapiens; identical to SEQ ID NO: 906073

SEQ ID NO: 906084 - protein, 1687 aa, Homo sapiens; identical to SEQ ID NO: 906073

SEQ ID NO: 906085 - protein, 56 aa, Homo sapiens
MLCSLALHKQTHVAADQGQEKPQATPLPGDALDQKGFLALLGLQHTKDVRPAPAEE

SEQ ID NO: 906086 - protein, 361 aa, Homo sapiens [sequence omitted]

SEQ ID NO: 906087 - protein, 361 aa, Homo sapiens [sequence omitted]

SEQ ID NO: 906088 - protein, 251 aa, Homo sapiens
MDIQMANNFTPPSATPQGNDCDLYAHHSTARIVMPLHYSLVFIIGLVGNLLALVVIVQNRKKINSTTLYSTNLVISDILFTTALPTRIAYYAMGFDWRIGDALCRITALVFYINTYAGVNFMTCLSIDRFIAVVHPLRYNKIKRIEHAKGVCIFVWILVFAQTLPLLINPMSKQEAERITCMEYPNFEETKSLPWILLGACFIGYVLPLIIILICYSQICCKLFRTAKQNPRHHQYERHRLPSDTFYARTL

SEQ ID NO: 906089 - protein, 185 aa, Homo sapiens
WGSNQQDKRALATAARGGHGVLSGSGGGGRCCESGGGGAGRQREGARPSGGGVGAENMAGGKAGKDSGKAKAKAVSRSQRAGLQFPVGRIHRHLKTRTTSHGRVGATAAVYSAAILEYLTAEVLELAGNASKDLKVKRITPRHLQLAIRGDEELDSLIKATIAGGGVIPHIHKSLIGKKGQQKTA

SEQ ID NO: 906090 - protein, 638 aa, Homo sapiens
MYLKDSFFMFYFIFIFSDKVLLCRPGWHAVAQSQLTATSTSQVQGFFCLSLLSSWHYRCLPPCLAECLFVLLFLFLRQDLTLLPRLESNSLILAHCNLSLPGNWDYRHAPPCPANLCVFFVCLFICVVEMGFHHVGQAGLKLLTSSDPPASASQSAGITGMSHCAWRRKYFLELKTTPSLTSITPKKLSDLYFEIVRHSEMQWHLSREKKDFSFSFFKKKVLEPELGLVCIWEESSGENNTNKVLRMKNCIYIGSCNKWPGEYLTLYETFNEKCDLLWCLWLNLLRCFWHYENFQTCKKVPVVIQEFLYSPPISIVNILLVFYPVISSSMRWPLFICLLFLFSICPVISCERREGVLRSEDAIVLGDGKVLLIYVEQDSTGMCAELNQGTARSAEQGHLLLRYVNSILSKILDLLQSSFDLKYISEPFPCMSNFLNVKIFYLCLTFWINCVAAVLVHTTILSEDLVSLRISRHWKEREPGSERVIVSVHFSGFVFIGSPEWGNLKVLTVEDHPIPIPSKNRPFHNLLPVNLAFFFVFSLIESHSCHPDWSAMARSWLTATLPPGFQRFSCLSLPSSWDYRRTPPCPANFCIFSRRGVSPCWPDWSQTPDLRRSARLSLPKCWDYWQEPPGPANQHFLR

SEQ ID NO: 906091 - protein, 128 aa, Homo sapiens
MAGGKAGKDSGKAKAKAVSRSQRAGLQFPVGRIHRHLKTRTTSHGRVGATAAVYSAAILEYLTAEVLELAGNASKDLKVKRITPRHLQLAIRGDEELDSLIKATIAGGGVIPHIHKSLIGKKGQQKTA

SEQ ID NO: 906092 - protein, 869 aa, Homo sapiens
MAHNGSHLVTLRLIVGLDAASPLHSLQKFSISFSPDGFSHHYMIFAHIWDSIRGCQPVISCHSFCIYKLESYKELVLINSRGRMKIEISNSDCIGAHFEVSVLRVRPTVKVAIESCLFEKKEAGGGVQYNQQTFLWLNHLIQGNFYYSFIDNCFKCLIHFDSIVTDYIISSQGCIFNLFSNKKHRNRTTRSCTLGLALTVMISLVSFVPNPLSYFKARSSYAYHFMYNILIRIYKIAFLCFILFLFFQTKYYSVAQAGMQWHNLSSLQPPPPRFKCFFCLSLLSSWHYRCLPPCLAECLFVLLFLFLRQDLTLLPRLESNSLILAHCNLSLPGNWDYRHAPPCPANLCVFFVCLFICVVEMGFHHVGQAGLKLLTSSDPPASASQSAGITGMSHCAWRRKYFLELKTTPSLTSITPKKLSDLYFEIVRHSEMQWHLSREKKDFSFSFFKKKVLEPELGLVCIWEESSGENNTNKVLRMKNCIYIGSCNKWPGEYLTLYETFNEKCDLLWCLWLNLLDASDIMKIFKHAKKFQYLSSEFLYSPPISIVNILLVFYPVISSSMRWPLFICLLFLFSICPVISCERREGVLRSEDAIVLGDGKVLLIYVEQDSTGMCAELNQGTARSAEQGHLLLRYVNSILSKILDLLQSSFDLKYISEPFPCMSNFLNVKIFYLCLTFWINCVAAVLVHTTILSEDLVSLRISRHWKEREPGSERVIVSVHFSGFVFIGSPEWGNLKVLTVEDHPIPIPSKNRPFHNLLPVNLAFFFVFSLIESHSCHPDWSAMARSWLTATLPPGFQRFSCLSLPSSWDYRRTPPCPANFCIFSRRGVSPCWPDWSQTPDLRRSARLSLPKCWDYWQEPPGPANQHFLR

SEQ ID NO: 906093 - protein, 915 aa, Homo sapiens
MYTFSVPYMFYKLTDLEGFCCSVLLFHKNEFIGDICSMLYHIMAHNGSHLVTLRLIVGLDAASPLHSLQKFSISFSPDGFSHHYMIFAHIWDSIRGCQPVISCHSFCIYKLESYKELVLINSRGRMKIEISNSDGIGAHFEVSVLRVRPTVKVAIESCLFEKKEAGGGVQYNQQTFLWLNHLIQGNFYYSFIDNCFKCLIHFDSIDYLTTIISSQGCIFNLFSNKKHRNRTTRSCTLGLALTVMISLVSFVPNPLSYFKARSSYAYHFMYNILIRIYKDSFFMFYFIFIFSDKVLLCRPGWHAVAQSQLTATSTSQVQVILLPQPPEYAGITGACHHAWLMFVCSFVFVSETGISLCCLGWSPIAYILAHCNLSLPGNWDYRHAPPCPANLCVFFVCLFICVVEMGFHHVGQAGLKLLTSSDPPASASQSAGITGMSHCAWRRKYFLYLKTTPSLTSITPKKLSDLYFEIVRHSEMQWHLSREKKDFSFSFFKKKVLEPELGLVCIWEESSGETTQMKVLRMKNCIYIGSCNKWPGEYLTLYETFNEKCDLLWCLWLNLLRCFWHYENFQDMQKSSSSYPVNSYTHHLISIVNILLVFYPVISSSMRWPLFICLLFLFSICPVISCYRREGVLRSEDAIVLGDGKVLLIYVEQDSTGMCAELNQRNCPNVLEQGHLLLRYVNSILSKILDLLQSSFDLKYISEPFPCMSNFLNVSNILFMFDLLDKLCCCSVVHTTILSEDLVSLRISRHWKEREPGSERVIVSVHFSGFVFIGSPEWGNLKVLTVEDHPIPIPSKNRPFHNLLPVNFSFFFFFSLIESHSCHPDWSAMARSWLTATLPPGFQRFSCLSLPSSWDYRRTPPCPANFCIFSRRGVSPCWPDWSQTPDLRRSARLSLPKCWDYWQEPPGPANQHFLR

SEQ ID NO: 906094 - protein, 185 aa, Homo sapiens; identical to SEQ ID NO: 906089

SEQ ID NO: 906095 - protein, 185 aa, Homo sapiens; identical to SEQ ID NO: 906089

SEQ ID NO: 906096 - protein, 185 aa, Homo sapiens; identical to SEQ ID NO: 906089

SEQ ID NO: 906097 - protein, 171 aa, Homo sapiens
WGSNQQDKRALATAARGGHGVLSGSGGGGRCCESGGGGAGRQREGARPSGGGVGAENMAGGKAGKDSGKAKAKAVSRSQRAGLQFPVGRIHRHLKTRTTSHGRVGATAAVYSAAILEYLTAEVLELAGNASKDLKVKRITPRHLQLAIRGDEELDSLIKATIAGGEKRRCS

SEQ ID NO: 906098 - protein, 185 aa, Homo sapiens; identical to SEQ ID NO: 906089

SEQ ID NO: 906099 - protein, 179 aa, Homo sapiens
WGSNQQDKRALATAARGGHGVLSGSGGGGRCCESGGGGAGRQREGARPSGGGVGAENMAGGKAGKDSGKAKAKAVSRSQRAGLQFPVGRIHRHLKTRTTSHGRVGATAAVYSAAILEYLTAEVLELAGNASKDLKVKRITPRHLQLAIRGDEELDSLIKATIAGGGMYYYLSLDSYWSF

SEQ ID NO: 906100 - protein, 71 aa, Homo sapiens
VWVSVRFKTCTWSENKKASLIRAVGEQRDTLLGDAGNLQLGPNGTRFFGNSPVWTYYVLLKIKLLICKLCN

SEQ ID NO: 906101 - protein, 873 aa, Homo sapiens
MLYHIMAHNGSHLVTLRLIVGLDAASPLHSLQKFSISFSPDGFSHHYMIFAHIWDSIRGCQPVISCHSFCIYKLESYKELVLINSRGRMKIEISNSDGIGAHFEVSVLRVRPTVKVAIESCLFEKKEAGGGVQYNQQTFLWLNHLIQGNFYYSFIDNCFKCLIHFDSIVLDYIISSQGCIFNLFSNKKHRNRTTRSCTLGLALTVMISLVSFVPNPLSYFKARSSYHITSCIIFNTYLKDSFFMFYFIFIFSDKVLLCRPGWHAVAQSQLTATSTSQVQGFFCLSLLSSWHYRCLPPCLAECLFVLLFLFLRQDLTLLPRLESNSLILAHCNLSLPGNWDYRHAPPCPANLCVFFVCLFICVVEMGFHHVGQAGLKLLTSSDPPASASQSAGITGMSHCAWRRKYFLELKTTPSLTSITPKKLSDLYFEIVRHSEMQWHLSREKKDFSFSFFKKKVLEPELGLVCIWEESSGENNTNKVLRMKNCIYIGSCNKWPGEYLTLYETFNEKCDLLWCLWLNLLRCFWHYENFQTCKKVPVVIQEFLYSPPISIVNILLVFYPVISSSMRWPLFICLLFLFSICPVISCERREGVLRSEDAIVLGDGKVLLIYVEQDSTGMCAELNQGTARSAEQGHLLLRYVNSILSKILDLLQSSFDLKYISEPFPCMSNFLNVKIFYLCLTFWINCVAAVLVHTTILSEDLVSLRISRHWKEREPGSERVIVSVHFSGFVFIGSPEWGNLKVLTVEDHPIPIPSKNRPFHNLLPVNLAFFVFFSLIESHSCHPDWSAMARSWLTATLPPGFQRFSCLSLPSSWDYRRTPPCPANFCIFSRRGVSPCWPDWSQTPDLRRSARLSLPKCWDYWQEPPGPANQHFLR

SEQ ID NO: 906102 - protein, 869 aa, Homo sapiens
MAHNGSHLVTLRLIVGLDAASPLHSLQKFSISFSPDGFSHHYMIFAHIWDSIRGCQPVISCHSFCIYKLESYKELVLINSRGRIKEKFQILIEYGAHFEVSVLRVRPTVKVAIESCLFEKKEAGGGVQYNQQTFLWLNHLIQGNFYYSFIDNCFKCLIHFDSIVTDYIISSQGCIFNLFSNKKHRNRTTRSCTLGLALTVMISLVSFVPNPLSYFKARSSYAYHFMYNILIRIYKIAFLCFILFLFFQTKYYSVAQAGMQWHNLSSLQPPPPRFKGFFCLSLLSSWHYRCLPPCLAECLFVLLFLFLRQDLTLLPRLESNSLILAHCNLSLPGNWDYRHAPPCPANLCVFFVCLFICVVEMGFHHVGQAGLKLLTSSDPPASASQSAGITGMSHCAWRRKYFLELKTTPSLTSITPKKLSDLYFEIVRHSEMQWHLSREKKDFSFSFFKKKVLEPELGLVCIWEESSGENNTNKVLRMKNCIYIGSCNKWPGEYLTLYETFNEKCDLLWCLWLNLLRCFYIMKIFKHAKKFQELSSEFLYSPPISIVNILLVFYPVISSSMRWPLFICLLFLFSICPVISCERREGVLRSEDAIVLGDGKVLLIYVEQDSTGMCAELNKELPECAEQGHLLLRYVNSILSKILDLLQSSFDLKYISEPFPCMSNFLNVKIFYLCLTFWINCVAAVLVHTTILSEDLVSLRISRHWKEREPGSERVIVSVHFSGFVFIGSPEWGNLKVLTVEDHPIPIPSKNRPFHNLLPVNLAFFFVFSLIESHSCHPDWSAMARSWLTATLPPGFQRFSCLSLPSSWDYRRTPPCPANFCIFSRRGVSPCWPDWSQTPDLRRSARLSLPKCWDYWQEPPGPANQHFLR

SEQ ID NO: 906103 - protein, 913 aa, Homo sapiens
MYTFSVPYMFYKLTDLEGFCCSVLLFHKNEFIGDICSMLYHIMAHNGSHLVTLRLIVGLDAASPLHSLQKFSISFSPDGFSHHYMIFAHIWDSIRGCQPVISCHSFCIYKLESYKELVLINSRGRIKYKFQILIEYGAHFEVSVLRVRPTVKVAIESCLFEKKEAGGGVQYNQQTFLWLNHLIQGNFYYSFIDNCFKCLIHFDSIVTDYIISSQGCIFNLFSNKKHRNRTTRSCTLGLALTVMISLVSFVPNPLSYFKARSSYAYHFMYNILIRIYKIAFLCFILFLFFQTKYYSVAQAGMQWHNLSSLQPPPPRFKGFFCLSLLSSWHYRCLPPCLAECLFVLLFLFLRQDLTLLPRLESNSLILAHCNLSLPGNWDYRHAPPCPANLCVFFVCLFICVVEMGFHHVGQAGLKLLTSSDPPASASQSAGITGMSHCAWRRKYFLELKTTPSLTSITPKKLSDLYFEIVRHSEMQWHLSREKKDFSFSFFKKKVLEPELGLVCIWEESSGENNTNKVLRMKNCIYIGSCNKWPGEYLTLYETFNEKCDLLLVPMVEFVAMLLDIMKIFKHAKKFQYLSSEFLYSPPISIVNILLVFYPVISSSMRWPLFICLLFLFSICPVISCERREGVLRSEDAIVLGDGKVLLIYVEQDSTGMCAELNQGDCPNVLEQGHLLLRYVNSILSKILDLLQSSFDLKYISEPFPCMSNFLNVSNILFMFDLLDKLCCCSVVHTTILSEDLVSLRISRHWKEREPGSERVIVSVHFSGFVFIGSPEWGNLKVLTVEDHPIPIPSKNRPFHNLLPVNLAFFVFFSLIESHSCHPDWSAMARSWLTATLPPGFQRFSCLSLPSSWDYRRTPPCPANFCIFSRRGVSPCWPDWSQTPDLRRSARLSLPKCWDYWQEPPGPANQHFLR

SEQ ID NO: 906104 - protein, 911 aa, Homo sapiens
MYTFSVPYMFYKLTDLEGFCCSVLLFHKNEFIGDICSMLYHIMAHNGSHLVTLRLIVGLDAASPLHSLQKFSISFSPDGFSHHYMIFAHIWDSIRGCQPVISCHSFCIYKLESYKELVLINSRGRMKIEISNSDGIGAHFEVSVLRVRPTVKVAIESCLFEKKEAGGGVQYNQQTFLWLNHLIQGNFYYSFIDNCFKCLIHFDSIVTDYIISSQGCIFNLFSNKKHRNRTTRSCTLGLALTVMISLVSFVPNPLSYFKARSSYHITSCIIFNTYLKDSFFMFYFIFIFSDKVLLCRPGWHAVAQSQLTATSTSQVQGFFCLSLLSSWHYRCLPPCLAECLFVLLFLFLRQDLTLLPRLESNSLILAHCNLSLPGNWDYRHAPPCPANLCVFFVCLFICVVEMGFHHVGQAGLKLLTSSDPPASASQSAGITGMSHCAWRRKYFLELKTTPSLTSITPKKLSDLYFEIVRHSEMQWHLSREKKDFSFSFFKKKVLEPELGLVCIWEESSGENNTNKVLRMKNCIYIGSCNKWPGEYLTLYETFNEKCDLLLVPMVEFVAMLLTLLKFSNMQKSSSSYPVNSYTHHLISIVNILLVFYPVISSSMRWPLFICLLFLFSICPVISCERREGVLRSEDAIVLGDGKVLLIYVEQDSTGMCAELNQGTARSAEQGHLLLRYVNSILSKILDLLQSSFDLKYISEPFPCMSNFLNVKIFYLCLTFWINCVAAVLVHTTILSEDLVSLRISRHWKEREPGSERVIVSVHFSGFVFIGSPEWGNLKVLTVEDHPIPIPSKNRPFHNLLPVNLAFFFVFSLIESHSCHPDWSAMARSWLTATLPPGFQRFSCLSLPSSWDYRRTPPCPANFCIFSRRGVSPCWPDWSQTPDLRRSARLSLPKCWDYWQEPPGPANQHFLR

SEQ ID NO: 906105 - protein, 185 aa, Homo sapiens; identical to SEQ ID NO: 906089

SEQ ID NO: 906106 - protein, 159 aa, Homo sapiens
WGSNQQDKRALATAARGGHGVLSGSGGGGRCCESGGGGAGRQREGARPSGGGVGAENMFPVGRIHRHLKTRTTSHGRVGATAAVYSAAILEYLTAEVLELAGNASKDLKVKRITPRHLQLAIRGDEELDSLIKATIAGGGVIPHIHKSLIGKKGQQKTA

SEQ ID NO: 906107 - protein, 128 aa, Homo sapiens; identical to SEQ ID NO: 906091

SEQ ID NO: 906108 - protein, 128 aa, Homo sapiens; identical to SEQ ID NO: 906091

SEQ ID NO: 906109 - protein, 412 aa, Homo sapiens
GRGGGGESERGNCRGGSCAAARAARHPRRLCARAAPPAPPPQRAPGRSSAPRSSAMARENGESSSSWKKQAEDIKKIFEFKETLGTGAFSEVVLAEEKATGKLFAVKCIPKKALKGKESSIENEIAVLRKIKHENIVALEDIYESPNHLYLVMQLVSGGELFDRIVEKGFYTEKDASTLIRQVLDAVYYLHRMGIVHRDLKPENLLYYSQDEESKIMISDFGLSKMEGKGDVMSTACGTPGYVAPEVLAQKPYSKAVDCWSIGVIAYILLCGYPPFYDENDSKLFEQILKAEYEFDSPYWDDISDSAKDFIRNLMEKDPNKRYTCEQAARHPWIAGDTALNKNIHESVSAQIRKNFAKSKWRQAFNATAVVRHMRKLHLGSSLDSSNASVSSSLSLASQKDCAYVAKPESLS

SEQ ID NO: 906110 - protein, 111 aa, Homo sapiens
GRGGGGESERGNCRGGSCAAARAARHPRRLCARAAPPAPPPQRAPGRSSAPRSSAMARENGESSSSWKKQAEDIKKIFEFKETLGTIKHENIVALEDIYESPNHLYLVMQL

SEQ ID NO: 906111 - protein, 365 aa, Homo sapiens
ADEFDDFGHLLGAFSEVVLAEEKATGKLFAVKCIPKKALKGKESSIENEIAVLRKIKHENIVALEDIYESPNHLYLVMQLVSGGELFDRIVEKGFYTEKDASTLIRQVLDAVYYLHRMGIVHRDLKPENLLYYSQDEESKIMISDFGLSKMEGKGDVMSTACGTPGYVAPEVLAQKPYSKAVDCWSIGVIAYILLCGYPPFYDENDSKLFEQILKAEYEFDSPYWDDISDSAKDFIRNLMEKDPNKRYTCEQAARHPWIAGDTALNKNIHESVSAQIRKNFAKSKWRQAFNATAVVRHMRKLHLGSSLDSSNASVSSSLSLASQKDCLAPSTLCSFISSSSGVSGVGAERRPRPTTVTAVHSGSK

SEQ ID NO: 906112 - protein, 440 aa, Homo sapiens
GRGGGGESERGNCRGGSCAAARAARHPRRLCARAAPPAPPPQRAPGRSSAPRSSAMARENGESSSSWKKQAEDIKKIFEFKETLGTGAFSEVVLAEEKATGKLFAVKCIPKKALKGKESSIENEIAVLRKIKHENIVALEDIYESPNHLYLVMQLVSGGELFDRIVEKGFYTEKDASTLIRQVLDAVYYLHRMGIVHRDLKPENLLYYSQDEESKIMISDFGLSKMEGKGDVMSTACGTPGYVAPEVLAQKPYSKAVDCWSIGVIAYILLCGYPPFYDENDSKLFEQILKAEYEFDSPYWDDISDSAKDFIRNLMEKDPNKRYTCEQAARHPWIAGDTALNKNIHESVSAQIRKNFAKSKWRQAFNATAVVRHMRKLHLGSSLDSSNASVSSSLSLASQKDCLAPSTLCSFISSSSGVSGVGAERRPRPTTVTAVHSGSK

SEQ ID NO: 906113 - protein, 310 aa, Homo sapiens
GGCPRHWDGCSVARRQGGDRPPGAESAMLMKRCEKMDSWIGSSWGPTVPGTSAPTEMQMSPVLVTLPGNLAPPGWCCYSQDEESKIMISDFGLSKMEGKGDVMSTACGTPGYVAPEVLAQKPYSKAVDCWSIGVIAYILLCGYPPFYDENDSKLFEQILKAEYEFDSPYWDDISDSAKDFIRNLMEKDPNKRYTCEQAARHPWIAGDTALNKNIHESVSAQIRKNFAKSKWRQAFNATAVVRHMRKLHLGSSLDSSNASVSSSLSLASQKDCLAPSTLCSFISSSSGVSGVGAERRPRPTTVTAVHSGSK

SEQ ID NO: 906114 - protein, 503 aa, Homo sapiens
MEAAVAAPRPRLLLLVLAAAAAAAAALLPGATALQCFCHLCTKDNFTCVTDGLCFVSVTETTDKVIHNSMCIAEIDLIPRDRPFVCAPSSKTGSVTTTYCCNQDHCNKIELPTTVKSSPGLGPVELAAVIAGPVCFVCISLMLMVYICHNRTVIHHRVPNEEDPSLDRPFISEGTTLKDLIYDMTTSGSGSGLPLLVQRTIARTIVLQESIGKGRFGEVWRGKWRGEEVAVKIFSSREERSWFREAEIYQTVMLRHENILGFIAADNKDNGTWTQLWLVSDYHEHGSLFDYLNRYTVTVEGMIKLALSTASGLAHLHMEIVGTQGKPAIAHRDLKSKNILVKKNGTCCIADLGLAVRHDSATDTIDIAPNHRVGTKRYMAPEVLDDSINMKHFESFKRADIYAMGLVFWEIARRCSIGGIHEDYQLPYYDLVPSDPSVEEMRKVVCEQKLRPNIPNRWQSCEALRVMAKIMRECWYANGAARLTALRIKKTLSQLSQQEGIKM

SEQ ID NO: 906115 - protein, 503 aa, Homo sapiens; identical to SEQ ID NO: 906114

SEQ ID NO: 906116 - protein, 503 aa, Homo sapiens; identical to SEQ ID NO: 906114

SEQ ID NO: 906117 - protein, 503 aa, Homo sapiens; identical to SEQ ID NO: 906114

SEQ ID NO: 906118 - protein, 503 aa, Homo sapiens; identical to SEQ ID NO: 906114

SEQ ID NO: 906119 - protein, 200 aa, Homo sapiens
MEAAVAAPRPRLLLLVLAAAAAAAAALLPGATALQCFCHLCTKDNFTCVTDGLCFVSVTETTDKVIHNSMCIAEIDLIPRDRPFVCAPSSKTGSVTTTYCCNQDHCNKIELPTTVKSSPGLGPVELAAVIAGPVCFVCISLMLMVYICHNRTVIHHRVPNEEDPSLDRPFISEGTTLKDLIYDMTTSGSGSGNIIVSPFS

SEQ ID NO: 906120 - protein, 503 aa, Homo sapiens; identical to SEQ ID NO: 906114

SEQ ID NO: 906121 - protein, 503 aa, Homo sapiens; identical to SEQ ID NO: 906114

SEQ ID NO: 906122 - protein, 503 aa, Homo sapiens; identical to SEQ ID NO: 906114

SEQ ID NO: 906123 - protein, 503 aa, Homo sapiens; identical to SEQ ID NO: 906114

SEQ ID NO: 906124 - protein, 115 aa, Homo sapiens
VNLEIFSKNLSLFPALQCFCHLCTKDNFTCVTDGLCFVSVTETTDKVIHNSMCIAEIDLIPRDRPFVCAPSSKTGSVTTTYCCNQDHCNKIELPTTGKLYKIFFLDTTRKTLHTL

SEQ ID NO: 906125 - protein, 706 aa, Homo sapiens
YPNMAAPVGPVKFWRPGTEGPGVSISEERQSLAENSGTTVVYNPYAALSIEQQRQKLPVFKLRNHILYLIENYQTVVIVGETGCGKSTQIPQYLAEAGWTAEGRVVGVTQPRRVAAVTVAGRVAEERGAVLGHEVGYCIRFDDCTDQLATRIKFLTDGMLVREMMVDPLLTKYSVIMLDEAHERTLYTDIAIGLLKKIQKKRGDLRLIVASATLDADKFRDFFNQNETSDPARDTCVILTVEGRTFPVDIFYLQSPVPDYIKSTVETVVKIHQTEGDGDVLAFLTGQEEVETVVSMLIEQARALARTGMKRHLRVLPMYAGLPSFEQMKVFERVSRSVRKVIVATNVAETSITISGIVYVIDCGFVKLRAYNPRTAIECLVVVPVSQASANQRAGRGGRSRSGKCYRLYTEEAFDKLPQSTVPEMQRSNLAPVILQLKALGIDNVLRFHFMSPPPAQSMVQALELLYALGGLDKDCRLTEPLGMRIAEFPLNPMFAKMLLESGNFGCSQEILSIAAMMQIQNIFVVPPNQKSHAIRVHRKFAVEEGDHLTMLNIYEAFIKHNKDSKWCQEHFLNYKGLVRAATVREQLKKLLVKFQVPRKSSEGDPDLVLRCIVSGFFANAARFHSTGAYRTIRDDHELHIHPASVLYAEKPPRWVIYNEVIQTSKYYMRDVTAIESAWLLELAPHFYQQGTHLSLKAKRAKVQDP

SEQ ID NO: 906126 - protein, 675 aa, Homo sapiens
YPNMAAPVGPVKFWRPGTEGPGVSISEERQSLAENSGTTVVYNPYAALSIEQQRQKLPVFKYLAEAGWTAEGRVVGVTQPRRVAAVTVAGRVAEERGAVLGHEVGYCIRFDDCTDQLATRIKFLTDGMLVREMMVDPLLTKYSVIMLDEAHERTLYTDIAIGLLKKIQKKRGDLRLIVASATLDADKFRDFFNQNETSDPARDTCVILTVEGRTFPVDIFYLQSPVPDYIKSTVETVVKIHQTEGDGDVLAFLTGQEEVETVVSMLIEQARALARTGMKRHLRVLPMYAGLPSFEQMKVFERVSRSVRKVIVATNVAETSITISGIVYVIDCGFVKLRAYNPRTAIECLVVVPVSQASANQRAGRGGRSRSGKCYRLYTEEAFDKLPQSTVPEMQRSNLAPVILQLKALGIDNVLRFHFMSPPPAQSMVQALELLYALGGLDKDCRLTEPLGMRIAEFPLNPMFAKMLLESGNFGCSQEILSIAAMMQIQNIFVVPPNQKSHAIRVHRKFAVEEGDHLTMLNIYEAFIKHNKDSKWCQEHFLNYKGLVRAATVREQLKKLLVKFQVPRKSSEGDPDLVLRCIVSGFFANAARFHSTGAYRTIRDDHELHIHPASVLYAEKPPRWVIYNEVIQTSKYYMRDVTAIESAWLLELAPHFYQQGTHLSLKAKRAKVQDP

SEQ ID NO: 906127 - protein, 706 aa, Homo sapiens; identical to SEQ ID NO: 906125

SEQ ID NO: 906128 - protein, 105 aa, Homo sapiens
MLVREMMVDPLLTKYSVIMLDEAHERTLYTDIAIGLLKKIQKKRGDLRLIVASATLDADVRALPPLSSSPHKHFCPIYPWEVTSSKSLSLAECPIFFMGPSDVLD

SEQ ID NO: 906129 - protein, 224 aa, Homo sapiens
  misc_feature (1)..(1): Xaa can be any naturally occurring amino acid
XSWLVRSGIPGLAAVEFVTYEVTPLESLPFNSSWSACLALGSFCSLRPAPSLRAGLQRRAQPSAACQQPPSRPAAQPRTKPGQSFLAARAMNTEMYQTPMEVAVYQLHNFSISFFSSLLGGDVVSVKLDNSASGASVVAIDNKIEQAMDLVKNHLMYAVREEVEILKEQIRELVEKNSQLERENTLLKTLASPEQLEKFQSCLSPEEPAPESPQVPEAPGGSAV

SEQ ID NO: 906130 - protein, 128 aa, Homo sapiens
MWFPLSWTTGNRWPQLRRLPSRGAGRSWARSPVSERAVCRRSLFPAVQHPGKGRGGGDAGRGGSPPLWDPSSKRPCGRCAVKTSCCSRRGSRRQRGGGQDQTGLGRGLAERRAPLGRRPEAYQPRRNS

SEQ ID NO: 906131 - protein, 121 aa, Homo sapiens [sequence omitted]

SEQ ID NO: 906132 - protein, 285 aa, Homo sapiens
PYGRIRPLWHEQCPPPPTSIERVTTDGDQLRWQVRFRKGEGQQIWRNRRSLSFPGTLESPQASSVGAHLPAAPDLAGQATSEPEKMAQSKLDCRSPVGLDCCNCCLDLAHRSGLQRGSSGENNNPGSPTVSNFRQLQEKLVFENLNTDKLNSIMRQDSLEPVLRDPCYLINEGICNRNIDQTMLSILLFFHSASGASVVAIDNKIEQAMDLVKNHLMYAVREEVEILKEQIRELVEKNSQLERENTLLKTLASPEQLEKFQSCLSPEEPAPESPQVPEAPGGSAV

SEQ ID NO: 906133 - protein, 128 aa, Homo sapiens; identical to SEQ ID NO: 906130

SEQ ID NO: 906134 - protein, 92 aa, Homo sapiens
  misc_feature (1)..(1): Xaa can be any naturally occurring amino acid
XSWLVRSGIPGLAAVEFVTYEVTPLESLPFNSSWSACLALGSFCSLRPAPSLRAGLQRRAQPSAACQQPPSRPAAQPRTKPGQSFLAARAMN

SEQ ID NO: 906135 - protein, 128 aa, Homo sapiens; identical to SEQ ID NO: 906130

SEQ ID NO: 906136 - protein, 224 aa, Homo sapiens; identical to SEQ ID NO: 906129
  misc_feature (1)..(1): Xaa can be any naturally occurring amino acid

SEQ ID NO: 906137 - protein, 262 aa, Homo sapiens
QEPKYLRVWVGLAAVEFVTYEVTPLESLPFNSSWSACLALGSFCSLRPAPSLRAGLQRRAQPSAACQQPPSRPAAQPRTKPGQSFLAARAMNTEMYQTPMEVAVYQLHNFSISFFSSLLGGDVVSVKLDNSASGASVVAIDNKIEQAMDLVKNHLMYAVREEVEILKEQIRELVEKNSQLERENTLLKTLASPEQLEKFQSCLSPEEPAPESPQVPEAPGGSALGPSALQVAIRPIPWLHQPFPSRSSLPSLIPRGDSTPLP

SEQ ID NO: 906138 - protein, 119 aa, Homo sapiens
IWGQTVRNSGPGRREGEREEEPRQMEDFGHNCHVLKSRTEWVMGRFAFCLGSASGASVVAIDNKIEQAMVSGITASFSSPDLAAAYVTLGRIEGMGEKALSQNPEEADSLPPIRTGGGV

SEQ ID NO: 906139 - protein, 224 aa, Homo sapiens
QEPKYLRVWVGLAAVEFVTYEVTPLESLPFNSSWSACLALGSFCSLRPAPSLRAGLQRRAQPSAACQQPPSRPAAQPRTKPGQSFLAARAMNTEMYQTPMEVAVYQLHNFSISFFSSLLGGDVVSVKLDNSASGASVVAIDNKIEQAMDLVKNHLMYAVREEVEILKEQIRELVEKNSQLERENTLLKTLASPEQLEKFQSCLSPEEPAPESPQVPEAPGGSAV

SEQ ID NO: 906140 - protein, 200 aa, Homo sapiens
MAQSKLDCRSPVGLDCCNCCLDLAHRSGLQRGSSGENNNPGSPTVSNFRQLQEKLVFENLNTDKLNSIMRQDSLEPVLRDPCYLINEGICNRNIDQTMLSILLFFHSASGASVVAIDNKIEQAMDLVKNHLMYAVREEVEILKEQIRELVEKNSQLERENTLLKTLASPEQLEKFQSCLSPEEPAPESPQVPEAPGGSAV

SEQ ID NO: 906141 - protein, 122 aa, Homo sapiens
MWFPLSWTTGNRWPQLRRLPSRGAGRSWARSPVSERAVCRRSLFPAVQHPGKGRGGGDAGRGGSPPLWDPSSKRPCGRCAVKTSCCSRRGSRRQRGGGQDQTGLGRGLAERRAPLGRSSSPV

SEQ ID NO: 906142 - protein, 224 aa, Homo sapiens; identical to SEQ ID NO: 906139

SEQ ID NO: 906143 - protein, 224 aa, Homo sapiens; identical to SEQ ID NO: 906129
  misc_feature (1)..(1): Xaa can be any naturally occurring amino acid

SEQ ID NO: 906144 - protein, 224 aa, Homo sapiens; identical to SEQ ID NO: 906129
  misc_feature (1)..(1): Xaa can be any naturally occurring amino acid

SEQ ID NO: 906145 - protein, 80 aa, Homo sapiens
MAQSKLDCRSPVGLDCCNCCLDLAHRSGLQRGSSGENNNPGSPTVSNFRQLQEKLVFENLNTDKLNSIMRQDSLEPVLRD

SEQ ID NO: 906146 - protein, 1765 aa, Homo sapiens
MRRSKADVERYVASVLGLTPSPRQKSMKGFYFAKLYYEAKEYDLAKKYICTYINVQERDPKAHRFLGLLYELEENTEKAVECYRRSVELNPTQKDLVLKIAELLCKNDVTDGRAKYWVERAAKLFPGSPAIYKLKEQLLDCEGEDGWNKLFDLIQSELYVRPDDVHVNIRLVELYRSTKRLKDAVAHCHEAERNIALRSSLEWNSCVVQTLKEYLESLQCLESDKSDWQATNTDLLLAYANLMLLTLSTRDVQENRELLESFDSALQSAKSSLGGNDELSATFLEMKGHFYMYAGSLLLKMGQHGNNVQWRALSELAALCYLIAFQVPRPKIKLREGKAGQNLLEMMACDRLSQSGHMLLSLSRGKQDFLKEVVETFANKIGQSALYDALFSSQSPKDTSFLGSDDIGKIDVQEPELEDLARYDVGAIRAHNGSLQHLTWLGLQWNSLPALPGIRKWLKQLFHRLPHETSRLETNAPESICILDLEVFLLGVVYTSHLQLKEKCNSHHSSYQPLCLPFPVCKQLCTERQKSWWDAVCTLIHRKAVPGNLAKLRLLVQHEINTLRAQEKHGLQPALLVHWAKYLQKTGSGLNSFYGQLEYIGRSVHYWKKVLPLLKIIKKNSIPEPIDPLFKHFHSVDIQASEIVEYEEDAHITFAMLDAVNGNIEDAVTAFESIKSVVSYWNLALIFHRKAEDIENDALSPEEQEECRNYLTKTRDYLIKIIDDGDSNLSVVKKLPVPLESVKQMLNSVMQELEDYSEGGPLYKNGSLRNADSEIKHSTPSPTKYSLSPSKSYKYSPETPPRWTEDRNSLLNMICQQVEAIKKEMQELKLNSSKSASRHRWPTENYGPDSVPDGYQGSQTFHGAPLTVATTGPSVYYSQSPAYNSQYLLRPAANVTPTKGSSNTEFKSTKEGFSIPVSADGFKFGISEPGNQEKKREKPLENDTGFQAQDISGRKKGRGVIFGQTSSTFTFADVAKSTSGEGFQFGKKDLNFKGFSGAGEKLFSSRYGKMANKANTSGDFEKDDDAYKTEDSDDIHFEPVVQMPEKVELVTGEEGEKVLYSQGVKLFRFDAEVRQWKERGLGNLKILKNEVNGKLRMLMRREQVLKVCANHWITTTMNLKPLSGSDRAWMWSASDFSDGDAKLERLAAKFKTPELAEEFKQKFEECQRLLLDIPLQTPHKLVDTGRAAKLIQRAEEMKSGLKDFKTFLTNDQTKVTEEENKGSGTGVAGASDTTIKPNAENTGPTLEWDNYDLREDALDDSVSSSSVHASPLASSPVRKNLFRFDESTTGSNFSFKSALSLSKSPAKLNQSGTSVGTDEESVVTQEEERDGQYFEPVVPLPDLVEVSSGEENEQVVFSHRAEIYRYDKDVGQWKERGIGDIKILQNYDNKQVRIVMRRDQVLKLCANHRITPDMSLQNMKGTERVWVWTACDFADGERKVEHLAVRFKLQDVADSFKKIFDEAKTAQEKDSLITPHVSRSSTPRESPCGKIAVAILEETTRERTDVIQGDDVADAASEVEVSSTSETTTKAVVSPPKFVFVSESVKRIFSSEKSKPFAFGNSSATGSLFGFSFNAPLKSNNSETSSVAQSGSESKVEPKKCELSKNSDIEQSSDSKVKNLSASFPTEESSINYTFKTPEKEPPLWHAEFTKEELVQKLRSTTKSADHLNGLLREIEATNAVLMEQIKLLKSEIRRLERNQEREKSAANLEYLKNVLLQFIFLKPGSERERLLPVINTMLQLSPEEKGKLAAVAQDEEENASRSSG

SEQ ID NO: 906147 - protein, 1855 aa, Homo sapiens
MSRHPQTTGRRHEPGRVQLERRRRRGYTVLRQNAGSSQWASVGGAARSSQWASAGYAAASVACRHFPLGSGDCCGAERCSHASREPGWRRDEGSKADVERYVASVLGLTPSPRQKSMKGFYFAKLYYEAKEYDLAKKYICTYINVQERDPKAHRFLGLLYELEENTEKAVECYRRSVELNPTQKDLVLKIAELLCKNDVTDGRAKYWVERAAKLFPGSPAIYKLKEQLLDCEGEDGWNKLFDLIQSELYVRPDDVHVNIRLVELYRSTKRLKDAVAHCHEAERNIALRSSLEWNSCVVQTLKEYLESLQCLESDKSDWQATNTDLLLAYANLMLLTLSTRDVQENRELLESFDSALQSAKSSLGGNDELSATFLEMKGHFYMYAGSLLLKMGQHGNNVQWRALSELAALCYLIAFQVPRPKIKLREGKAGQNLLEMMACDRLSQSGHMLLSLSRGKQDFLKEVVETFANKIGQSALYDALFSSQSPKDTSFLGSDDIGKIDVQEPELEDLARYDVGAIRAHNGSLQHLTWLGLQWNSLPALPGIRKWLKQLFHRLPHETSRLETNAPESICILDLEVFLLGVVYTSHLQLKEKCNSHHSSYQPLCLPFPVCKQLCTERQKSWWDAVCTLIHRKAVPGNLAKLRLLVQHEINTLRAQEKHGLQPALLVHWAKYLQKTGSGLNSFYGQLEYIGRSVHYWKKVLPLLKIIKKNSIPEPIDPLFKHFHSVDIQASEIVEYEEDAHITFAMLDAVNGNIEDAVTAFESIKSVVSYWNLALIFHRKAEDIENDALSPEEQEECRNYLTKTRDYLIKIIDDGDSNLSVVKKLPVPLESVKQMLNSVMQELEDYSEGGPLYKNGSLRNADSEIKHSTPSPTKYSLSPSKSYKYSPETPPRWTEDRNSLLNMICQQVEAIKKEMQELKLNSSKSASRHRWPTENYGPDSVPDGYQGSQTFHGAPLTVATTGPSVYYSQSPAYNSQYLLRPAANVTPTKGSSNTEFKSTKEGFSIPVSADGFKFGISEPGNQEKKREKPLENDTGFQAQDISGRKKGRGVIFGQTSSTFTFADVAKSTSGEGFQFGKKDLNFKGFSGAGEKLFSSRYGKMANKANTSGDFEKDDDAYKTEDSDDIHFEPVVQMPEKVELVTGEEGEKVLYSQGVKLFRFDAEVRQWKERGLGNLKILKNEVNGKLRMLMRREQVLKVCANHWITTTMNLKPLSGSDRAWMWSASDFSDGDAKLERLAAKFKTPELAEEFKQKFEECQRLLLDIPLQTPHKLVDTGRAAKLIQRAEEMKSGLKDFKTFLTNDQTKVTEEENKGSGTGVAGASDTTIKPNAENTGPTLEWDNYDLREDALDDSVSSSSVHASPLASSPVRKNLFRFDESTTGSNFSFKSALSLSKSPAKLNQSGTSVGTDEESVVTQEEERDGQYFEPVVPLPDLVEVSSGEENEQVVFSHRAEIYRYDKDVGQWKERGIGDIKILQNYDNKQVRIVMRRDQVLKLCANHRITPDMSLQNMKGTERVWVWTACDFADGERKVEHLAVRFKLQDVADSFKKIFDEAKTAQEKDSLITPHVSRSSTPRESPCGKIAVAILEETTRERTDVIQGDDVADAASEVEVSSTSETTTKAVVSPPKFVFVSESVKRIFSSEKSKPFAFGNSSATGSLFGFSFNAPLKSNNSETSSVAQSGSESKVEPKKCELSKNSDIEQSSDSKVKNLSASFPTEESSINYTFKTPEKEPPLWHAEFTKEELVQKLRSTTKSADHLNGLLREIEATNAVLMEQIKLLKSEIRRLERNQEREKSAANLEYLKNVLLQFIFLKPGSERERLLPVINTMLQLSPEEKGKLAAVAQDEEENASRSSG

SEQ ID NO: 906148 - protein, 1110 aa, Homo sapiens
MLDAVNGNIEDAVTAFESIKSVVSYWNLALIFHRKAEDIENDALSPEEQEECRNYLTKTRDYLIKIIDDGDSNLSVVKKLPVPLESVKQMLNSVMQELEDYSEGGPLYKNGSLRNADSEIKHSTPSPTKYSLSPSKSYKYSPETPPRWTEDRNSLLNMICQQVEAIKKEMQELKLNSSKSASRHRWPTENYGPDSVPDGYQGSQTFHGAPLTVATTGPSVYYSQSPAYNSQYLLRPAANVTPTKGSSNTEFKSTKEGFSIPVSADGFKFGISEPGNQEKKREKPLENDTGFQAQDISGRKKGRGVIFGQTSSTFTFADVAKSTSGEGFQFGKKDLNFKGFSGAGEKLFSSRYGKMANKANTSGDFEKDDDAYKTEDSDDIHFEPVVQMPEKVELVTGEEGEKVLYSQGVKLFRFDAEVRQWKERGLGNLKILKNEVNGKLRMLMRREQVLKVCANHWITTTMNLKPLSGSDRAWMWSASDFSDGDAKLERLAAKFKTPELAEEFKQKFEECQRLLLDIPLQTPHKLVDTGRAAKLIQRAEEMKSGLKDFKTFLTNDQTKVTEEENKGSGTGVAGASDTTIKPNAENTGPTLEWDNYDLREDALDDSVSSSSVHASPLASSPVRKNLFRFDESTTGSNFSFKSALSLSKSPAKLNQSGTSVGTDEESVVTQEEERDGQYFEPVVPLPDLVEVSSGEENEQVVFSHRAEIYRYDKDVGQWKERGIGDIKILQNYDNKQVRIVMRRDQVLKLCANHRITPDMSLQNMKGTERVWVWTACDFADGERKVEHLAVRFKLQDVADSFKKIFDEAKTAQEKDSLITPHVSRSSTPRESPCGKIAVAILEETTRERTDVIQGDDVADAASEVEVSSTSETTTKAVVSPPKFVFVSESVKRIFSSEKSKPFAFGNSSATGSLFGFSFNAPLKSNNSETSSVAQSGSESKVEPKKCELSKNSDIEQSSDSKVKNLSASFPTEESSINYTFKTPEKEPPLWHAEFTKEELVQKLRSTTKSADHLNGLLREIEATNAVLMEQIKLLKSEIRRLERNQEREKSAANLEYLKNVLLQFIFLKPGSERERLLPVINTMLQLSPEEKGKLAAVAQDEEENASRSSG

SEQ ID NO: 906149 - protein, 1110 aa, Homo sapiens; identical to SEQ ID NO: 906148

SEQ ID NO: 906150 - protein, 1765 aa, Homo sapiens; identical to SEQ ID NO: 906146

SEQ ID NO: 906151 - protein, 1765 aa, Homo sapiens; identical to SEQ ID NO: 906146

SEQ ID NO: 906152 - protein, 1765 aa, Homo sapiens; identical to SEQ ID NO: 906146

SEQ ID NO: 906153 - protein, 1756 aa, Homo sapiens
MRRSKADVERYVASVLGLTPSPRQKSMKGFYFAKLYYEAKEYDLAKKYICTYINVQERDPKAHRFLGLLYELEENTEKAVECYRRSVELNPTQKDLVLKIAELLCKNDVTDGRAKYWVERAAKLFPGSPAIYKLKEQLLDCEGEDGWNKLFDLIQSELYVRPDDVHVNIRLVELYRSTKRLKDAVAHCHEAERNIALRSSLEWNSCVVQTLKEYLESLQCLESDKSDWQATNTDLLLAYANLMLLTLSTRDVQENRELLESFDSALQSAKSSLGGNDELSATFLEMKGHFYMYAGSLLLKMGQHGNNVQWRALSELAALCYLIAFQVPRPKIKLREGKAGQNLLEMMACDRLSQSGHMLLSLSRGKQDFLKEVVETFANKIGQSALYDALFSSQSPKDTSFLGSDDIGKIDVQEPELEDLARYDVGAIRAHNGSLQHLTWLGLQWNSLPALPGIRKWLKQLFHRLPHETSRLETNAPESICILDLEVFLLGVVYTSHLQLKEKCNSHHSSYQPLCLPFPVCKQLCTERQKSWWDAVCTLIHRKAVPGNLAKLRLLVQHEINTLRAQEKHGLQPALLVHWAKYLQKTGSGLNSFYGQLEYIGRSVHYWKKVLPLLKIIKKNSIPEPIDPLFKHFHSVDIQASEIVEYEEDAHITFAMLDAVNGNIEDAVTAFESIKSVVSYWNLALIFHRKAEDIENDALSPEEQEECRNYLTKTRDYLIKIIDDGDSNLSVVKKLPVPLESVKQMLNSVMQELEDYSEGGPLYKNGSLRNADSEIKHSTPSPTKYSLSPSKSYKYSPETPPRWTEDRNSLLNMICQQVEAIKKEMQELKLNSSKSASRHRWPTENYGPDSVPDGYQGSQTFHGAPLTVATTGPSVYYSQSPAYNSQYLLRPAANVTPTKGSSNTEFKSTKEGFSIPVSADGFKFGISEPGNQEKKREKPLENDTGFQAQDISGRKKGRGVIFGQTSSTFTFADVAKSTSGEGFQFGKKDLNFKGFSGAGEKLFSSRYGKMANKANTSGDFEKDDDAYKTEDSDDIHFEPVVQMPEKVELVTGEEGEKVLYSQGVKLFRFDAEVRQWKERGLGNLKILKNEVNGKLRMLMRREQVLKVCANHWITTTMNLKPLSGSDRAWMWSASDFSDGDAKLERLAAKFKTPELAEEFKQKFEECQRLLLDIPLQTPHKLVDTGRAAKLIQRAEEMKSGLKDFKTFLTNDQTKVTEEENKGSGTGVAGASDTTIKPNAENTGPTLEWDNYDLREDALDDSVSSSSVHASPLASSPVRKNLFRFDESTTGSNFSFKSALSLSKSPAKLNQSGTSVGTDEESVVTQEEERDGQYFEPVVPLPDLVEVSSGEENEQVVFSHRAEIYRYDKDVGQWKERGIGDIKILQNYDNKQVRIVMRRDQVLKLCANHRITPDMSLQNMKGTERVWVWTACDFADGERKVEHLAVRFKLQDVADSFKKIFDEAKTAQEKDSLITPHVSRSSTPRESPCGKIAVAILEETTRERTDVIQGDDVADAASEVEVSSTSETTTKAVVSPPKFVFVSESVKRIFSSEKSKPFAFGNSSATGSLFGFSFNAPLKSNNSETSSVAQSGSESKVEPKKCELSKNSDIEQSSDSKVKNLSASFPTEESSINYTFKTPEKEPPLWHAEFTKEELVQKLRSTTKSADHLNGLLREIEATNAVLMEQIKLLKSEIRRLERNQEREKSAANLEYLKNVLLQFIFLKPGSERERLLPVINTMLQLSPEEKGKLAAVAQGG

SEQ ID NO: 906154 - protein, 728 aa, Homo sapiens
  misc_feature (691)..(691): Xaa can be any naturally occurring amino acid
  misc_feature (698)..(698): Xaa can be any naturally occurring amino acid
  misc_feature (700)..(700): Xaa can be any naturally occurring amino acid
  misc_feature (720)..(720): Xaa can be any naturally occurring amino acid
MRRSKADVERYVASVLGLTPSPRQKSMKGFYFAKLYYEAKEYDLAKKYICTYINVQERDPKAHRFLGLLYELEENTEKAVECYRRSVELNPTQKDLVLKIAELLCKNDVTDGRAKYWVERAAKLFPGSPAIYKLKEQLLDCEGEDGWNKLFDLIQSELYVRPDDVHVNIRLVELYRSTKRLKDAVAHCHEAERNIALRSSLEWNSCVVQTLKEYLESLQCLESDKSDWQATNTDLLLAYANLMLLTLSTRDVQENRELLESFDSALQSAKSSLGGNDELSATFLEMKGHFYMYAGSLLLKMGQHGNNVQWRALSELAALCYLIAFQVPRPKIKLREGKAGQNLLEMMACDRLSQSGHMLLSLSRGKQDFLKEVVETFANKIGQSALYDALFSSQSPKDTSFLGSDDIGKIDVQEPELEDLARYDVGAIRAHNGSLQHLTWLGLQWNSLPALPGIRKWLKQLFHRLPHETSRLETNAPESICILDLEVFLLGVVYTSHLQLKEKCNSHHSSYQPLCLPFPVCKQLCTERQKSWWDAVCTLIHRKAVPGNLAKLRLLVQHEINTLRAQEKHGLQPALLVHWAKYLQKTGSGLNSFYGQLEYIGRSVHYWKKVLPLLKIIKKNSIPEPIDPLFKHFHSVDIQASEIVEYEEDAHITFAMLDAVNGNIEDAVTAFESIKSVVSYWNLALDFSQGXGQKEHLXNXMALFSLERKQRKKCQENLSXTKRTKGEL

SEQ ID NO: 906155 - protein, 151 aa, Homo sapiens
MRRSKADVERYVASVLGLTPSPRQKSMKGFYFAKLYYEAKEYDLAKKYICTYINVQERDPKAHRFLGLLYELEENTEKAVECYRRSVELNPTQKDLVLKIAELLCKNDVTDGRAKYWVERAAKLFPGSPAIYKLKVNKQNIKGENLRHNHF

SEQ ID NO: 906156 - protein, 994 aa, Homo sapiens
MSRHPQTTGRRHEPGRVQLERRRRRGYTVLRQNAGSSQWASVGGAARSSQWASAGYAAASVACRHFPLGSGDCCGAERCSHASREPGWRRDEGSKADVERYVASVLGLTPSPRQKSMKGFYFAKLYYEAKEYDLAKKYICTYINVQERDPKAHRFLGLLYELEENTEKAVECYRRSVELNPTQKDLVLKIAELLCKNDVTDGRAKYWVERAAKLFPGSPAIYKLKEQLLDCEGEDGWNKLFDLIQSELYVRPDDVHVNIRLVELYRSTKRLKDAVAHCHEAERNIALRSSLEWNSCVVQTLKEYLESLQCLESDKSDWQATNTDLLLAYANLMLLTLSTRDVQENRELLESFDSALQSAKSSLGGNDELSATFLEMKGHFYMYAGSLLLKMGQHGNNVQWRALSELAALCYLIAFQVPRPKIKLREGKAGQNLLEMMACDRLSQSGHMLLSLSRGKQDFLKEVVETFANKIGQSALYDALFSSQSPKDTSFLGSDDIGKIDVQEPELEDLARYDVGAIRAHNGSLQHLTWLGLQWNSLPALPGIRKWLKQLFHRLPHETSRLETNAPESICILDLEVFLLGVVYTSHLQLKEKCNSHHSSYQPLCLPFPVCKQLCTERQKSWWDAVCTLIHRKAVPGNLAKLRLLVQHEINTLRAQEKHGLQPALLVHWAKYLQKTGSGLNSFYGQLEYIGRSVHYWKKVLPLLKIIKKNSIPEPIDPLFKHFHSVDIQASEIVEYEEDAHITFAMLDAVNGNIEDAVTAFESIKSVVSYWNLALIFHRKAEDIENDALSPEEQEECRNYLTKTRDYLIKIIDDGDSNLSVVKKLPVPLESVKQMLNSVMQELEDYSEGGPLYKNGSLRNADSEIKHSTPSPTKYSLSPSKSYKYSPETPPRWTEDRNSLLNMICQQVEAIKKEMQELKLNSSKSASRHRWPTENYGPDSVPDGYQGSQTFHGAPLTEAAHRHFTIEKHGDSKWIIYRFTKQLCGTERARAKIS

SEQ ID NO: 906157 - protein, 1419 aa, Homo sapiens
MACDRLSQSGHMLLSLSRGKQDFLKEVVETFANKIGQSALYDALFSSQSPKDTSFLGSDDIGKIDVQEPELEDLARYDVGAIRAHNGSLQHLTWLGLQWNSLPALPGIRKWLKQLFHRLPHETSRLETNAPESICILDLEVFLLGVVYTSHLQLKEKCNSHHSSYQPLCLPFPVCKQLCTERQKSWWDAVCTLIHRKAVPGNLAKLRLLVQHEINTLRAQEKHGLQPALLVHWAKYLQKTGSGLNSFYGQLEYIGRSVHYWKKVLPLLKIIKKNSIPEPIDPLFKHFHSVDIQASEIVEYEEDAHITFAMLDAVNGNIEDAVTAFESIKSVVSYWNLALIFHRKAEDIENDALSPEEQEECRNYLTKTRDYLIKIIDDGDSNLSVVKKLPVPLESVKQMLNSVMQELEDYSEGGPLYKNGSLRNADSEIKHSTPSPTKYSLSPSKSYKYSPETPPRWTEDRNSLLNMICQQVEAIKKEMQELKLNSSKSASRHRWPTENYGPDSVPDGYQGSQTFHGAPLTVATTGPSVYYSQSPAYNSQYLLRPAANVTPTKGSSNTEFKSTKEGFSIPVSADGFKFGISEPGNQEKKREKPLENDTGFQAQDISGRKKGRGVIFGQTSSTFTFADVAKSTSGEGFQFGKKDLNFKGFSGAGEKLFSSRYGKMANKANTSGDFEKDDDAYKTEDSDDIHFEPVVQMPEKVELVTGEEGEKVLYSQGVKLFRFDAEVRQWKERGLGNLKILKNEVNGKLRMLMRREQVLKVCANHWITTTMNLKPLSGSDRAWMWSASDFSDGDAKLERLAAKFKTPELAEEFKQKFEECQRLLLDIPLQTPHKLVDTGRAAKLIQRAEEMKSGLKDFKTFLTNDQTKVTEEENKGSGTGVAGASDTTIKPNAENTGPTLEWDNYDLREDALDDSVSSSSVHASPLASSPVRKNLFRFDESTTGSNFSFKSALSLSKSPAKLNQSGTSVGTDEESVVTQEEERDGQYFEPVVPLPDLVEVSSGEENEQVVFSHRAEIYRYDKDVGQWKERGIGDIKILQNYDNKQVRIVMRRDQVLKLCANHRITPDMSLQNMKGTERVWVWTACDFADGERKVEHLAVRFKLQDVADSFKKIFDEAKTAQEKDSLITPHVSRSSTPRESPCGKIAVAILEETTRERTDVIQGDDVADAASEVEVSSTSETTTKAVVSPPKFVFVSESVKRIFSSEKSKPFAFGNSSATGSLFGFSFNAPLKSNNSETSSVAQSGSESKVEPKKCELSKNSDIEQSSDSKVKNLSASFPTEESSINYTFKTPEKEPPLWHAEFTKEELVQKLRSTTKSADHLNGLLREIEATNAVLMEQIKLLKSEIRRLERNQEREKSAANLEYLKNVLLQFIFLKPGSERERLLPVINTMLQLSPEEKGKLAAVAQDEEENASRSSG

SEQ ID NO: 906158 - protein, 1419 aa, Homo sapiens; identical to SEQ ID NO: 906157

SEQ ID NO: 906159 - protein, 756 aa, Homo sapiens
MANKANTSGDFEKDDDAYKTEDSDDIHFEPVVQMPEKVELVTGEEGEKVLYSQGVKLFRFDAEVRQWKERGLGNLKILKNEVNGKLRMLMRREQVLKVCANHWITTTMNLKPLSGSDRAWMWSASDFSDGDAKLERLAAKFKTPELAEEFKQKFEECQRLLLDIPLQTPHKLVDTGRAAKLIQRAEEMKSGLKDFKTFLTNDQTKVTEEENKGSGTGVAGASDTTIKPNAENTGPTLEWDNYDLREDALDDSVSSSSVHASPLASSPVRKNLFRFDESTTGSNFSFKSALSLSKSPAKLNQSGTSVGTDEESVVTQEEERDGQYFEPVVPLPDLVEVSSGEENEQVVFSHRAEIYRYDKDVGQWKERGIGDIKILQNYDNKQVRIVMRRDQVLKLCANHRITPDMSLQNMKGTERVWVWTACDFADGERKVEHLAVRFKLQDVADSFKKIFDEAKTAQEKDSLITPHVSRSSTPRESPCGKIAVAILEETTRERTDVIQGDDVADAASEVEVSSTSETTTKAVVSPPKFVFVSESVKRIFSSEKSKPFAFGNSSATGSLFGFSFNAPLKSNNSETSSVAQSGSESKVEPKKCELSKNSDIEQSSDSKVKNLSASFPTEESSINYTFKTPEKEPPLWHAEFTKEELVQKLRSTTKSADHLNGLLREIEATNAVLMEQIKLLKSEIRRLERNQEREKSAANLEYLKNVLLQFIFLKPGSERERLLPVINTMLQLSPEEKGKLAAVAQDEEENASRSSG

SEQ ID NO: 906160 - protein, 1765 aa, Homo sapiens; identical to SEQ ID NO: 906146

SEQ ID NO: 906161 - protein, 485 aa, Homo sapiens
MACDRLSQSGHMLLSLSRGKQDFLKEVVETFANKIGQSALYDALFSSQSPKDTSFLGSDDIGKIEVSSGEENEQVVFSHRAEIYRYDKDVGQWKERGIGDIKILQNYDNKQVRIVMRRDQVLKLCANHRITPDMSLQNMKGTERVWVWTACDFADGERKVEHLAVRFKLQDVADSFKKIFDEAKTAQEKDSLITPHVSRSSTPRESPCGKIAVAILEETTRERTDVIQGDDVADAASEVEVSSTSETTTKAVVSPPKFVFVSESVKRIFSSEKSKPFAFGNSSATGSLFGFSFNAPLKSNNSETSSVAQSGSESKVEPKKCELSKNSDIEQSSDSKVKNLSASFPTEESSINYTFKTPEKEPPLWHAEFTKEELVQKLRSTTKSADHLNGLLREIEATNAVLMEQIKLLKSEIRRLERNQEREKSAANLEYLKNVLLQFIFLKPGSERERLLPVINTMLQLSPEEKGKLAAVAQDEEENASRSSG

SEQ ID NO: 906162 - protein, 1655 aa, Homo sapiens
MRRSKADVERYVASVLGLTPSPRQKSMKGFYFAKLYYEAKEYDLAKKYICTYINVQERDPKAHRFLGLLYELEENTEKAVECYRRSVELNPTQKDLVLKIAELLCKNDVTDGRAKYWVERAAKLFPGSPAIYKLKEQLLDCEGEDGWNKLFDLIQSELYVRPDDVHVNIRLVELYRSTKRLKDAVAHCHEAERNIALRSSLEWNSCVVQTLKEYLESLQCLESDKSDWQATNTDLLLAYANLMLLTLSTRDVQENRELLESFDSALQSAKSSLGGNDELSATFLEMKGHFYMYAGSLLLKMGQHGNNVQWRALSELAALCYLIAFQVPRPKIKLREGKAGQNLLEMMACDRLSQSGHMLLSLSRGKQDFLKEVVETFANKIGQSALYDALFSSQSPKDTSFLGSDDIGKIDVQEPELEDLARYDVGAIRAHNGSLQHLTWLGLQWNSLPALPGIRKWLKQLFHRLPHETSRLETNAPESICILDLEVFLLGVVYTSHLQLKEKCNSHHSSYQPLCLPFPVCKQLCTERQKSWWDAVCTLIHRKAVPGNLAKLRLLVQHEINTLRAQEKHGLQPALLVHWAKYLQKTGSGLNSFYGQLEYIGRSVHYWKKVLPLLKIIKKNSIPEPIDPLFKHFHSVDIQASEIVEYEEDAHITFAMLDAVNGNIEDAVTAFESIKSVVSYWNLALIFHRKAEDIENDALSPEEQEECRNYLTKTRDYLIKIIDDGDSNLSVVKKLPVPLESVKQMLNSVMQELEDYSEGGPLYKNGSLRNADSEIKHSTPSPTKYSLSPSKSYKYSPETPPRWTEDRNSLLNMICQQVEAIKKEMQELKLNSSKSASRHRWPTENYGPDSVPDGYQGSQTFHGAPLTVATTGPSVYYSQSPAYNSQYLLRPAANVTPTKGSSNTEFKSTKEGFSIPVSADGFKFGISEPGNQEKKREKPLENDTGFQAQDISGRKKGRGVIFGQTSSTFTFADVAKSTSGEGFQFGKKDLNFKGFSGAGEKLFSSRYGKMANKANTSGDFEKDDDAYKTEDSDDIHFEPVVQMPEKVELVTGEEGEKVLYSQGVKLFRFDAEVRQWKERGLGNLKILKNEVNGKLRMLMRREQVLKVCANHWITTTMNLKPLSGSDRAWMWSASDFSDGDAKLERLAAKFKTPELAEEFKQKFEECQRLLLDIPLQTPHKLVDTGRAAKLIQRAEEMKSGLKDFKTFLTNDQTKVTEEENKGSGTGVAGASDTTIKPNAENTGPTLEWDNYDLREDALDDSVSSSSVHASPLASSPVRKNLFRFDESTTGSNFSFKSALSLSKSPAKLNQSGTSVGTDEESVVTQEEERDGQYFEPVVPLPDLVEVSSGEENEQVVFSHRAEIYRYDKDVGQWKERGIGDIKILQNYDNKQVRIVMRRDQVLKLCANHRITPDMSLQNMKGTERVWVWTACDFADGERKVEHLAVRFKLQDVADSFKKIFDEAKTAQEKDSLITPHVSRSSTPRESPCGKIAVAILEETTRERTDVIQGDDVADAASEVEVSSTSETTTKAVVSPPKFVFVSESVKRIFSSEKSKPFAFGNSSATGSLFGFSFNAPLKSNNSETSSVAQSGSESKVEPKKCELSKNSDIEQSSDSKVKNLSASFPTEESSINYTFKTPEKGRYFVVKVKHNFSFF

SEQ ID NO: 906163 - protein, 213 aa, Homo sapiens
MRRSKADVERYVASVLGLTPSPRQKSMKGFYFAKLYYEAKEYDLAKKYICTYINVQERDPKAHRFLGLLYELEENTEKAVECYRRSVELNPTQKDLVLKIAELLCKNDVTDGRAKYWVERAAKLFPGSPAIYKLKEQLLDCEGEDGWNKLFDLIQSELYVRPDDVHVNIRLVELYRSTKRLKDAVAHCHEAERNIALRSSLEWNSCVVQTLKF

SEQ ID NO: 906164 - protein, 567 aa, Homo sapiens
MGRGLLRGLWPLHIVLWTRIASTIPPHVQKSVNNDMIVTDNNGAVKFPQLCKFCDVRFSTCDNQKSCMSNCSITSICEKPQEVCVAVWRKNDENITLETVCHDPKLPYHDFILEDAASPKCIMKEKKKPGETFFMCSCSSDECNDNIIFSEEYNTSNPDLLLVIFQVTGISLLPPLGVAISVIIIFYCYRVNRQQKLSSTWETGKTRKLMEFSEHCAIILEDDRSDISSTCANNINHNTELLPIELDTLVGKGRFAEVYKAKLKQNTSEQFETVAVKIFPYEEYASWKTEKDIFSDINLKHENILQFLTAEERKTELGKQYWLITAFHAKGNLQEYLTRHVISWEDLRKLGSSLARGIAHLHSDHTPCGRPKMPIVHRDLKSSNILVKNDLTCCLCDFGLSLRLDPTLSVDDLANSGQVGTARYMAPEVLESRMNLENVESFKQTDVYSMALVLWEMTSRCNAVGEVKDYEPPFGSKVREHPCVESMKDNVLRDRGRPEIPSFWLNHQGIQMVCETLTECWDHDPEARLTAQCVAERFSELEHLDRLSGRSCSEEKIPEDGSLNTTK

SEQ ID NO: 906165 - protein, 478 aa, Homo sapiens
MILPLHNLGNGVRSHNFSFLYFILEDAASPKCIMKEKKKPGETFFMCSCSSDECNDNIIFSEEYNTSNPDLLLVIFQVTGISLLPPLGVAISVIIIFYCYRVNRQQKLSSTWETGKTRKLMEFSEHCAIILEDDRSDISSTCANNINHNTELLPIELDTLVGKGRFAEVYKAKLKQNTSEQFETVAVKIFPYEEYASWKTEKDIFSDINLKHENILQFLTAEERKTELGKQYWLITAFHAKGNLQEYLTRHVISWEDLRKLGSSLARGIAHLHSDHTPCGRPKMPIVHRDLKSSNILVKNDLTCCLCDFGLSLRLDPTLSVDDLANSGQVGTARYMAPEVLESRMNLENVESFKQTDVYSMALVLWEMTSRCNAVGEVKDYEPPFGSKVREHPCVESMKDNVLRDRGRPEIPSFWLNHQGIQMVCETLTECWDHDPEARLTAQCVAERFSELEHLDRLSGRSCSEEKIPEDGSLNTTK

SEQ ID NO: 906166 - protein, 547 aa, Homo sapiens
MGRGLLRGLWPLHIVLWTRIASTIPPHVQKSVNNDMIVTDNNGAVKFPQLCKFCDVRFSTCDNQKSCMSNCSITSICEKPQEVCVAVWRKNDENITLETVCHDPKLPYHDFILEDAASPKCIMKEKKKPGEKYNTSNPDLLLVIFQVTGISLLPPLGVAISVIIIFYCYRVNRQQKLSSTWETGKTRKLMEFSEHCAIILEDDRSDISSTCANNINHNTELLPIELDTLVGKGRFAEVYKAKLKQNTSEQFETVAVKIFPYEEYASWKTEKDIFSDINLKHENILQFLTAEERKTELGKQYWLITAFHAKGNLQEYLTRHVISWEDLRKLGSSLARGIAHLHSDHTPCGRPKMPIVHRDLKSSNILVKNDLTCCLCDFGLSLRLDPTLSVDDLANSGQVGTARYMAPEVLESRMNLENVESFKQTDVYSMALVLWEMTSRCNAVGEVKDYEPPFGSKVREHPCVESMKDNVLRDRGRPEIPSFWLNHQGIQMVCETLTECWDHDPEARLTAQCVAERFSELEHLDRLSGRSCSEEKIPEDGSLNTTK

SEQ ID NO: 906167 - protein, 567 aa, Homo sapiens; identical to SEQ ID NO: 906164

SEQ ID NO: 906168 - protein, 340 aa, Homo sapiens
SSRISVMLSPNTELLPIELDTLVGKGRFAEVYKAKLKQNTSEQFETVAVKIFPYEEYASWKTEKDIFSDINLKHENILQFLTAEERKTELGKQYWLITAFHAKGNLQEYLTRHVISWEDLRKLGSSLARGIAHLHSDHTPCGRPKMPIVHRDLKSSNILVKNDLTCCLCDFGLSLRLDPTLSVDDLANSGQVGTARYMAPEVLESRMNLENVESFKQTDVYSMALVLWEMTSRCNAVGEVKDYEPPFGSKVREHPCVESMKDNVLRDRGRPEIPSFWLNHQGIQMVCETLTECWDHDPEARLTAQCVAERFSELEHLDRLSGRSCSEEKIPEDGSLNTTK

SEQ ID NO: 906169 - protein, 567 aa, Homo sapiens; identical to SEQ ID NO: 906164

SEQ ID NO: 906170 - protein, 567 aa, Homo sapiens; identical to SEQ ID NO: 906164

SEQ ID NO: 906171 - protein, 592 aa, Homo sapiens
MGRGLLRGLWPLHIVLWTRIASTIPPHVQKSDVEMEAQKDEIICPSCNRTAHPLRHINNDMIVTDNNGAVKFPQLCKFCDVRFSTCDNQKSCMSNCSITSICEKPQEVCVAVWRKNDENITLETVCHDPKLPYHDFILEDAASPKCIMKEKKKPGETFFMCSCSSDECNDNIIFSEEYNTSNPDLLLVIFQVTGISLLPPLGVAISVIIIFYCYRVNRQQKLSSTWETGKTRKLMEFSEHCAIILEDDRSDISSTCANNINHNTELLPIELDTLVGKGRFAEVYKAKLKQNTSEQFETVAVKIFPYEEYASWKTEKDIFSDINLKHENILQFLTAEERKTELGKQYWLITAFHAKGNLQEYLTRHVISWEDLRKLGSSLARGIAHLHSDHTPCGRPKMPIVHRDLKSSNILVKNDLTCCLCDFGLSLRLDPTLSVDDLANSGQVGTARYMAPEVLESRMNLENVESFKQTDVYSMALVLWEMTSRCNAVGEVKDYEPPFGSKVREHPCVESMKDNVLRDRGRPEIPSFWLNHQGIQMVCETLTECWDHDPEARLTAQCVAERFSELEHLDRLSGRSCSEEKIPEDGSLNTTK

SEQ ID NO: 906172 - protein, 451 aa, Homo sapiens
RCKIRHIGSNNRLQRSTCQNTGWESAHVMKTPGFREYNTSNPDLLLVIFQVTGISLLPPLGVAISVIIIFYCYRVNRQQKLSSTWETGKTRKLMEFSEHCAIILEDDRSDISSTCANNINHNTELLPIELDTLVGKGRFAEVYKAKLKQNTSEQFETVAVKIFPYEEYASWKTEKDIFSDINLKHENILQFLTAEERKTELGKQYWLITAFHAKGNLQEYLTRHVISWEDLRKLGSSLARGIAHLHSDHTPCGRPKMPIVHRDLKSSNILVKNDLTCCLCDFGLSLRLDPTLSVDDLANSGQVGTARYMAPEVLESRMNLENVESFKQTDVYSMALVLWEMTSRCNAVGEVKDYEPPFGSKVREHPCVESMKDNVLRDRGRPEIPSFWLNHQGIQMVCETLTECWDHDPEARLTAQCVAERFSELEHLDRLSGRSCSEEKIPEDGSLNTTK

SEQ ID NO: 906173 - protein, 134 aa, Homo sapiens
MNLENVESFKQTDVYSMALVLWEMTSRCNAVGEVKDYEPPFGSKVREHPCVESMKDNVLRDRGRPEIPSFWLNHQGIQMVCETLTECWDHDPEARLTAQCVAERFSELEHLDRLSGRSCSEEKIPEDGSLNTTK

SEQ ID NO: 906174 - protein, 176 aa, Homo sapiens
MGRGLLRGLWPLHIVLWTRIASTIPPHVQKSVNNDMIVTDNNGAVKFPQLCKFCDVRFSTCDNQKSCMSNCSITSICEKPQEVCVAVWRKNDENITLETVCHDPKLPYHDFILEDAASPKCIMKEKKKPGETFFMCSCSSDECNDNIIFSEGEFSSLKGVGPEICANFLYPWSAVS

SEQ ID NO: 906175 - protein, 123 aa, Homo sapiens
RRVRSQHGHGLARRPPGPESPAPRFVAPRRRGGLDGADGADGRAGGMEAAHLLPAADVLRHFSVTAEGGLSPAQVTGARERYGPNGKSLWELVLEQFEDLLVRILLLAALVSFVSRALPAILW

SEQ ID NO: 906176 - protein, 1045 aa, Homo sapiens
RRVRSQHGHGLARRPPGPESPAPRFVAPRRRGGLDGADGADGRAGGMEAAHLLPAADVLRHFSVTAEGGLSPAQVTGARERYGPNELPSEEGKSLWELVLEQFEDLLVRILLLAALVSFVLAWFEEGEETTTAFVEPLVIMLILVANAIVGVWQERNAESAIEALKEYEPEMGKVIRSDRKGVQRIRARDIVPGDIVEVAVGDKVPADLRLIEIKSTTLRVDQSILTGESVSVTKHTEAIPDPRAVNQDKKNMLFSGTNITSGKAVGVAVATGLHTELGKIRSQMAAVEPERTPLQRKLDEFGRQLSHAISVICVAVWVINIGHFADPAHGGSWLRGAVYYFKIAVALAVAAIPEGLPAVITTCLALGTRRMARKNAIVRSLPSVETLGCTSVICSDKTGTLTTNQMSVCRMFVVAEADAGSCLLHEFTISGTTYTPEGEVRQGDQPVRCGQFDGLVELATICALCNDSALDYNEAKGVYEKVGEATETALTCLVEKMNVFDTDLQALSRVERAGACNTVIKQLMRKEFTLEFSRDRKSMSVYCTPTRPHPTGQGSKMFVKGAPESVIERCSSVRVGSRTAPLTPTSREQILAKIRDWGSGSDTLRCLALATRDAPPRKEDMELDDCSKFVQYETDLTFVGCVGMLDPPRPEVAACITRCYQAGIRVVMITGDNKGTAVAICRRLGIFGDTEDVAGKAYTGREFDDLSPEQQRQACRTARCFARVEPAHKSRIVENLQSFNEITAMTGDGVNDAPALKKAEIGIAMGSGTAVAKSAAEMVLSDDNFASIVAAVEEGRAIYSNMKQFIRYLISSNVGEVVCIFLTAILGLPEALIPVQLLWVNLVTDGLPATALGFNPPDLDIMEKLPRSPREALISGWLFFRYLAIGVYVGLATVAAATWWFVYDAEGPHINFYQLRNFLKCSEDNPLFAGIDCEVFESRFPTTMALSVLVTIEMCNALNSVSENQSLLRMPPWMNPWLLVAVAMSMALHFLILLVPPLPLIFQVTPLSGRQWVVVLQISLPVILLDEALKYLSRNHMHEEMSQK

SEQ ID NO: 906177 - protein, 1064 aa, Homo sapiens
RRVRSQHGHGLARRPPGPESPAPRFVAPRRRGGLDGADGADGRAGGMEAAHLLPAADVLRHFSVTAEGGLSPAQVTGARERYGPNELPSEEGKSLWELVLEQFEDLLVRILLLAALVSFVLAWFEEGEETTTAFVEPLVIMLILVANAIVGVWQERNAESAIEALKEYEPEMGKVIRSDRKGVQRIRARDIVPGDIVEVAVGDKVPADLRLIEIKSTTLRVDQSILTGESVSVTKHTEAIPDPRAVNQDKKNMLFSGTNITSGKAVGVAVATGLHTELGKIRSQMAAVEPERTPLQRKLDEFGRQLSHAISVICVAVWVINIGHFADPAHGGSWLRGAVYYFKIAVALAVAAIPEGLPAVITTCLALGTRRMARKNAIVRSLPSVETLGCTSVICSDKTGTLTTNQMSVCRMFVVAEADAGSCLLHEFTISGTTYTPEGEVRQGDQPVRCGQFDGLVELATICALCNDSALDYNEAKGVYEKVGEATETALTCLVEKMNVFDTDLQALSRVERAGACNTVIKQLMRKEFTLEFSRDRKSMSVYCTPTRPHPTGQGSKMFVKGAPESVIERCSSVRVGSRTAPLTPTSREQILAKIRDWGSGSDTLRCLALATRDAPPRKEDMELDDCSKFVQYETDLTFVGCVGMLDPPRPEVAACITRCYQAGIRVVMITGDNKGTAVAICRRLGIFGDTEDVAGKAYTGREFDDLSPEQQRQACRTARCFARVEPAHKSRIVENLQSFNEITAMTGDGVNDAPALKKAEIGIAMGSGTAVAKSAAEMVLSDDNFASIVAAVEEGRAIYSNMKQFIRYLISSNVGEVVCIFLTAILGLPEALIPVQLLWVNLVTDGLPATALGFNPPDLDIMEKLPRSPREALISGWLFFRYLAIGVYVGLATVAAATWWFVYDAEGPHINFYQLRNFLKCSEDNPLFAGIDCEVFESRFPTTMALSVLVTIEMCNALNSVSENQSLLRMPPWMNPWLLVAVAMSMALHFLILLVPPLPVSHPACPTALVPGHHRPWAGHWTSLAPLQWKLPGGEGAHFPGDPTERAPVGGGAPDISACHPAG

SEQ ID NO: 906178 - protein, 632 aa, Homo sapiens
RRVRSQHGHGLARRPPGPESPAPRFVAPRRRGGLDGADGADGRAGGMEAAHLLPAADVLRHFSVTAEGGLSPAQVTGARERYGPNELPSEEGKSLWELVLEQFEDLLVRILLLAALVSFVLAWFEEGEETTTAFVEPLVIMLILVANAIVGVWQERNAESAIEALKEYEPEMGKVIRSDRKGVQRIRARDIVPGDIVEVAVGDKVPADLRLIEIKSTTLRVDQSILTGESVSVTKHTEAIPDPRAVNQDKKNMLFSGTNITSGKAVGVAVATGLHTELGKIRSQMAAVEPERTPLQRKLDEFGRQLSHAISVICVAVWVINIGHFADPAHGGSWLRGAVYYFKIAVALAVAAIPEGLPAVITTCLALGTRRMARKNAIVRSLPSVETLGCTSVICSDKTGTLTTNQMSVCRMFVVAEADAGSCLLHEFTISGTTYTPEGEVRQGDQPVRCGQFDGLVELATICALCNDSALDSTVYVGLATVAAATWWFVYDAEGPHINFYQLRNFLKCSEDNPLFAGIDCEVFESRFPTTMALSVLVTIEMCNALNSVSENQSLLRMPPWMNPWLLVAVAMSMALHFLILLVPPLPLIFQVTPLSGRQWVVVLQISLPVILLDEALKYLSRNHMHEEMSQK

SEQ ID NO: 906179 - protein, 1045 aa, Homo sapiens; identical to SEQ ID NO: 906176

SEQ ID NO: 906180 - protein, 269 aa, Homo sapiens
MVPMCSPPPPTLATTLAHLPTGSRRINDRPEVRMAIPGPRPGVSVPTSFWPGRSVIPVSWTLLGSSLLCSSGPGAAGWEGAAKKPELAAYPEIRGPPTPKSRVQLELAPPCSEAGRSLGDWCLCTDGGLWGSFLPALTSLFVPGLGLGQPWGIRRGHLGPAVYSEGGQPPPLHSASTKSAPESSRLLLFICAGPGRVKGQRDGHKEPAGGRSEDVLSRETSRESLAGLPQPRAPPGLRVPRPELGRCSESHCRPVCHAEVQLATRVPGT

SEQ ID NO: 906181 - protein, 1045 aa, Homo sapiens; identical to SEQ ID NO: 906176

SEQ ID NO: 906182 - protein, 302 aa, Homo sapiens
RRVRSQHGHGLARRPPGPESPAPRFVAPRRRGGLDGADGADGRAGGMEAAHLLPAADVLRHFSVTAEGGLSPAQVTGARERYGPNELPSEEGKSLWELVLEQFEDLLVRILLLAALVSFVLAWFEEGEETTTAFVEPLVIMLILVANAIVGVWQERNAESAIEALKEYEPEMGKVIRSDRKGVQRIRARDIVPGDIVEVAVGDKVPADLRLSPARLLDSGFPVLSSGDVQSHTAARSATQRSNLPPASLVPETTDILRFLTVAPFYPAQCAAAALSAQLGASEPGGLPGLLASLLAPSPRHP

SEQ ID NO: 906183 - protein, 110 aa, Homo sapiens
LQALGPRVWQMLIDQPGPTTGIEGRCLQTTGLREEKGGSLQGIQGIIRQGKQTPENHRHSLQPVSSLPRMYVGLATVAAATWWFVYDAEGPHINFYQLVSKGWPGSLLNL

SEQ ID NO: 906184 - protein, 1045 aa, Homo sapiens; identical to SEQ ID NO: 906176

SEQ ID NO: 906185 - protein, 1145 aa, Homo sapiens
RRVRSQHGHGLARRPPGPESPAPRFVAPRRRGGLDGADGADGRAGGMEAAHLLPAADVLRHFSVTAEGGLSPAQVTGARERYGPNELPSEEGKSLWELVLEQFEDLLVRILLLAALVSFVLAWFEEGEETTTAFVEPLVIMLILVANAIVGVWQERNAESAIEALKEYEPEMGKVIRSDRKGVQRIRARDIVPGDIVEVAVGDKVPADLRLIEIKSTTLRVDQSILTGESVSVTKHTEAIPDPRAVNQDKKNMLFSGTNITSGKAVGVAVATGLHTELGKIRSQMAAVEPERTPLQRKLDEFGRQLSHAISVICVAVWVINIGHFADPAHGGSWLRGAVYYFKIAVALAVAAIPEGLPAVITTCLALGTRRMARKNAIVRSLPSVETLGCTSVICSDKTGTLTTNQMSVCRMFVVAEADAGSCLLHEFTISGTTYTPEGEVRQGDQPVRCGQFDGLVELATICALCNDSALDYNEAKGVYEKVGEATETALTCLVEKMNVFDTDLQALSRVERAGACNTVIKQLMRKEFTLEFSRDRKSMSVYCTPTRPHPTGQGSKMFVKGAPESVIERCSSVRVGSRTAPLTPTSREQILAKIRDWGSGSDTLRCLALATRDAPPRKEDMELDDCSKFVQYETDLTFVGCVGMLDPPRPEVAACITRCYQAGIRVVMITGDNKGTAVAICRRLGIFGDTEDVAGKAYTGREFDDLSPEQQRQACRTARCFARVEPAHKSRIVENLQSFNEITAMTGDGVNDAPALKKAEIGIAMGSGTAVAKSAAEMVLSDDNFASIVAAVEEGRAIYSNMKQFIRYLISSNVGEVVCIFLTAILGLPEALIPVQLLWVNLVTDGLPATALGFNPPDLDIMEKLPRSPREALISGWLFFRYLAIGVYVGLATVAAATWWFVYDAEGPHINFYQLRNFLKCSEDNPLFAGIDCEVFESRFPTTMALSVLVTIEMCNALNSVSENQSLLRMPPWMNPWLLVAVAMSMALHFLILLVPPLPLIFQVTPLSGRQWVVVLQISLPVILLDEALKYLSRNHMHGEWEAPSRLQPASPPASAPGLQWTLWVWSAEPLCLHIGEAFSDHQVEGVKGLWWLGPKVSAGSCTAGDLGSLGQQREHLLGHTASLSSPATPYMARALCALLGLSL

SEQ ID NO: 906186 - protein, 870 aa, Homo sapiens
GPPSKIRPLGRIRLGTSSHGHGEVAVGDKVPADLRLIEIKSTTLRVDQSILTGESVSVTKHTEAIPDPRAVNQDKKNMLFSGTNITSGKAVGVAVATGLHTELGKIRSQMAAVEPERTPLQRKLDEFGRQLSHAISVICVAVWVINIGHFADPAHGGSWLRGAVYYFKIAVALAVAAIPEGLPAVITTCLALGTRRMARKNAIVRSLPSVETLGCTSVICSDKTGTLTTNQMSVCRMFVVAEADAGSCLLHEFTISGTTYTPEGEVRQGDQPVRCGQFDGLVELATICALCNDSALDYNEAKGVYEKVGEATETALTCLVEKMNVFDTDLQALSRVERAGACNTVIKQLMRKEFTLEFSRDRKSMSVYCTPTRPHPTGQGSKMFVKGAPESVIERCSSVRVGSRTAPLTPTSREQILAKIRDWGSGSDTLRCLALATRDAPPRKEDMELDDCSKFVQYETDLTFVGCVGMLDPPRPEVAACITRCYQAGIRVVMITGDNKGTAVAICRRLGIFGDTEDVAGKAYTGREFDDLSPEQQRQACRTARCFARVEPAHKSRIVENLQSFNEITAMTGDGVNDAPALKKAEIGIAMGSGTAVAKSAAEMVLSDDNFASIVAAVEEGRAIYSNMKQFIRYLISSNVGEVVCIFLTAILGLPEALIPVQLLWVNLVTDGLPATALGFNPPDLDIMEKLPRSPREALISGWLFFRYLAIGVYVGLATVAAATWWFVYDAEGPHINFYQLRNFLKCSEDNPLFAGIDCEVFESRFPTTMALSVLVTIEMCNALNSVSENQSLLRMPPWMNPWLLVAVAMSMALHFLILLVPPLPLIFQVTPLSGRQWVVVLQISLPVILLDEALKYLSRNHMHEEMSQK

SEQ ID NO: 906187 - protein, 183 aa, Homo sapiens [sequence omitted]

SEQ ID NO: 906188 - protein, 1072 aa, Homo sapiens
RRVRSQHGHGLARRPPGPESPAPRFVAPRRRGGLDGADGADGRAGGMEAAHLLPAADVLRHFSVTAEGGLSPAQVTGARERYGPNELPSEEGKSLWELVLEQFEDLLVRILLLAALVSFVLAWFEEGEETTTAFVEPLVIMLILVANAIVGVWQERNAESAIEALKEYEPEMGKVIRSDRKGVQRIRARDIVPGDIVEVAVGDKVPADLRLIEIKSTTLRVDQSILTGESVSVTKHTEAIPDPRAVNQDKKNMLFSGTNITSGKAVGVAVATGLHTELGKIRSQMAAVEPERTPLQRKLDEFGRQLSHAISVICVAVWVINIGHFADPAHGGSWLRGAVYYFKIAVALAVAAIPEGLPAVITTCLALGTRRMARKNAIVRSLPSVETLGCTSVICSDKTGTLTTNQMSVCRMFVVAEADAGSCLLHEFTISGTTYTPEGEVRQGDQPVRCGQFDGLVELATICALCNDSALDYNEAKGVYEKVGEATETALTCLVEKMNVFDTDLQALSRVERAGACNTVIKQLMRKEFTLEFSRDRKSMSVYCTPTRPHPTGQGSKMFVKGAPESVIERCSSVRVGSRTAPLTPTSREQILAKIRDWGSGSDTLRCLALATRDAPPRKEDMELDDCSKFVQYETDLTFVGCVGMLDPPRPEVAACITRCYQAGIRVVMITGDNKGTAVAICRRLGIFGDTEDVAGKAYTGREFDDLSPEQQRQACRTARCFARVEPAHKSRIVENLQSFNEITAMTGDGVNDAPALKKAEIGIAMGSGTAVAKSAAEMVLSDDNFASIVAAVEEGRAIYSNMKQFIRYLISSNVGEVVCIFLTAILGLPEALIPVQLLWVNLVTDGLPATALGFNPPDLDIMEKLPRSPREALISGWLFFRYLAIGVYVGLATVAAATWWFVYDAEGPHINFYQLRNFLKCSEDNPLFAGIDCEVFESRFPTTMALSVLVTIEMCNALNSVSENQSLLRMPPWMNPWLLVAVAMSMALHFLILLVPPLPLIFQVTPLSGRQWVVVLQISLPVILLDEALKYLSRNHMHACLYPGLLRTVSQAWSRQPLTTSWTPDHTGLKK

SEQ ID NO: 906189 - protein, 940 aa, Homo sapiens
RRVRSQHGHGLARRPPGPESPAPRFVAPRRRGGLDGADGADGRAGGMEAAHLLPAADVLRHFSVTAEGGLSPAQVTGARERYGPNELPSEEGKSLWELVLEQFEDLLVRILLLAALVSFVLAWFEEGEETTTAFVEPLVIMLILVANAIVGVWQERNAESAIEALKEYEPEMGKVIRSDRKGVQRIRARDIVPGDIVEVAVGDKVPADLRLIEIKSTTLRVDQSILTGESVSVTKHTEAIPDPRAVNQDKKNMLFSGTNITSGKAVGVAVATGLHTELGKIRSQMAAVEPERTPLQRKLDEFGRQLSHAISVICVAVWVINIGHFADPAHGGSWLRGAVYYFKIAVALAVAAIPEGLPAVITTCLALGTRRMARKNAIVRSLPSVETLGCTSVICSDKTGTLTTNQMSVCRMFVVAEADAGSCLLHEFTISGTTYTPEGEVRQGDQPVRCGQFDGLVELATICALCNDSALDYNEAKGVYEKVGEATETALTCLVEKMNVFDTDLQALSRVERAGACNTVIKQLMRKEFTLEFSRDRKSMSVYCTPTRPHPTGQGSKMFVKGAPESVIERCSSVRVGSRTAPLTPTSREQILAKIRDWGSGSDTLRCLALATRDAPPRKEDMELDDCSKFVQYETDLTFVGCVGMLDPPRPEVAACITRCYQAGIRVVMITGDNKGTAVAICRRLGIFGDTEDVAGKAYTGREFDDLSPEQQRQACRTARCFARVEPAHKSRIVENLQSFNEITAMTGDGVNDAPALKKAEIGIAMGSGTAVAKSAAEMVLSDDNFASIVAAVEEGRAIYSNMKQFIRYLISSNVGEVVCIFLTAILGLPEALIPVQLLWVNLVTDGLPATALGFNPPDLDIMEKLPRSPREALISGWLFFRYLAIGVYVGLATVAAATWWFVYDAEGPHINFYQLVSKGWPGSLLNLQLELLEFQGRWV

SEQ ID NO: 906190 - protein, 820 aa, Homo sapiens
RRVRSQHGHGLARRPPGPESPAPRFVAPRRRGGLDGADGADGRAGGMEAAHLLPAADVLRHFSVTAEGGLSPAQVTGARERYGPNELPSEEGKSLWELVLEQFEDLLVRILLLAALVSFVLAWFEEGEETTTAFVEPLVIMLILVANAIVGVWQERNAESAIEALKEYEPEMGKVIRSDRKGVQRIRARDIVPGDIVEVAVGDKVPADLRLIEIKSTTLRVDQSILTGESVSVTKHTEAIPDPRAVNQDKKNMLFSGTNITSGKAVGVAVATGLHTELGKIRSQMAAVEPERTPLQRKLDEFGRQLSHAISVICVAVWVINIGHFADPAHGGSWLRGAVYYFKIAVALAVAAIPEGLPAVITTCLALGTRRMARKNAIVRSLPSVETLGCTSVICSDKTGTLTTNQMSVCRMFVVAEADAGSCLLHEFTISGTTYTPEGEVRQGDQPVRCGQFDGLVELATICALCNDSALDYNEAKGVYEKVGEATETALTCLVEKMNVFDTDLQALSRVERAGACNTVIKQLMRKEFTLEFSRDRKSMSVYCTPTRPHPTGQGSKMFVKGAPESVIERCSSVRVGSRTAPLTPTSREQILAKIRDWGSGSDTLRCLALATRDAPPRKEDMELDDCSKFVQYETDLTFVGCVGMLDPPRPEVAACITRCYQAGIRVVMITGDNKGTAVAICRRLGIFGDTEDVAGKAYTGREFDDLSPEQQRQACRTARCFARVEPAHKSRIVENLQSFNEITAMTGDGVNDAPALKKAEIGIAMGSGTAVAKSAAEMVLSDDNFASIVAAVEEGRAIYSNMKQFIRYLISSNVGEVVW

SEQ ID NO: 906191 - protein, 453 aa, Homo sapiens
CDFPFRIPRYILGTGGPVWLLYRRITGGGIHTAQNSWILLSLCQGKIPWRRPCSDMEGAALLRVSVLCIWMSALFLGVGVRAEEAGARVQQNVPSGTDTGDPQSKPLGDWAAGTMDPESSIFIEDAIKYFKEKVSTQNLLLLLTDNEAWNGFVAAAELPRNEADELRKALDNLARQMIMKDKNWHDKGQQYRNWFLKEFPRLKSKLEDNIRRLRALADGVQKVHKGTTIANVVSGSLSISSGILTLVGMGLAPFTEGGSLVLLEPGMELGITAALTGITSSTIDYGKKWWTQAQAHDLVIKSLDKLKEVKEFLGENISNFLSLAGNTYQLTRGIGKDIRALRRARANLQSVPHASASRPRVTEPISAESGEQVERVNEPSILEMSRGVKLTDVAPVSFFLVLDVVYLVYESKHLHEGAKSETAEELKKVAQELEEKLNILNNNYKILQADQEL

SEQ ID NO: 906192 - protein, 454 aa, Homo sapiens
HTVLGSEAARYILGTGGPVWLLYRRITGGGIHTAQNSWILLSLCQGKIPWRRPCSDMEGAALLRVSVLCIWMSALFLGVGVRAEEAGARVQQNVPSGTDTGDPQSKPLGDWAAGTMDPESSIFIEDAIKYFKEKVSTQNLLLLLTDNEAWNGFVAAAELPRNEADELRKALDNLARQMIMKDKNWHDKGQQYRNWFLKEFPRLKSKLEDNIRRLRALADGVQKVHKGTTIANVVSGSLSISSGILTLVGMGLAPFTEGGSLVLLEPGMELGITAALTGITSSTIDYGKKWWTQAQAHDLVIKSLDKLKEVKEFLGENISNFLSLAGNTYQLTRGIGKDIRALRRARANLQSVPHASASRPRVTEPISAESGEQVERVNEPSILEMSRGVKLTDVAPVSFFLVLDVVYLVYESKHLHEGAKSETAEELKKVAQELEEKLNILNNNYKILQADQEL

SEQ ID NO: 906193 - protein, 454 aa, Homo sapiens; identical to SEQ ID NO: 906192

SEQ ID NO: 906194 - protein, 454 aa, Homo sapiens; identical to SEQ ID NO: 906192

SEQ ID NO: 906195 - protein, 454 aa, Homo sapiens; identical to SEQ ID NO: 906192

SEQ ID NO: 906196 - protein, 357 aa, Homo sapiens
MQWLLCTPTLSSNLILSSFQLESSIFIEDAIKYFKEKVSTQNLLLLLTDNEAWNGFVAAAELPRNEADELRKALDNLARQMIMKDKNWHDKGQQYRNWFLKEFPRLKSKLEDNIRRLRALADGVQKVHKGTTIANVVSGSLSISSGILTLVGMGLAPFTEGGSLVLLEPGMELGITAALTGITSSTIDYGKKWWTQAQAHDLVIKSLDKLKEVKEFLGENISNFLSLAGNTYQLTRGIGKDIRALRRARANLQSVPHASASRPRVTEPISAESGEQVERVNEPSILEMSRGVKLTDVAPVSFFLVLDVVYLVYESKHLHEGAKSETAEELKKVAQELEEKLNILNNNYKILQADQEL

SEQ ID NO: 906197 - protein, 137 aa, Homo sapiens
MEDLGISAGNTYQLTRGIGKDIRALRRARANLQSVPHASASRPRVTEPISAESGEQVERVNEPSILEMSRGVKLTDVAPVSFFLVLDVVYLVYESKHLHEGAKSETAEELKKVAQELEEKLNILNNNYKILQADQEL

SEQ ID NO: 906198 - protein, 414 aa, Homo sapiens [sequence omitted]

SEQ ID NO: 906199 - protein, 454 aa, Homo sapiens; identical to SEQ ID NO: 906192

SEQ ID NO: 906200 - protein, 454 aa, Homo sapiens; identical to SEQ ID NO: 906192

SEQ ID NO: 906201 - protein, 398 aa, Homo sapiens
MEGAALLRVSVLCIWMSALFLGVGVRAEEAGARVQQNVPSGTDTGDPQSKPLGDWAAGTMDPESSIFIEDAIKYFKEKVSTQNLLLLLTDNEAWNGFVAAAELPRNEADELRKALDNLARQMIMKDKNWHDKGQQYRNWFLKEFPRLKSKLEDNIRRLRALADGVQKVHKGTTIANVVSGSLSISSGILTLVGMGLAPFTEGGSLVLLEPGMELGITAALTGITSSTIDYGKKWWTQAQAHDLVIKSLDKLKEVKEFLGENISNFLSLAGNTYQLTRGIGKDIRALRRARANLQSVPHASASRPRVTEPISAESGEQVERVNEPSILEMSRGVKLTDVAPVSFFLVLDVVYLVYESKHLHEGAKSETAEELKKVAQELEEKLNILNNNYKILQADQEL

SEQ ID NO: 906202 - protein, 188 aa, Homo sapiens
HTVLGSEAARYILGTGGPVWLLYRRITGGGIHTAQNSWILLSLCQGKIPWRRPCSDMEGAALLRVSVLCIWMSALFLGVGVRAEEAGARVQQNVPSGTDTGDPQSKPLGDWAAGTMDPESSIFIEDAIKYFKEKVSTQNLLLLLTDNEAWNGFVAAAELPRNEADELRKALDNELAVSRDIATALQPG

SEQ ID NO: 906203 - protein, 421 aa, Homo sapiens
MAAGFGRCCRVLRSISRFHWRSQHTKANRQREPGLGFSFEFTEQQKEFQATARKFAREEIIPVAAEYDKTGEYPVPLIRRAWELGLMNTHIPENCGGLGLGTFDACLISEELAYGCTGVQTAIEGNSLGQMPIIIAGNDQQKKKYLGRMTEEPLMCAYCVTEPGAGSDVAGIKTKAEKKGDEYIINGQKMWITNGGKANWYFLLARSDPDPKAPANKAFTGFIVEADTPGIQIGRKELNMGQRCSDTRGIVFEDVKVPKENVLIGDGAGFKVAMGAFDKTRPVVAAGAVGLAQRALDEATKYALERKTFGKLLVEHQAISFMLAEMAMKVELARMSYQRAAWEVDSGRRNTYYASIAKAFAGDIANQLATDAVQILGGNGFNTEYPVEKLMRDAKIYQIYEGTSQIQRLIVAREHIDKYKN

SEQ ID NO: 906204 - protein, 421 aa, Homo sapiens; identical to SEQ ID NO: 906203

SEQ ID NO: 906205 - protein, 385 aa, Homo sapiens
MLQEFTEQQKEFQATARKFAREEIIPVAAEYDKTGEYPVPLIRRAWELGLMNTHIPENCGGLGLGTFDACLISEELAYGCTGVQTAIEGNSLGQMPIIIAGNDQQKKKYLGRMTEEPLMCAYCVTEPGAGSDVAGIKTKAEKKGDEYIINGQKMWITNGGKANWYFLLARSDPDPKAPANKAFTGFIVEADTPGIQIGRKELNMGQRCSDTRGIVFEDVKVPKENVLIGDGAGFKVAMGAFDKTRPVVAAGAVGLAQRALDEATKYALERKTFGKLLVEHQAISFMLAEMAMKVELARMSYQRAAWEVDSGRRNTYYASIAKAFAGDIANQLATDAVQILGGNGFNTEYPVEKLMRDAKIYQIYEGTSQIQRLIVAREHIDKYKN

SEQ ID NO: 906206 - protein, 407 aa, Homo sapiens
MAAGFGRCCRVLRSISRFHWRSQHTKANRQREPGLGFSFEFTEQQKEFQATARKFAREEIIPVAAEYDKTGEMNTHIPENCGGLGLGTFDACLISEELAYGCTGVQTAIEGNSLGQMPIIIAGNDQQKKKYLGRMTEEPLMCAYCVTEPGAGSDVAGIKTKAEKKGDEYIINGQKMWITNGGKANWYFLLARSDPDPKAPANKAFTGFIVEADTPGIQIGRKELNMGQRCSDTRGIVFEDVKVPKENVLIGDGAGFKVAMGAFDKTRPVVAAGAVGLAQRALDEATKYALERKTFGKLLVEHQAISFMLAEMAMKVELARMSYQRAAWEVDSGRRNTYYASIAKAFAGDIANQLATDAVQILGGNGFNTEYPVEKLMRDAKIYQIYEGTSQIQRLIVAREHIDKYKN

SEQ ID NO: 906207 - protein, 291 aa, Homo sapiens
MPIIIAGNDQQKKKYLGRMTEEPLMCAYCVTEPGAGSDVAGIKTKAEKKGDEYIINGQKMWITNGGKANWYFLLARSDPDPKAPANKAFTGFIVEADTPGIQIGRKELNMGQRCSDTRGIVFEDVKVPKENVLIGDGAGFKVAMGAFDKTRPVVAAGAVGLAQRALDEATKYALERKTFGKLLVEHQAISFMLAEMAMKVELARMSYQRAAWEVDSGRRNTYYASIAKAFAGDIANQLATDAVQILGGNGFNTEYPVEKLMRDAKIYQIYEGTSQIQRLIVAREHIDKYKN

SEQ ID NO: 906208 - protein, 414 aa, Homo sapiens
MAAGFGRCCRVLRSISRFHWRSQHTKANRQREPGLGFSFEFTEQQKEFQATARKFAREEIIPVAAEYDKTGEYPVPLIRRAWELGLMNTHIPENCGGLGLGTFDACLISEELAYGCTGVQTAIEGNSLGQMPIIIAGNDQQKKKYLGRMTEEPLMCAYCVTEPGAGSDVAGIKTKAEKKGDEYIINGQKMWITNGGKANWYFLLARSDPDPKAPANKAFTGFIVEADTPGIQIGRKELNMGQRCSDTRGIVFEDVKVPKENVLIGDGAGFKVAMGAFDKTRPVVAAGAVGLAQRALDEATKYALERKTFGKLLVEHQAISFMLAEMAMKVELARMSYQRAAWEVDSGRRNTYYASIAKAFAGDIANQLATDAVQILGGNGFNTEYPVEKLMRDAKIYQVRLKMIFLVCKEREYS

SEQ ID NO: 906209 - protein, 421 aa, Homo sapiens; identical to SEQ ID NO: 906203

SEQ ID NO: 906210 - protein, 407 aa, Homo sapiens
MAAGFGRCCRVLRSISRFHWRSQHTKANRQREPGLGFSFEFTEQQKEFQATARKFAREEIIPVAAEYDKTGEYPVPLIRRAWELGLMNTHIPENCGGLGLGTFDACLISEELAYGCTGVQTAIEGNSLGQMPIIIAGNDQQKKKYLGRMTEEPLMCAYCVTEPGAGSDVAGIKTKAEKKGDEYIINGQKMWITNGGKANCANKAFTGFIVEADTPGIQIGRKELNMGQRCSDTRGIVFEDVKVPKENVLIGDGAGFKVAMGAFDKTRPVVAAGAVGLAQRALDEATKYALERKTFGKLLVEHQAISFMLAEMAMKVELARMSYQRAAWEVDSGRRNTYYASIAKAFAGDIANQLATDAVQILGGNGFNTEYPVEKLMRDAKIYQIYEGTSQIQRLIVAREHIDKYKN

SEQ ID NO: 906211 - protein, 201 aa, Homo sapiens
MAAGFGRCCRVLRSISRFHWRSQHTKANRQREPGLGFSFEFTEQQKEFQATARKFAREEIIPVAAEYDKTGEYPVPLIRRAWELGLMNTHIPENCGGLGLGTFDACLISEELAYGCTGVQTAIEGNSLGQMPIIIAGNDQQKKKYLGRMTEEPLMCAYCVTEPGAGSDVAGIKTKAEKKGDEYIINGQKMWITNGGKANWN

SEQ ID NO: 906212 - protein, 368 aa, Homo sapiens
MLQEFTEQQKEFQATARKFAREEIIPVAAEYDKTGEKHFDTVGGLGLGTFDACLISEELAYGCTGVQTAIEGNSLGQMPIIIAGNDQQKKKYLGRMTEEPLMCAYCVTEPGAGSDVAGIKTKAEKKGDEYIINGQKMWITNGGKANWYFLLARSDPDPKAPANKAFTGFIVEADTPGIQIGRKELNMGQRCSDTRGIVFEDVKVPKENVLIGDGAGFKVAMGAFDKTRPVVAAGAVGLAQRALDEATKYALERKTFGKLLVEHQAISFMLAEMAMKVELARMSYQRAAWEVDSGRRNTYYASIAKAFAGDIANQLATDAVQILGGNGFNTEYPVEKLMRDAKIYQIYEGTSQIQRLIVAREHIDKYKN

SEQ ID NO: 906213 - protein, 102 aa, Homo sapiens
MAAGFGRCCRVLRSISRFHWRSQHTKANRQREPGLGFSFEFTEQQKEFQATARKFAREEIIPVAAEYDKTGEYPVPLIRRAWELGLMNTHIPENCGKLSLYF

SEQ ID NO: 906214 - protein, 155 aa, Homo sapiens
KESLYHKKVLDYVICVCAASGVLFPNPRIGDHFNQFGHQENCQNEEILNSLKYVRPGGGYQPTFTLVQKCEVNGQNEHPVFAYLKDKLPYPYDDPFSLMTDPKLIIWSPVRRSDVAWNFEKFLIGPEGEPFRRYSRTFPTINIEPDIKRLLKVAI

SEQ ID NO: 906215 - protein, 126 aa, Homo sapiens
MTSVPSAWMGENCQNEEILNSLKYVRPGGGYQPTFTLVQKCEVNGQNEHPVFAYLKDKLPYPYDDPFSLMTDPKLIIWSPVRRSDVAWNFEKFLIGPEGEPFRRYSRTFPTINIEPDIKRLLKVAI

SEQ ID NO: 906216 - protein, 139 aa, Homo sapiens
AIAVFLRGLVVLGYTLIIYSRSEENCQNEEILNSLKYVRPGGGYQPTFTLVQKCEVNGQNEHPVFAYLKDKLPYPYDDPFSLMTDPKLIIWSPVRRSDVAWNFEKFLIGPEGEPFRRYSRTFPTINIEPDIKRLLKVAI

SEQ ID NO: 906217 - protein, 86 aa, Homo sapiens
MTDPKLIIWSPVRRSDVAWNFEKFLIGPEGEPFRRYSRTFPTINIEPDIKRLRSSCRIRSSCRIRSSCRIRSSCRIRSSCRIRSSC

SEQ ID NO: 906218 - protein, 226 aa, Homo sapiens
MWLRSEAQPPGTSPSSTSCNAAFPGAWWSLASLATNLDIRAGETEVANPLSRCPSSPRSTSSLTPSLQPSKLLEGVYNLPGASQPFVSRNRNLPGYQWLTPIIPALWEAKENCQNEEILNSLKYVRPGGGYQPTFTLVQKCEVNGQNEHPVFAYLKDKLPYPYDDPFSLMTDPKLIIWSPVRRSDVAWNFEKFLIGPEGEPFRRYSRTFPTINIEPDIKRLLKVAI

SEQ ID NO: 906219 - protein, 150 aa, Homo sapiens
MTLGRECRRVKEFHVVDLSLPPPTVHALCLFPPQENCQNEEILNSLKYVRPGGGYQPTFTLVQKCEVNGQNEHPVFAYLKDKLPYPYDDPFSLMTDPKLIIWSPVRRSDVAWNFEKFLIGPEGEPFRRYSRTFPTINIEPDIKRLLKVAI

SEQ ID NO: 906220 - protein, 227 aa, Homo sapiens
VVARLGVNRPRGKILSVDGNKITIMPKHEDLKDMLEFPAQELRKYFKMGDHVKVIAGRFEGDTGLIVRVEENFVILFSDLTMHELKVLPRDLQLCSETASGVDVGGQHEWGELVQLDPQTVGVIVRLERETFQVLNMYGKVVTVRHQAVTRKKDNRFAVALDSEQNNIHVKDIVKVIDGPHSGREGEIRHLFRSFAFLHCKKLVENGGMFVCKTRHLVLAGGSKPVM

SEQ ID NO: 906221 - protein, 1112 aa, Homo sapiens
RQPQSGVVRTAAGTEGGGGAREQRKMSDSEDSNFSEEEDSERSSDGEEAEVDEERRSAAGSEKEEEPEDEEEEEEEEEYDEEEEEEDDDRPPKKPRHGGFILDEADVDDEYEDEDQWEDGAEDILEKEEIEASNIDNVVLDEDRSGARRLQNLWRDQREEELGEYYMKKYAKSSVGETVYGGSDELSDDITQQQLLPGVKDPNLWTVKCKIGEERATAISLMRKFIAYQFTDTPLQIKSVVAPEHVKGYIYVEAYKQTHVKQAIEGVGNLRLGYWNQQMVPIKEMTDVLKVVKEVANLKPKSWVRLKRGIYKDDIAQVDYVEPSQNTISLKMIPRIDYDRIKARMSLKDWFAKRKKFKRPPQRLFDAEKIRSLGGDVASDGDFLIFEGNRYSRKGFLFKSFAMSAVITEGVKPTLSELEKFEDQPEGIDLEVVTESTGKEREHNFQPGDNVEVCEGELINLQGKILSVDGNKITIMPKHEDLKDMLEFPAQELRKYFKMGDHVKVIAGRFEGDTGLIVRVEENFVILFSDLTMHELKVLPRDLQLCSETASGVDVGGQHEWGELVQLDPQTVGVIVRLERETFQVLNMYGKVVTVRHQAVTRKKDNRFAVALDSEQNNIHVKDIVKVIDGPHSGREGEIRHLFRSFAFLHCKKLVENGGMFVCKTRHLVLAGGSKPRDVTNFTVGGFAPMSPRISSPMHPSAGGQRGGFGSPGGGSGGMSRGRGRRDNELIGQTVRISQGPYKGYIGVVKDATESTARVELHSTCQTISVDRQRLTTVGSRRPGGMTSTYGRTPMYGSQTPMYGSGSRTPMYGSQTPLQDGSRTPHYGSQTPLHDGSRTPAQSGAWDPNNPNTPSRAEEEYEYAFDDEPTPSPQAYGGTPNPQTPGYPDPSSPQVNPQYNPQTPGTPAMYNTDQFSPYAAPSPQGSYQPSPSPQSYHQVAPSPAGYQNTHSPASYHPTPSPMAYQASPSPSPVGYSPMTPGAPSPGGYNPHTPGSGIEQNSSDWVTTDIQVKVRDTYLDTQVVGQTGVIRSVTGGMCSVYLKDSEKVVSISSEHLEPITPTKNNKVKVILGEDREATGVLLSIDGEDGIVRMDLDEQLKILNLRFLGKLLEA

SEQ ID NO: 906222 - protein, 1145 aa, Homo sapiens
RQPQSGVVRTAAGTEGGGGAREGTSGETEARGGAQDCGTRQGCCLSQQQRKMSDSEDSNFSEEEDSERSSDGEEAEVDEERRSAAGSEKEEEPEDEEEEEEEEEYDEEEEEEDDDRPPKKPRHGGFILDEADVDDEYEDEDQWEDGAEDILEKEEIEASNIDNVVLDEDRSGARRLQNLWRDQREEELGEYYMKKYAKSSVGETVYGGSDELSDDITQQQLLPGVKDPNLWTVKCKIGEERATAISLMRKFIAYQFTDTPLQIKSVVAPEHVKGYIYVEAYKQTHVKQAIEGVGNLRLGYWNQQMVPIKEMTDVLKVVKEVANLKPKSWVRLKRGIYKDDIAQVDYVEPSQNTISLKMIPRIDYDRIKARMSLKDWFAKRKKFKRPPQRLFDAEKIRSLGGDVASDGDFLIFEGNRYSRKGFLFKSFAMSAVITEGVKPTLSELEKFEDQPEGIDLEVVTESTALQTAPAGKEREHNFQPGDNVEVCEGELINLQGKILSVDGNKITIMPKHEDLKDMLEFPAQELRKYFKMGDHVKVIAGRFEGDTGLIVRVEENFVILFSDLTMHELKVLPRDLQLCSETASGVDVGGQHEWGELVQLDPQTVGVIVRLERETFQVLNMYGKVVTVRHQAVTRKKDNRFAVALDSEQNNIHVKDIVKVIDGPHSGREGEIRHLFRSFAFLHCKKLVENGGMFVCKTRHLVLAGGSKPRDVTNFTVGGFAPMSPRISSPMHPSAGGQRGGFGSPGGGSGGMSRGRGRRDNELIGQTVRISQGPYKGYIGVVKDATESTARVELHSTCQTISVDRQRLTTVGSRRPGGMTSTYGRTPMYGSQTPMYGSGSRTPMYGSQTPLQDGSRTPHYGSQTPLHDGSRTPAQSGAWDPNNPNTPSRAEEEYEYAFDDEPTPSPQAYGGTPNPQTPGYPDPSSPQVNPQYNPQTPGTPAMYNTDQFSPYAAPSPQGSYQPSPSPQSYHQVAPSPAGYQNTHSPASYHPTPSPMAYQASPSPSPVGYSPMTPGAPSPGGYNPHTPGSGIEQNSSDWVTTDIQVKVRDTYLDTQVVGQTGVIRSVTGGMCSVYLKDSEKVVSISSEHLEPITPTKNNKVKVILGEDREATGVLLSIDGEDGIVRMDLDEQLKILNLRFLGKLLEA

SEQ ID NO: 906223 - protein, 1136 aa, Homo sapiens
TLEDPQSLMSLLGGGGGAREGTSGETEARGGAQDCGTRQGCCLSQQQRKMSDSEDSNFSEEEDSERSSDGEEAEVDEERRSAAGSEKEEEPEDEEEEEEEEEYDEEEEEEDDDRPPKKPRHGGFILDEADVDDEYEDEDQWEDGAEDILEKEEIEASNIDNVVLDEDRSGARRLQNLWRDQREEELGEYYMKKYAKSSVGETVYGGSDELSDDITQQQLLPGVKDPNLWTVKCKIGEERATAISLMRKFIAYQFTDTPLQIKSVVAPEHVKGYIYVEAYKQTHVKQAIEGVGNLRLGYWNQQMVPIKEMTDVLKVVKEVANLKPKSWVRLKRGIYKDDIAQVDYVEPSQNTISLKMIPRIDYDRIKARMSLKDWFAKRKKFKRPPQRLFDAEKIRSLGGDVASDGDFLIFEGNRYSRKGFLFKSFAMSAVITEGVKPTLSELEKFEDQPEGIDLEVVTESTGKEREHNFQPGDNVEVCEGELINLQGKILSVDGNKITIMPKHEDLKDMLEFPAQELRKYFKMGDHVKVIAGRFEGDTGLIVRVEENFVILFSDLTMHELKVLPRDLQLCSETASGVDVGGQHEWGELVQLDPQTVGVIVRLERETFQVLNMYGKVVTVRHQAVTRKKDNRFAVALDSEQNNIHVKDIVKVIDGPHSGREGEIRHLFRSFAFLHCKKLVENGGMFVCKTRHLVLAGGSKPRDVTNFTVGGFAPMSPRISSPMHPSAGGQRGGFGSPGGGSGGMSRGRGRRDNELIGQTVRISQGPYKGYIGVVKDATESTARVELHSTCQTISVDRQRLTTVGSRRPGGMTSTYGRTPMYGSQTPMYGSGSRTPMYGSQTPLQDGSRTPHYGSQTPLHDGSRTPAQSGAWDPNNPNTPSRAEEEYEYAFDDEPTPSPQAYGGTPNPQTPGYPDPSSPQVNPQYNPQTPGTPAMYNTDQFSPYAAPSPQGSYQPSPSPQSYHQVAPSPAGYQNTHSPASYHPTPSPMAYQASPSPSPVGYSPMTPGAPSPGGYNPHTPGSGIEQNSSDWVTTDIQVKVRDTYLDTQVVGQTGVIRSVTGGMCSVYLKDSEKVVSISSEHLEPITPTKNNKVKVILGEDREATGVLLSIDGEDGIVRMDLDEQLKILNLRFLGKLLEA

SEQ ID NO: 906224 - protein, 1029 aa, Homo sapiens
MRGWDFLCEDVIFLPQGQTLALLAARSYFLQAPALHLPLLTPSAHYFSASNIDNVVLDEDRSGARRLQNLWRDQREEELGEYYMKKYAKSSVGETVYGGSDELSDDITQQQLLPGVKDPNLWTVKCKIGEERATAISLMRKFIAYQFTDTPLQIKSVVAPEHVKGYIYVEAYKQTHVKQAIEGVGNLRLGYWNQQMVPIKEMTDVLKVVKEVANLKPKSWVRLKRGIYKDDIAQVDYVEPSQNTISLKMIPRIDYDRIKARMSLKDWFAKRKKFKRPPQRLFDAEKIRSLGGDVASDGDFLIFEGNRYSRKGFLFKSFAMSAVITEGVKPTLSELEKFEDQPEGIDLEVVTESTGKEREHNFQPGDNVEVCEGELINLQGKILSVDGNKITIMPKHEDLKDMLEFPAQELRKYFKMGDHVKVIAGRFEGDTGLIVRVEENFVILFSDLTMHELKVLPRDLQLCSETASGVDVGGQHEWGELVQLDPQTVGVIVRLERETFQVLNMYGKVVTVRHQAVTRKKDNRFAVALDSEQNNIHVKDIVKVIDGPHSGREGEIRHLFRSFAFLHCKKLVENGGMFVCKTRHLVLAGGSKPRDVTNFTVGGFAPMSPRISSPMHPSAGGQRGGFGSPGGGSGGMSRGRGRRDNELIGQTVRISQGPYKGYIGVVKDATESTARVELHSTCQTISVDRQRLTTVGSRRPGGMTSTYGRTPMYGSQTPMYGSGSRTPMYGSQTPLQDGSRTPHYGSQTPLHDGSRTPAQSGAWDPNNPNTPSRAEEEYEYAFDDEPTPSPQAYGGTPNPQTPGYPDPSSPQVNPQYNPQTPGTPAMYNTDQFSPYAAPSPQGSYQPSPSPQSYHQVAPSPAGYQNTHSPASYHPTPSPMAYQASPSPSPVGYSPMTPGAPSPGGYNPHTPGSGIEQNSSDWVTTDIQVKVRDTYLDTQVVGQTGVIRSVTGGMCSVYLKDSEKVVSISSEHLEPITPTKNNKVKVILGEDREATGVLLSIDGEDGIVRMDLDEQLKILNLRFLGKLLEA

SEQ ID NO: 906225 - protein, 754 aa, Homo sapiens
LSLLIFSPPSNSRSLGGDVASDGDFLIFEGNRYSRKGFLFKSFAMSAVITEGVKPTLSELEKFEDQPEGIDLEVVTESTGKEREHNFQPGDNVEVCEGELINLQGKILSVDGNKITIMPKHEDLKDMLEFPAQELRKYFKMGDHVKVIAGRFEGDTGLIVRVEENFVILFSDLTMHELKVLPRDLQLCSETASGVDVGGQHEWGELVQLDPQTVGVIVRLERETFQVLNMYGKVVTVRHQAVTRKKDNRFAVALDSEQNNIHVKDIVKVIDGPHSGREGEIRHLFRSFAFLHCKKLVENGGMFVCKTRHLVLAGGSKPRDVTNFTVGGFAPMSPRISSPMHPSAGGQRGGFGSPGGGSGGMSRGRGRRDNELIGQTVRISQGPYKGYIGVVKDATESTARVELHSTCQTISVDRQRLTTVGSRRPGGMTSTYGRTPMYGSQTPMYGSGSRTPMYGSQTPLQDGSRTPHYGSQTPLHDGSRTPAQSGAWDPNNPNTPSRAEEEYEYAFDDEPTPSPQAYGGTPNPQTPGYPDPSSPQVNPQYNPQTPGTPAMYNTDQFSPYAAPSPQGSYQPSPSPQSYHQVAPSPAGYQNTHSPASYHPTPSPMAYQASPSPSPVGYSPMTPGAPSPGGYNPHTPGSGIEQNSSDWVTTDIQVKVRDTYLDTQVVGQTGVIRSVTGGMCSVYLKDSEKVVSISSEHLEPITPTKNNKVKVILGEDREATGVLLSIDGEDGIVRMDLDEQLKILNLRFLGKLLEA

SEQ ID NO: 906226 - protein, 549 aa, Homo sapiens
RLGTRLGVEFAEVRLERETFQVLNMYGKVVTVRHQAVTRKKDNRFAVALDSEQNNIHVKDIVKVIDGPHSGREGEIRHLFRSFAFLHCKKLVENGGMFVCKTRHLVLAGGSKPRDVTNFTVGGFAPMSPRISSPMHPSAGGQRGGFGSPGGGSGGMSRGRGRRDNELIGQTVRISQGPYKGYIGVVKDATESTARVELHSTCQTISVDRQRLTTVGSRRPGGMTSTYGRTPMYGSQTPMYGSGSRTPMYGSQTPLQDGSRTPHYGSQTPLHDGSRTPAQSGAWDPNNPNTPSRAEEEYEYAFDDEPTPSPQAYGGTPNPQTPGYPDPSSPQVNPQYNPQTPGTPAMYNTDQFSPYAAPSPQGSYQPSPSPQSYHQVAPSPAGYQNTHSPASYHPTPSPMAYQASPSPSPVGYSPMTPGAPSPGGYNPHTPGSGIEQNSSDWVTTDIQVKVRDTYLDTQVVGQTGVIRSVTGGMCSVYLKDSEKVVSISSEHLEPITPTKNNKVKVILGEDREATGVLLSIDGEDGIVRMDLDEQLKILNLRFLGKLLEA

SEQ ID NO: 906227 - protein, 394 aa, Homo sapiens
MSRGRGRRDNELIGQTVRISQGPYKGYIGVVKDATESTARVELHSTCQTISVDRQRLTTVGSRRPGGMTSTYGRTPMYGSQTPMYGSGSRTPMYGSQTPLQDGSRTPHYGSQTPLHDGSRTPAQSGAWDPNNPNTPSRAEEEYEYAFDDEPTPSPQAYGGTPNPQTPGYPDPSSPQVNPQYNPQTPGTPAMYNTDQFSPYAAPSPQGSYQPSPSPQSYHQVAPSPAGYQNTHSPASYHPTPSPMAYQASPSPSPVGYSPMTPGAPSPGGYNPHTPGSGIEQNSSDWVTTDIQVKVRDTYLDTQVVGQTGVIRSVTGGMCSVYLKDSEKVVSISSEHLEPITPTKNNKVKVILGEDREATGVLLSIDGEDGIVRMDLDEQLKILNLRFLGKLLEA

SEQ ID NO: 906228 - protein, 852 aa, Homo sapiens
RQPQSGVVRTAAGTEGGGGAREGTSGETEARGGAQDCGTRQGCCLSQQQRKMSDSEDSNFSEEEDSERSSDGEEAEVDEERRSAAGSEKEEEPEDEEEEEEEEEYDEEEEEEDDDRPPKKPRHGGFILDEADVDDEYEDEDQWEDGAEDILEKEEIEASNIDNVVLDEDRSGARRLQNLWRDQREEELGEYYMKKYAKSSVGETVYGGSDELSDDITQQQLLPGVKDPNLWTVKCKIGEERATAISLMRKFIAYQFTDTPLQIKSVVAPEHVKGYIYVEAYKQTHVKQAIEGVGNLRLGYWNQQMVPIKEMTDVLKVVKEVANLKPKSWVRLKRGIYKDDIAQVDYVEPSQNTISLKMIPRIDYDRIKARMSLKDWFAKRKKFKRPPQRLFDAEKIRSLGGDVASDGDFLIFEGNRYSRKGFLFKSFAMSAVITEGVKPTLSELEKFEDQPEGIDLEVVTESTGKEREHNFQPGDNVEVCEGELINLQGKILSVDGNKITIMPKHEDLKDMLEFPAQELRKYFKMGDHVKVIAGRFEGDTGLIVRVEENFVILFSDLTMHELKVLPRDLQLCSETASGVDVGGQHEWGELVQLDPQTVGVIVRLERETFQVLNMYGKVVTVRHQAVTRKKDNRFAVALDSEQNNIHVKDIVKVIDGPHSGREGEIRHLFRSFAFLHCKKLVENGGMFVCKTRHLVLAGGSKPRDVTNFTVGGFAPMSPRISSPMHPSAGGQRGGFGSPGGGSGGMSRGRGRRDNELIGQTVRISQGPYKGYIGVVKDATESTARVELHSTCQTISVDRQRLTTVGSRRPGGMTSTYGRTPMYGSQTPMYGSGSRTPMYGSQTPLQDGECPQG

SEQ ID NO: 906229 - protein, 683 aa, Homo sapiens
RQPQSGVVRTAAGTEGGGGAREGTSGETEARGGAQDCGTRQGCCLSQQQRKMSDSEDSNFSEEEDSERSSDGEEAEVDEERRSAAGSEKEEEPEDEEEEEEEEEYDEEEEEEDDDRPPKKPRHGGFILDEADVDDEYEDEDQWEDGAEDILEKEEIEASNIDNVVLDEDRSGARRLQNLWRDQREEELGEYYMKKYAKSSVGETVYGGSDELSDDITQQQLLPGVKDPNLWTVKCKIGEERATAISLMRKFIAYQFTDTPLQIKSVVAPEHVKGYIYVEAYKQTHVKQAIEGVGNLRLGYWNQQMVPIKEMTDVLKVVKEVANLKPKSWVRLKRGIYKDDIAQVDYVEPSQNTISLKMIPRIDYDRIKARMSLKDWFAKRKKFKRPPQRLFDAEKIRSLGGDVASDGDFLIFEGNRYSRKGFLFKSFAMSAVITEGVKPTLSELEKFEDQPEGIDLEVVTESTGKEREHNFQPGDNVEVCEGELINLQGKILSVDGNKITIMPKHEDLKDMLEFPAQELRKYFKMGDHVKVIAGRFEGDTGLIVRVEENFVILFSDLTMHELKVLPRDLQLCSETASGVDVGGQHEWGELVQLDPQTVGVIVRLERETFQVLNMYGKVVTVRHQAVTRKKDNRFAVALDSEQNNIHVKDIVKVIDGPHSGREGEIRHLFRSFAFLHCKILLQG

SEQ ID NO: 906230 - protein, 432 aa, Homo sapiens
RQPQSGVVRTAAGTEGGGGAREGTSGETEARGGAQDCGTRQGCCLSQQQRKMSDSEDSNFSEEEDSERSSDGEEAEVDEERRSAAGSEKEEEPEDEEEEEEEEEYDEEEEEEDDDRPPKKPRHGGFILDEADVDDEYEDEDQWEDGAEDILEKEEIEASNIDNVVLDEDRSGARRLQNLWRDQREEELGEYYMKKYAKSSVGETVYGGSDELSDDITQQQLLPGVKDPNLWTVKCKIGEERATAISLMRKFIAYQFTDTPLQIKSVVAPEHVKGYIYVEAYKQTHVKQAIEGVGNLRLGYWNQQMVPIKEMTDVLKVVKEVANLKPKSWVRLKRGIYKDDIAQVDYVEPSQNTISLKMIPRIDYDRIKARMSLKDWFAKRKKFKRPPQRLFDAEKIRCVSLGTGWAGSPGPVCRMCLLQVPPQGWPRHRFSL

SEQ ID NO: 906231 - protein, 406 aa, Homo sapiens
RQPQSGVVRTAAGTEGGGGAREGTSGETEARGGAQDCGTRQGCCLSQQQRKMSDSEDSNFSEEEDSERSSDGEEAEVDEERRSAAGSEKEEEPEDEEEEEEEEEYDEEEEEEDDDRPPKKPRHGGFILDEADVDDEYEDEDQWEDGAEDILEKEEIEASNIDNVVLDEDRSGARRLQNLWRDQREEELGEYYMKKYAKSSVGETVYGGSDELSDDITQQQLLPGVKDPNLWTVKCKIGEERATAISLMRKFIAYQFTDTPLQIKSVVAPEHVKGYIYVEAYKQTHVKQAIEGVGNLRLGYWNQQMVPIKEMTDVLKVVKEVANLKPKSWVRLKRGIYKDDIAQVDYVEPSQNTISLKMIPRIDYDRIKARMSLKDWFAKRKKFKRPPQRLFDAEKISPGSAFLESG

SEQ ID NO: 906232 - protein, 79 aa, Homo sapiens
MPATGDTSMTTAGALTKQPASDHPDTRLNQLLGHTGVAPTKAVSNETTGTESSAAERKNPSDQQSKNTPAEEAQSATRE

SEQ ID NO: 906233 - protein, 296 aa, Homo sapiens
RQPQSGVVRTAAGTEGGGGAREGTSGETEARGGAQDCGTRQGCCLSQQQRKMSDSEDSNFSEEEDSERSSDGEEAEVDEERRSAAGSEKEEEPEDEEEEEEEEEYDEEEEEEDDDRPPKKPRHGGFILDEADVDDEYEDEDQWEDGAEDILEKEEIEASNIDNVVLDEDRSGARRLQNLWRDQREEELGEYYMKKYAKSSVGETVYGGSDELSDDITQQQLLPGVKDPNLWTVKCKIGEERATAISLMRKFIAYQFTDTVSRVDRRLGGETWQHPEGRTLSTSGVPGASVVSRAAC

SEQ ID NO: 906234 - protein, 42 aa, Homo sapiens
MSDSEDSNFSEEEDSERSSDGEEAEVCGWGAGGDIASGDRTP

SEQ ID NO: 906235 - protein, 234 aa, Homo sapiens
TLEDPQSLMSLLGGGGGAREGTSGETEARGGAQDCGTRQGCCLSQQQRKMSDSEDSNFSEEEDSERSSDGEEAEVDEERRSAAGSEKEEEPEDEEEEEEEEEYDEEEEEEDDDRPPKKPRHGGFILDEADVDDEYEDEDQWEDGAEDILEKEEIEASNIDNVVLDEDRSGARRLQNLWRDQREEELGEYYMKKYAKSSVGETVYGGSDELSDDITQQQLLPGVKGSQSVDWSNC

SEQ ID NO: 906236 - protein, 1138 aa, Homo sapiens
RQPQSGVVRTAAGTEGGGGAREGTSGETEARGGAQDCGTRQGCCLSQQQRKMSDSEDSNFSEEEDSERSSDGEEAEVDEERRSAAGSEKEEEPEDEEEEEEEEEYDEEEEEEDDDRPPKKPRHGGFILDEADVDDEYEDEDQWEDGAEDILEKEEIEASNIDNVVLDEDRSGARRLQNLWRDQREEELGEYYMKKYAKSSVGETVYGGSDELSDDITQQQLLPGVKDPNLWTVKCKIGEERATAISLMRKFIAYQFTDTPLQIKSVVAPEHVKGYIYVEAYKQTHVKQAIEGVGNLRLGYWNQQMVPIKEMTDVLKVVKEVANLKPKSWVRLKRGIYKDDIAQVDYVEPSQNTISLKMIPRIDYDRIKARMSLKDWFAKRKKFKRPPQRLFDAEKIRSLGGDVASDGDFLIFEGNRYSRKGFLFKSFAMSAVITEGVKPTLSELEKFEDQPEGIDLEVVTESTGKEREHNFQPGDNVEVCEGELINLQGKILSVDGNKITIMPKHEDLKDMLEFPAQELRKYFKMGDHVKVIAGRFEGDTGLIVRVEENFVILFSDLTMHELKVLPRDLQLCSETASGVDVGGQHEWGELVQLDPQTVGVIVRLERETFQVLNMYGKVVTVRHQAVTRKKDNRFAVALDSEQNNIHVKDIVKVIDGPHSGREGEIRHLFRSFAFLHCKKLVENGGMFVCKTRHLVLAGGSKPRDVTNFTVGGFAPMSPRISSPMHPSAGGQRGGFGSPGGGSGGMSRGRGRRDNELIGQTVRISQGPYKGYIGVVKDATESTARVELHSTCQTISVDRQRLTTVGSRRPGGMTSTYGRTPMYGSQTPMYGSGSRTPMYGSQTPLQDGSRTPHYGSQTPLHDGSRTPAQSGAWDPNNPNTPSRAEEEYEYAFDDEPTPSPQAYGGTPNPQTPGYPDPSSPQVNPQYNPQTPGTPAMYNTDQFSPYAAPSPQGSYQPSPSPQSYHQVAPSPAGYQNTHSPASYHPTPSPMAYQASPSPSPVGYSPMTPGAPSPGGYNPHTPGSGIEQNSSDWVTTDIQVKVRDTYLDTQVVGQTGVIRSVTGGMCSVYLKDSEKVVSISSEHLEPITPTKNNKVKVILGEDREATGVLLSIDGEDGIVRMDLDEQLKILNLRFLGKLLEA

SEQ ID NO: 906237 - protein, 1087 aa, Homo sapiens
MSDSEDSNFSEEEDSERSSDGEEAEVDEERRSAAGSEKEEEPEDEEEEEEEEEYDEEEEEEDDDRPPKKPRHGGFILDEADVDDEYEDEDQWEDGAEDILEKEEIEASNIDNVVLDEDRSGARRLQNLWRDQREEELGEYYMKKYAKSSVGETVYGGSDELSDDITQQQLLPGVKDPNLWTVKCKIGEERATAISLMRKFIAYQFTDTPLQIKSVVAPEHVKGYIYVEAYKQTHVKQAIEGVGNLRLGYWNQQMVPIKEMTDVLKVVKEVANLKPKSWVRLKRGIYKDDIAQVDYVEPSQNTISLKMIPRIDYDRIKARMSLKDWFAKRKKFKRPPQRLFDAEKIRSLGGDVASDGDFLIFEGNRYSRKGFLFKSFAMSAVITEGVKPTLSELEKFEDQPEGIDLEVVTESTGKEREHNFQPGDNVEVCEGELINLQGKILSVDGNKITIMPKHEDLKDMLEFPAQELRKYFKMGDHVKVIAGRFEGDTGLIVRVEENFVILFSDLTMHELKVLPRDLQLCSETASGVDVGGQHEWGELVQLDPQTVGVIVRLERETFQVLNMYGKVVTVRHQAVTRKKDNRFAVALDSEQNNIHVKDIVKVIDGPHSGREGEIRHLFRSFAFLHCKKLVENGGMFVCKTRHLVLAGGSKPRDVTNFTVGGFAPMSPRISSPMHPSAGGQRGGFGSPGGGSGGMSRGRGRRDNELIGQTVRISQGPYKGYIGVVKDATESTARVELHSTCQTISVDRQRLTTVGSRRPGGMTSTYGRTPMYGSQTPMYGSGSRTPMYGSQTPLQDGSRTPHYGSQTPLHDGSRTPAQSGAWDPNNPNTPSRAEEEYEYAFDDEPTPSPQAYGGTPNPQTPGYPDPSSPQVNPQYNPQTPGTPAMYNTDQFSPYAAPSPQGSYQPSPSPQSYHQVAPSPAGYQNTHSPASYHPTPSPMAYQASPSPSPVGYSPMTPGAPSPGGYNPHTPGSGIEQNSSDWVTTDIQVKVRDTYLDTQVVGQTGVIRSVTGGMCSVYLKDSEKVVSISSEHLEPITPTKNNKVKVILGEDREATGVLLSIDGEDGIVRMDLDEQLKILNLRFLGKLLEA

SEQ ID NO: 906238 - protein, 1155 aa, Homo sapiens
PDCLQTPKKPRHGGFILDEADVDDEYKDEDQWEDGAEDILEKEEIEASNIDNVVLDEDRSGAAACKTSGGTSEDSNFSEEEDSERSSDGEEAEVDEERRSAAGSEKEEEPEDEEEEEEEEEYDEEEEEEDDDRPPKKPRHGGFILDEADVDDEYEDEDQWEDGAEDILEKEEIEASNIDNVVLDEDRSGARRLQNLWRDQREEELGEYYMKKYAKSSVGETVYGGSDELSDDITQQQLLPGVKDPNLWTVKCKIGEERATAISLMRKFIAYQFTDTPLQIKSVVAPEHVKGYIYVEAYKQTHVKQAIEGVGNLRLGYWNQQMVPIKEMTDVLKVVKEVANLKPKSWVRLKRGIYKDDIAQVDYVEPSQNTISLKMIPRIDYDRIKARMSLKDWFAKRKKFKRPPQRLFDAEKIRSLGGDVASDGDFLIFEGNRYSRKGFLFKSFAMSAVITEGVKPTLSELEKFEDQPEGIDLEVVTESTGKEREHNFQPGDNVEVCEGELINLQGKILSVDGNKITIMPKHEDLKDMLEFPAQELRKYFKMGDHVKVIAGRFEGDTGLIVRVEENFVILFSDLTMHELKVLPRDLQLCSETASGVDVGGQHEWGELVQLDPQTVGVIVRLERETFQVLNMYGKVVTVRHQAVTRKKDNRFAVALDSEQNNIHVKDIVKVIDGPHSGREGEIRHLFRSFAFLHCKKLVENGGMFVCKTRHLVLAGGSKPRDVTNFTVGGFAPMSPRISSPMHPSAGGQRGGFGSPGGGSGGMSRGRGRRDNELIGQTVRISQGPYKGYIGVVKDATESTARVELHSTCQTISVDRQRLTTVGSRRPGGMTSTYGRTPMYGSQTPMYGSGSRTPMYGSQTPLQDGSRTPHYGSQTPLHDGSRTPAQSGAWDPNNPNTPSRAEEEYEYAFDDEPTPSPQAYGGTPNPQTPGYPDPSSPQVNPQYNPQTPGTPAMYNTDQFSPYAAPSPQGSYQPSPSPQSYHQVAPSPAGYQNTHSPASYHPTPSPMAYQASPSPSPVGYSPMTPGAPSPGGYNPHTPGSGIEQNSSDWVTTDIQVKVRDTYLDTQVVGQTGVIRSVTGGMCSVYLKDSEKVVSISSEHLEPITPTKNNKVKVILGEDREATGVLLSIDGEDGIVRMDLDEQLKILNLRFLGKLLEA

SEQ ID NO: 906239 - protein, 775 aa, Homo sapiens
VCPQNPRMSLKDWFAKRKKFKRPPQRLFDAEKIRSLGGDVASDGDFLIFEGNRYSRKGFLFKSFAMSAVITEGVKPTLSELEKFEDQPEGIDLEVVTESTGKEREHNFQPGDNVEVCEGELINLQGKILSVDGNKITIMPKHEDLKDMLEFPAQELRKYFKMGDHVKVIAGRFEGDTGLIVRVEENFVILFSDLTMHELKVLPRDLQLCSETASGVDVGGQHEWGELVQLDPQTVGVIVRLERETFQVLNMYGKVVTVRHQAVTRKKDNRFAVALDSEQNNIHVKDIVKVIDGPHSGREGEIRHLFRSFAFLHCKKLVENGGMFVCKTRHLVLAGGSKPRDVTNFTVGGFAPMSPRISSPMHPSAGGQRGGFGSPGGGSGGMSRGRGRRDNELIGQTVRISQGPYKGYIGVVKDATESTARVELHSTCQTISVDRQRLTTVGSRRPGGMTSTYGRTPMYGSQTPMYGSGSRTPMYGSQTPLQDGSRTPHYGSQTPLHDGSRTPAQSGAWDPNNPNTPSRAEEEYEYAFDDEPTPSPQAYGGTPNPQTPGYPDPSSPQVNPQYNPQTPGTPAMYNTDQFSPYAAPSPQGSYQPSPSPQSYHQVAPSPAGYQNTHSPASYHPTPSPMAYQASPSPSPVGYSPMTPGAPSPGGYNPHTPGSGIEQNSSDWVTTDIQVKVRDTYLDTQVVGQTGVIRSVTGGMCSVYLKDSEKVVSISSEHLEPITPTKNNKVKVILGEDREATGVLLSIDGEDGIVRMDLDEQLKILNLRFLGKLLEA

SEQ ID NO: 906240 - protein, 1067 aa, Homo sapiens
RQPQSGVVRTAAGTEGGGGAREGTSGETEARGGAQDCGTRQGCCLSQQQRKMSDSEDSNFSEEEDSERSSDGEEAEVDEERRSAAGSEKEEEPEDEEEEEEEEEYDEEEEEEDDDRPPKKPRHGGFILDEADVDDEYEDEDQWEDGAEDILEKEEIEASNIDNVVLDEDRSGARRLQNLWRDQREEELGEYYMKKYAKSSVGETVYGGSDELSDDITQQQLLPGVKDPNLWTVKCKIGEERATAISLMRKFIAYQFTDTPLQIKSVVAPEHVKGYIYVEAYKQTHVKQAIEGVGNLRLGYWNQQMVPIKEMTDVLKVVKEVANLKPKSWVRLKRGIYKDDIAQVDYVEPSQNTISLKMIPRIDYDRIKARMSLKDWFAKRKKFKRPPQRLFDAEKIRSLGGDVASDGDFLIFEGNRYSRKGFLFKSFAMSAVITEGVKPTLSELEKFEDQPEGIDLEVVTESTGKEREHNFQPGDNVEVCEGELINLQGKILSVDGNKITIMPKHEDLKDMLEFPAQELRKYFKMGDHVKVIAGRFEGDTGLIVRVEENFVILFSDLTMHELKVLPRDLQLCSETASGVDVGGQHEWGELVQLDPQTVGVIVRLERETFQVLNMYGKVVTVRHQAVTRKKDNRFAVALDSEQNNIHVKDIVKVIDGPHSGREGEIRHLFRSFAFLHCKKLVENGGMFVCKTRHLVLAGGSKPRDVTNFTVGGFAPMSPRISSPMHPSAGGQRGGFGSPGGGSGGMSRGRGRRDNELIGQTVRISQGPYKGYIGVVKDATESTARVELHSTCQTISVDRQRLTTVGSRRPGGMTSTYGRTPMYGSQTPMYGSGSRTPMYGSQTPLQDGSRTPHYGSQTPLHDGSRTPAQSGAWDPNNPNTPSRAEEEYEYAFDDEPTPSPQAYGGTPNPQTPGYPDPSSPQVNPQYNPQTPGTPAMYNTDQFSPYAAPSPQGSYQPSPSPQSYHQVAPSPAGYQNTHSPASYHPTPSPMAYQASPSPSPVGYSPMTPGAPSPGGYNPHTPGSGIEQNSSDWVTTDIQVKVRDTYLDTQVVGQTGVIRSVTVRGAQGGG

SEQ ID NO: 906241 - protein, 898 aa, Homo sapiens
RQPQSGVVRTAAGTEGGGGAREGTSGETEARGGAQDCGTRQGCCLSQQQRKMSDSEDSNFSEEEDSERSSDGEEAEVDEERRSAAGSEKEEEPEDEEEEEEEEEYDEEEEEEDDDRPPKKPRHGGFILDEADVDDEYEDEDQWEDGAEDILEKEEIEASNIDNVVLDEDRSGARRLQNLWRDQREEELGEYYMKKYAKSSVGETVYGGSDELSDDITQQQLLPGVKDPNLWTVKCKIGEERATAISLMRKFIAYQFTDTPLQIKSVVAPEHVKGYIYVEAYKQTHVKQAIEGVGNLRLGYWNQQMVPIKEMTDVLKVVKEVANLKPKSWVRLKRGIYKDDIAQVDYVEPSQNTISLKMIPRIDYDRIKARMSLKDWFAKRKKFKRPPQRLFDAEKIRSLGGDVASDGDFLIFEGNRYSRKGFLFKSFAMSAVITEGVKPTLSELEKFEDQPEGIDLEVVTESTGKEREHNFQPGDNVEVCEGELINLQGKILSVDGNKITIMPKHEDLKDMLEFPAQELRKYFKMGDHVKVIAGRFEGDTGLIVRVEENFVILFSDLTMHELKVLPRDLQLCSETASGVDVGGQHEWGELVQLDPQTVGVIVRLERETFQVLNMYGKVVTVRHQAVTRKKDNRFAVALDSEQNNIHVKDIVKVIDGPHSGREGEIRHLFRSFAFLHCKKLVENGGMFVCKTRHLVLAGGSKPRDVTNFTVGGFAPMSPRISSPMHPSAGGQRGGFGSPGGGSGGMSRGRGRRDNELIGQTVRISQGPYKGYIGVVKDATESTARVELHSTCQTISVDRQRLTTVGSRRPGGMTSTYGRTPMYGSQTPMYGSGSRTPMYGSQTPLQDGSRTPHYGSQTPLHDGSRTPAQSGAWDPNNPNTPSRHSGFVVSPDLVRAEFE

SEQ ID NO: 906242 - protein, 262 aa, Homo sapiens
RQPQSGVVRTAAGTEGGGGAREGTSGETEARGGAQDCGTRQGCCLSQQQRKMSDSEDSNFSEEEDSERSSDGEEAEVDEERRSAAGSEKEEEPEDEEEEEEEEEYDEEEEEEDDDRPPKKPRHGGFILDEADVDDEYEDEDQWEDGAEDILEKEEIEASNIDNVVLDEDRSGARRLQNLWRDQREEELGEYYMKKYAKSSVGETVYGGSDELSDDITQQQLLPGVKDPNLWTVKCKIGEERATAISLMRKFIAYQFTDTAPA

SEQ ID NO: 906243 - protein, 634 aa, Homo sapiens
RQPQSGVVRTAAGTEGGGGAREGTSGETEARGGAQDCGTRQGCCLSQQQRKMSDSEDSNFSEEEDSERSSDGEEAEVDEERRSAAGSEKEEEPEDEEEEEEEEEYDEEEEEEDDDRPPKKPRHGGFILDEADVDDEYEDEDQWEDGAEDILEKEEIEASNIDNVVLDEDRSGARRLQNLWRDQREEELGEYYMKKYAKSSVGETVYGGSDELSDDITQQQLLPGVKDPNLWTVKCKIGEERATAISLMRKFIAYQFTDTPLQIKSVVAPEHVKGYIYVEAYKQTHVKQAIEGVGNLRLGYWNQQMVPIKEMTDVLKVVKEVANLKPKSWVRLKRGIYKDDIAQVDYVEPSQNTISLKMIPRIDYDRIKARMSLKDWFAKRKKFKRPPQRLFDAEKIRSLGGDVASDGDFLIFEGNRYSRKGFLFKSFAMSAVITEGVKPTLSELEKFEDQPEGIDLEVVTESTALQTAPAGKEREHNFQPGDNVEVCEGELINLQGKILSVDGNKITIMPKHEDLKDMLEFPAQELRKYFKMGDHVKVIAGRFEGDTGLIVRVEENFVILFSDLTMHELKVLPRDLQLCSETASGVDVGGQHEWGELVQLDPQTVGVIVRLERETFQVLTCTGRCDCLTYIRPL

SEQ ID NO: 906244 - protein, 407 aa, Homo sapiens
RQPQSGVVRTAAGTEGGGGAREGTSGETEARGGAQDCGTRQGCCLSQQQRKMSDSEDSNFSEEEDSERSSDGEEAEVDEERRSAAGSEKEEEPEDEEEEEEEEEYDEEEEEEDDDRPPKKPRHGGFILDEADVDDEYEDEDQWEDGAEDILEKEEIEASNIDNVVLDEDRSGARRLQNLWRDQREEELGEYYMKKYAKSSVGETVYGGSDELSDDITQQQLLPGVKDPNLWTVKCKIGEERATAISLMRKFIAYQFTDTPLQIKSVVAPEHVKGYIYVEAYKQTHVKQAIEGVGNLRLGYWNQQMVPIKEMTDVLKVVKEVANLKPKSWVRLKRGIYKDDIAQVDYVEPSQNTISLKMIPRIDYDRIKARMSLVLRGICGLGGRECARSHWWPSPLPHPSHPCPFPP

SEQ ID NO: 906245 - protein, 293 aa, Homo sapiens
RQPQSGVVRTAAGTEGGGGAREGTSGETEARGGAQDCGTRQGCCLSQQQRKMSDSEDSNFSEEEDSERSSDGEEAEVDEERRSAAGSEKEEEPEDEEEEEEEEEYDEEEEEEDDDRPPKKPRHGGFILDEADVDDEYEDEDQWEDGAEDILEKEEIEASNIDNVVLDEDRSGARRLQNLWRDQREEELGEYYMKKYAKSSVGETVYGGSDELSDDITQQQLLPGVKDPNLWTVKCKIGEERATAISLMRKFIAYQFTDTPLQIKSVVAPEHVKGYIYVEGGRILEVDGGNGYA

SEQ ID NO: 906246 - protein, 79 aa, Homo sapiens
MPATGDTSMTTAGALTKQPASDHPDTRLNQLLGHTGVAPTKPVSNETTGTESSAAERKNPSDQQSKNTPAEEAQSATRE

SEQ ID NO: 906247 - protein, 515 aa, Homo sapiens
ARGGGGRGLLGAGRLRGAGKVVTNCQERIQHWKKVDNDYNALRERLSTLPDKLSYNIMVPFGPFAFMPGKLVHTNEVTVLLGDNWFAKCSAKQAVGLVEHRKEHVRKTIDDLKKVMKNFESRVEFTEDLQKMSDAAGDIVDIREEIKCDFEFKAKHRIAHKPHSKPKTSDIFEADIANDVKSKDLLADKELWARLEELERQEELLGELDSKPDTVIANGEDTTSSEEEKEDRNTNVNAMHQVTDSHTPCHKDVASSEPFSGQVNSQLNCSVNGSSSYHSDDDDDDDDDDDDNIDDDDGDNDHEALGVGDNSIPTIYFSHTVEPKRVRINTGKNTTLKFSEKKEEAKRKRKNSTGSGHSAQELPTIRTPADIYRAFVDVVNGEYVPRKSILKSRSRENSVCSDTSESSAAEFDDRRGVLRSISCEEATCSDTSESILEEEPQENQKKLLPLSVTPEAFSGTVIEKEFVSPSLTPPPAIAHPALPTIPERKEVLLEASEETGKRVSKFKAARLQQKD

SEQ ID NO: 906248 - protein, 494 aa, Homo sapiens [sequence omitted]

SEQ ID NO: 906249 - protein, 508 aa, Homo sapiens
MRLGNVDFTLGSNVPCVYLVFSVNRKKVDNDYNALRERLSTLPDKLSYNIMVPFGPFAFMPGKLVHTNEVTVLLGDNWFAKCSAKQAVGLVEHRKEHVRKTIDDLKKVMKNFESRVEFTEDLQKMSDAAGDIVDIREEIKCDFEFKAKHRIAHKPHSKPKTSDIFEADIANDVKSKDLLADKELWARLEELERQEELLGELDSKPDTVIANGEDTTSSEEEKEDRNTNVNAMHQVTDSHTPCHKDVASSEPFSGQVNSQLNCSVNGSSSYHSDDDDDDDDDDDDNIDDDDGDNDHEALGVGDNSIPTIYFSHTVEPKRVRINTGKNTTLKFSEKKEEAKRKRKNSTGSGHSAQELPTIRTPADIYRAFVDVVNGEYVPRKSILKSRSRENSVCSDTSESSAAEFDDRRGVLRSISCEEATCSDTSESILEEEPQENQKKLLPLSVTPEAFSGTVIEKEFVSPSLTPPPAIAHPALPTIPERKEVLLEASEETGKRVSKFKAARLQQKD

SEQ ID NO: 906250 - protein, 555 aa, Homo sapiens
MPPAQALVQDSHAALRPAGPSWRRPPWRRPPTPRPLRPRPLPWFRCAPRMWRGCARSRKRVVTNCQERIQHWKKVDNDYNALRERLSTLPDKLSYNIMVPFGPFAFMPGKLVHTNEVTVLLGDNWFAKCSAKQAVGLVEHRKEHVRKTIDDLKKVMKNFESRVEFTEDLQKMSDAAGDIVDIREEIKCDFEFKAKHRIAHKPHSKPKTSDIFEADIANDVKSKDLLADKELWARLEELERQEELLGELDSKPDTVIANGEDTTSSEEEKEDRNTNVNAMHQVTDSHTPCHKDVASSEPFSGQVNSQLNCSVNGSSSYHSDDDDDDDDDDDDNIDDDDGDNDHEALGVGDNSIPTIYFSHTVEPKRVRINTGKNTTLKFSEKKEEAKRKRKNSTGSGHSAQELPTIRTPADIYRAFVDVVNGEYVPRKSILKSRSRENSVCSDTSESSAAEFDDRRGVLRSISCEEATCSDTSESILEEEPQENQKKLLPLSVTPEAFSGTVIEKEFVSPSLTPPPAIAHPALPTIPERKEVLLEASEETGKRVSKFKAARLQQKD

SEQ ID NO: 906251 - protein, 534 aa, Homo sapiens
IPSGSSHSFPGSLEVTALMTTWSSLQGSHVSKRALAYALVVTNCQERIQHWKKVDNDYNALRERLSTLPDKLSYNIMVPFGPFAFMPGKLVHTNEVTVLLGDNWFAKCSAKQAVGLVEHRKEHVRKTIDDLKKVMKNFESRVEFTEDLQKMSDAAGDIVDIREEIKCDFEFKAKHRIAHKPHSKPKTSDIFEADIANDVKSKDLLADKELWARLEELERQEELLGELDSKPDTVIANGEDTTSSEEEKEDRNTNVNAMHQVTDSHTPCHKDVASSEPFSGQVNSQLNCSVNGSSSYHSDDDDDDDDDDDDNIDDDDGDNDHEALGVGDNSIPTIYFSHTVEPKRVRINTGKNTTLKFSEKKEEAKRKRKNSTGSGHSAQELPTIRTPADIYRAFVDVVNGEYVPRKSILKSRSRENSVCSDTSESSAAEFDDRRGVLRSISCEEATCSDTSESILEEEPQENQKKLLPLSVTPEAFSGTVIEKEFVSPSLTPPPAIAHPALPTIPERKEVLLEASEETGKRVSKFKAARLQQKD

SEQ ID NO: 906252 - protein, 385 aa, Homo sapiens
LVLDRERRSRSRTEEIKCDFEFKAKHRIAHKPHSKPKTSDIFEADIANDVKSKDLLADKELWARLEELERQEELLGELDSKPDTVIANGEDTTSSEEEKEDRNTNVNAMHQVTDSHTPCHKDVASSEPFSGQVNSQLNCSVNGSSSYHSDDDDDDDDDDDDNIDDDDGDNDHEALGVGDNSIPTIYFSHTVEPKRVRINTGKNTTLKFSEKKEEAKRKRKNSTGSGHSAQELPTIRTPADIYRAFVDVVNGEYVPRKSILKSRSRENSVCSDTSESSAAEFDDRRGVLRSISCEEATCSDTSESILEEEPQENQKKLLPLSVTPEAFSGTVIEKEFVSPSLTPPPAIAHPALPTIPERKEVLLEASEETGKRVSKFKAARLQQKD

SEQ ID NO: 906253 - protein, 437 aa, Homo sapiens
MWRGCARSRKRKKVDNDYNALRERLSTLPDKLSYNIMVPFGPFAFMPGKLVHTNEVTVLLGDNWFAKCSAKQAVGLVEHRKEHVRKTIDDLKKVMKNFESRVEFTEDLQKMSDAAGDIVDIREEIKCDFEFKAKHRIAHKPHSKPKTSDIFEADIANDVKSKDLLADKELWARLEELERQEELLGELDSKPDTVIANGEDTTSSEEEKEDRNTNVNAMHQVTDSHTPCHKDVASSEPFSGQVNSQLNCSVNGSSSYHSDDDDDDDDDDDDNIDDDDGDNDHEALGVGDNSIPTIYFSHTVEPKRVRINTGKNTTLKFSEKKEEAKRKRKNSTGSGHSAQELPTIRTPADIYRAFVDVVNGEYVPRKSILKSRSRENSVCSDTSESSAAEFDDRRGVLRSISCEEATCSDTSESILEEEPQENQKKLLPLSVTPELNI

SEQ ID NO: 906254 - protein, 340 aa, Homo sapiens
MWRGCARSRKRKKVDNDYNALRERLSTLPDKLSYNIMVPFGPFAFMPGKLVHTNEVTVLLGDNWFAKCSAKQAVGLVEHRKEHVRKTIDDLKKVMKNFESRVEFTEDLQKMSDAAGDIVDIREEIKCDFEFKAKHRIAHKPHSKPKTSDIFEADIANDVKSKDLLADKELWARLEELERQEELLGELDSKPDTVIANGEDTTSSEEEKEDRNTNVNAMHQVTDSHTPCHKDVASSEPFSGQVNSQLNCSVNGSSSYHSDDDDDDDDDDDDNIDDDDGDNDHEALGVGDNSIPTIYFSHTVEPKRVRINTGKNTTLKFSEKKEEAKRKRKNSTGSEPLLML

SEQ ID NO: 906255 - protein, 161 aa, Homo sapiens
HLLLLTARSCDHQDAQTFTAFVDVVNGEYVPRKSILKSRSRENSVCSDTSESSAAEFDDRRGVLRSISCEEATCSDTSESILEEEPQENQKKLLPLSVTPEAFSGTVIEKEFVSPSLTPPPAIAHPALPTIPERKEVLLEASEETGKRVSKFKAARLQQKD

SEQ ID NO: 906256 - protein, 452 aa, Homo sapiens
MWRGCARSRKRKKVDNDYNALRERLSTLPDKLSYNIMVPFGPFAFMPGKLVHTNEVTVLLGDNWFAKCSAKQAVGLVEHRKEHVRKTIDDLKKVMKNFESRVEFTEDLQKMSDAAGDIVDIREEIKCDFEFKAKHRIAHKPHSKPKTSDIFEADIANDVKSKDLLADKELWARLEELERQEELLGELDSKPDTVIANGEDTTSSEEEKEDRNTNVNAMHQVTDSHTPCHKDVASSEPFSGQVNSQLNCSVNGSSSYHSDDDDDDDDDDDDNIDDDDGDNDHEALGVGDNSIPTIYFSHTVEPKRVRINTGKNTTLKFSEKKEEAKRKRKNSTGSGHSAQELPTIRTPADIYRAFVDVVNGEYVPRKSILKSRSRENSVCSDTSESSAAEFDDRRGVLRSISCEEATCSDTSESILEEEPQENQKKLLPLSVTPEVLRLVGYSRNLAPLNVIL

SEQ ID NO: 906257 - protein, 440 aa, Homo sapiens
MWRGCARSRKRKKVDNDYNALRERLSTLPDKLSYNIMVPFGPFAFMPGKLVHTNEVTVLLGDNWFAKCSAKQAVGLVEHRKEHVRKTIDDLKKVMKNFESRVEFTEDLQKMSDAAGDIVDIREEIKCDFEFKAKHRIAHKPHSKPKTSDIFEADIANDVKSKDLLADKELWARLEELERQEELLGELDSKPDTVIANGEDTTSSEEEKEDRNTNVNAMHQVTDSHTPCHKDVASSEPFSGQVNSQLNCSVNGSSSYHSDDDDDDDDDDDDNIDDDDGDNDHEALGVGDNSIPTIYFSHTVEPKRVRINTGKNTTLKFSEKKEEAKRKRKNSTGSGHSAQELPTIRTPADIYRAFVDVVNGEYVPRKSILKSRSRENSVCSDTSESSAAEFDDRRGVLRSISCEEATCSDTSESILEEEPQENQKKLLPLSVTPEVCVCIF

SEQ ID NO: 906258 - protein, 508 aa, Homo sapiens; identical to SEQ ID NO: 906249

SEQ ID NO: 906259 - protein, 508 aa, Homo sapiens; identical to SEQ ID NO: 906249

SEQ ID NO: 906260 - protein, 506 aa, Homo sapiens
MWRGCARSRKRVVTNCQERIQHWKKVDNDYNALRERLSTLPDKLSYNIMVPFGPFAFMPGKLVHTNEVTVLLGDNWFAKCSAKQAVGLVEHRKEHVRKTIDDLKKVMKNFESRVEFTEDLQKMSDAAGDIVDIREEIKCDFEFKAKHRIAHKPHSKPKTSDIFEADIANDVKSKDLLADKELWARLEELERQEELLGELDSKPDTVIANGEDTTSSEEEKEDRNTNVNAMHQVTDSHTPCHKDVASSEPFSGQVNSQLNCSVNGSSSYHSDDDDDDDDDDDDNIDDDDGDNDHEALGVGDNSIPTIYFSHTVEPKRVRINTGKNTTLKFSEKKEEAKRKRKNSTGSGHSAQELPTIRTPADIYRAFVDVVNGEYVPRKSILKSRSRENSVCSDTSESSAAEFDDRRGVLRSISCEEATCSDTSESILEEEPQENQKKLLPLSVTPEAFSGTVIEKEFVSPSLTPPPAIAHPALPTIPERKEVLLEASEETGKRVSKFKAARLQQKD

SEQ ID NO: 906261 - protein, 437 aa, Homo sapiens; identical to SEQ ID NO: 906253

SEQ ID NO: 906262 - protein, 476 aa, Homo sapiens
MWRGCARSRKRKKVDNDYNALRERLSTLPDKLSYNIMVPFGPFAFMPGKLVHTNEVTVLLGDNWFAKCSAKQAVGLVEHRKEHVRKTIDDLKKVMKNFESRVEFTEDLQKMSDAAGDIVDIREEIKCDFEFKAKHRIAHKPHSKPKTSDIFEADIANDVKSKDLLADKELWARLEELERQEELLGELDSKPDTVIANGEDTTSSEEDTPCHKDVASSEPFSGQVNSQLNCSVNGSSSYHSDDDDDDDDDDDDNIDDDDGDNDHEALGVGDNSIPTIYFSHTVEPKRVRINTGKNTTLKFSEKKEEAKRKRKNSTGSGHSAQELPTIRTPADIYRAFVDVVNGEYVPRKSILKSRSRENSVCSDTSESSAAEFDDRRGVLRSISCEEATCSDTSESILEEEPQENQKKLLPLSVTPEAFSGTVIEKEFVSPSLTPPPAIAHPALPTIPERKEVLLEASEETGKRVSKFKAARLQQKD

SEQ ID NO: 906263 - protein, 354 aa, Homo sapiens
  misc_feature (38)..(38): Xaa can be any naturally occurring amino acid
MIVKIQSNSSILIPTWRARFEATYQYTWQRIARDDLCXFKALHDSLDSQFASIHPHYLSRNDVQENHRIHNIVDCDALALTETHHTPCHKDVASSEPFSGQVNSQLNCSVNGSSSYHSDDDDDDDDDDDDNIDDDDGDNDHEALGVGDNSIPTIYFSHTVEPKRVRINTGKNTTLKFSEKKEEAKRKRKNSTGSGHSAQELPTIRTPADIYRAFVDVVNGEYVPRKSILKSRSRENSVCSDTSESSAAEFDDRRGVLRSISCEEATCSDTSESILEEEPQENQKKLLPLSVTPEAFSGTVIEKEFVSPSLTPPPAIAHPALPTIPERKEVLLEASEETGKRVSKFKAARLQQKD

SEQ ID NO: 906264 - protein, 452 aa, Homo sapiens; identical to SEQ ID NO: 906256

SEQ ID NO: 906265 - protein, 182 aa, Homo sapiens
FYDPLPELFNSVGGGRQRAEIYCWPLPGLFHISKEVPVNPGPPFGEHGPVRPCQPCQCNNNVDPSASGNCDRLTGRCLKCIHNTAGIYCDQCKAGYFGDPLAPNPADKCRACNCNPMGSEPVGCRSDGTCVCKPGFGGPNCEHGAFSCPACWTLGAIERLTHARLWSDLICLYKCLLHAVDK

SEQ ID NO: 906266 - protein, 484 aa, Homo sapiens
FLRAIAQHFIWPGHWLSTWHWSLTEAELVEMLMFTGGRNPPYLQAASQPQEATRLAESHVESASNMEQLTRETEDYSKQALSLVRKALHEGVGSGSGSPDGAVVQGLVEKLEKTKSLAQQLTREATQAEIEADRSYQHSLRLLDSVSRLQGVSDQSFQVEEAKRIKQKADSLSSLVTRHMDEFKRTQKNLGNWKEEAQQLLQNGKSGREKSDQLLSRANLAKSRAQEALSMGNATFYEVESILKNLREFDLQVDNRKAEAEEAMKRLSYISQKVSDASDKTQQAERALGSAAADAQRAKNGAGEALEISSEIEQEIGSLNLEANVTADGALAMEKGLASLKSEMREVEGELERKELEFDTNMDAVQMVITEAQKVDTRAKNAGVTIQDTLNTLDGLLHLMDQPLSVDEEGLVLLEQKLSRAKTQINSQLRPMMSELEERARQQRGHLHLLETSIDGILADVKNLENIRDNLPPGCYNTQALEQQ

SEQ ID NO: 906267 - protein, 1150 aa, Homo sapiens
DHLIEGKGRHSGAQSENHQPRRRAATPAAETETERPGTAMPALWLGCCLCFSLLLPAARATSRREVCDCNGKSRQCIFDRELHRQTGNGFRCLNCNDNTDGIHCEKCKNGFYRHRERDRCLPCNCNSKGSLSARCDNSGRCSCKPGVTGARCDRCLPGFHMLTDAGCTQDQRLLDSKCDCDPAGIAGPCDAGRCVCKPAVTGERCDRCRSGYYNLDGGNPEGCTQCFCYGHSASCRSSAEYSVHKITSTFHQDVDGWKAVQRNGSPAKLQWSQRHQDVFSSAQRLDPVYFVAPAKFLGNQQVSYGQSLSFDYRVDRGGRHPSAHDVILEGAGLRITAPLMPLGKTLPCGLTKTYTFRLNEHPSNNWSPQLSYFEYRRLLRNLTALRIRATYGEYSTGYIDNVTLISARPVSGAPAPWVEQCICPVGYKGQFCQDCASGYKRDSARLGPFGTCIPCNCQGGGACDPDTGDCYSGDENPDIECADCPIGFYNDPHDPRSCKPCPCHNGFSCSVMPETEEVVCNNCPPGVTGARCELCADGYFGDPFGEHGPVRPCQPCQCNNNVDPSASGNCDRLTGRCLKCIHNTAGIYCDQCKAGYFGDPLAPNPADKCRACNCNPMGSEPVGCRSDGTCVCKPGFGGPNCEHGAFSCPACYNQVKIQMDQFMQQLQRMEALISKAQGGDGVVPDTELEGRMQQAEQALQDILRDAQISEGASRSLGLQLAKVRSQENSYQSRLDDLKMTVERVRALGSQYQNRVRDTHRLITQMQLSLAESEASLGNTNIPASDHYVGPNGFKSLAQEATRLAESHVESASNMEQLTRETEDYSKQALSLVRKALHEGVGSGSGSPDGAVVQGLVEKLEKTKSLAQQLTREATQAEIEADRSYQHSLRLLDSVSRLQGVSDQSFQVEEAKRIKQKADSLSSLVTRHMDEFKRTQKNLGNWKEEAQQLLQNGKSGREKSDQLLSRANLAKSRAQEALSMGNATFYEVESILKNLREFDLQVDNRKAEAEEAMKRLSYISQKVSDASDKTQQAERALGSAAADAQRAKNGAGEALEISSEIEQEIGSLNLEANVTADGALAMEKGLASLKSEMREVEGELERKELEFDTNMDAVQMVITEAQKVDTRAKNAGVTIQDTLNTLDGLLHLMGM

SEQ ID NO: 906268 - protein, 178 aa, Homo sapiens
SGEQSLEQEIGSLNLEANVTADGALAMEKGLASLKSEMREVEGELERKELEFDTNMDAVQMVITEAQKVDTRAKNAGVTIQDTLNTLDGLLHLMDQPLSVDEEGLVLLEQKLSRAKTQINSQLRPMMSELEERARQQRGHLHLLETSIDGILADVKNLENIRDNLPPGCYNTQALEQQ

SEQ ID NO: 906269 - protein, 160 aa, Homo sapiens
MTRKFVKRSIFLLASLKSEMREVEGELERKELEFDTNMDAVQMVITEAQKVDTRAKNAGVTIQDTLNTLDGLLHLMDQPLSVDEEGLVLLEQKLSRAKTQINSQLRPMMSELEERARQQRGHLHLLETSIDGILADVKNLENIRDNLPPGCYNTQALEQQ

SEQ ID NO: 906270 - protein, 1232 aa, Homo sapiens
DHLIEGKGRHSGAQSENHQPRRRAATPAAETETERPGTAMPALWLGCCLCFSLLLPAARATSRREVCDCNGKSRQCIFDRELHRQTGNGFRCLNCNDNTDGIHCEKCKNGFYRHRERDRCLPCNCNSKGSLSARCDNSGRCSCKPGVTGARCDRCLPGFHMLTDAGCTQDQRLLDSKCDCDPAGIAGPCDAGRCVCKPAVTGERCDRCRSGYYNLDGGNPEGCTQCFCYGHSASCRSSAEYSVHKITSTFHQDVDGWKAVQRNGSPAKLQWSQRHQDVFSSAQRLDPVYFVAPAKFLGNQQVSYGQSLSFDYRVDRGGRHPSAHDVILEGAGLRITAPLMPLGKTLPCGLTKTYTFRLNEHPSNNWSPQLSYFEYRRLLRNLTALRIRATYGEYSTGYIDNVTLISARPVSGAPAPWVEQCICPVGYKGQFCQDCASGYKRDSARLGPFGTCIPCNCQGGGACDPDTGDCYSGDENPDIECADCPIGFYNDPHDPRSCKPCPCHNGFSCSVMPETEEVVCNNCPPGVTGARCELCADGYFGDPFGEHGPVRPCQPCQCNNNVDPSASGNCDRLTGRCLKCIHNTAGIYCDQCKAGYFGDPLAPNPADKCRACNCNPMGSEPVGCRSDGTCVCKPGFGGPNCEHGAFSCPACYNQVKIQMDQFMQQLQRMEALISKAQGGDGVVPDTELEGRMQQAEQALQDILRDAQISEGASRSLGLQLAKVRSQENSYQSRLDDLKMTVERVRALGSQYQNRVRDTHRLITQMQLSLAESEASLGNTNIPASDHYVGPNGFKSLAQEATRLAESHVESASNMEQLTRETEDYSKQALSLVRKALHEGVGSGSGSPDGAVVQGLVEKLEKTKSLAQQLTREATQAEIEADRSYQHSLRLLDSVSRLQGVSDQSFQVEEAKRIKQKADSLSSLVTRHMDEFKRTQKNLGNWKEEAQQLLQNGKSGREKSDQLLSRANLAKSRAQEALSMGNATFYEVESILKNLREFDLQVDNRKAEAEEAMKRLSYISQKVSDASDKTQQAERALGSAAADAQRAKNGAGEALEISSEIEQEIGSLNLEANVTADGALAMEKGLASLKSEMREVEGELERKELEFDTNMDAVQMVITEAQKVDTRAKNAGVTIQDTLNTLDGLLHLMDQPLSVDEEGLVLLEQKLSRAKTQINSQLRPMMSELEERARQQRGHLHLLETSIDGILADVKNLENIRDNLPPGCYNTQALEQQ

SEQ ID NO: 906271 - protein, 1232 aa, Homo sapiens; identical to SEQ ID NO: 906270

SEQ ID NO: 906272 - protein, 1232 aa, Homo sapiens; identical to SEQ ID NO: 906270

SEQ ID NO: 906273 - protein, 1221 aa, Homo sapiens
DHLIEGKGRHSGAQSENHQPRRRAATPAAETETERPGTAMPALWLGCCLCFSLLLPAARATSRREVCDCNGKSRQCIFDRELHRQTGNGFRCLNCNDNTDGIHCEKCKNGFYRHRERDRCLPCNCNSKGSLSARCDNSGRCSCKPGVTGARCDRCLPGFHMLTDAGCTQDQRLLDSKCDCDPAGIAGPCDAGRCVCKPAVTGERCDRCRSGYYNLDGGNPEGCTQCFCYGHSASCRSSAEYSVHKITSTFHQDVDGWKAVQRNGSPAKLQWSQRHQDVFSSAQRLDPVYFVAPAKFLGNQQVSYGQSLSFDYRVDRGGRHPSAHDVILEGAGLRITAPLMPLGKTLPCGLTKTYTFRLNEHPSNNWSPQLSYFEYRRLLRNLTALRIRATYGEYSTGYIDNVTLISARPVSGAPAPWVEQCICPVGYKGQFCQDCASGYKRDSARLGPFGTCIPCNCQGGGACDPDTGDCYSGDENPDIECADCPIGFYNDPHDPRSCKPCPCHNGFSCSVMPETEEVVCNNCPPGVTGARCELCADGYFGDPFGEHGPVRPCQPCQCNNNVDPSASGNCDRLTGRCLKCIHNTAGIYCDQCKAGYFGDPLAPNPADKCRACNCNPMGSEPVGCRSDGTCVCKPGFGGPNCEHGAFSCPACYNQVKIQMDQFMQQLQRMEALISKAQGGDGVVPDTELEGRMQQAEQALQDILRDAQISEGASRSLGLQLAKVRSQENSYQSRLDDLKMTVERVRALGSQYQNRVRDTHRLITQMQLSLAESEASLGNTNIPASDHYVGPNGFKSLAQEATRLAESHVESASNMEQLTRETEDYSKQALSLVRKALHEGVGSGSGSPDGAVVQGLVEKLEKTKSLAQQLTREATQAEIEADRSYQHSLRLLDSVSRLQGVSDQSFQVEEAKRIKQKADSLSSLVTRHMDEFKRTQKNLGNWKEEAQQLLQNGKSGREKSDQLLSRANLAKSRAQEALSMGNATFYEVESILKNLREFDLQVDNRKAEAEEAMKRLSYISQKVSDASDKTQQAERALGSAAADAQRAKNGAGEALEISSEIEQEIGSLNLEANVTADGALAMEKGLASLKSEMREVEGELERKELEFDTNMDAVQMVITEAQKVDTRAKNAGVTIQDTLNTLDGLLHLMDPALDGPAGTTQINKLAYLNLRPPTQELTQCKKTASTPCDFISDQSALLAHWLPQPMKFSLKTLLPKCSGRLI

SEQ ID NO: 906274 - protein, 1140 aa, Homo sapiens
DHLIEGKGRHSGAQSENHQPRRRAATPAAETETERPGTAMPALWLGCCLCFSLLLPAARATSRREVCDCNGKSRQCIFDRELHRQTGNGFRCLNCNDNTDGIHCEKCKNGFYRHRERDRCLPCNCNSKGSLSARCDNSGRCSCKPGVTGARCDRCLPGFHMLTDAGCTQDQRLLDSKCDCDPAGIAGPCDAGRCVCKPAVTGERCDRCRSGYYNLDGGNPEGCTQCFCYGHSASCRSSAEYSVHKITSTFHQDVDGWKAVQRNGSPAKLQWSQRHQDVFSSAQRLDPVYFVAPAKFLGNQQVSYGQSLSFDYRVDRGGRHPSAHDVILEGAGLRITAPLMPLGKTLPCGLTKTYTFRLNEHPSNNWSPQLSYFEYRRLLRNLTALRIRATYGEYSTGYIDNVTLISARPVSGAPAPWVEQCICPVGYKGQFCQDCASGYKRDSARLGPFGTCIPCNCQGGGACDPDTGDCYSGDENPDIECADCPIGFYNDPHDPRSCKPCPCHNGFSCSVMPETEEVVCNNCPPGVTGARCELCADGYFGDPFGEHGPVRPCQPCQCNNNVDPSASGNCDRLTGRCLKCIHNTAGIYCDQCKAGYFGDPLAPNPADKCRACNCNPMGSEPVGCRSDGTCVCKPGFGGPNCEHGAFSCPACYNQVKIQMDQFMQQLQRMEALISKAQGGDGVVPDTELEGRMQQAEQALQDILRDAQISEGASRSLGLQLAKVRSQENSYQSRLDDLKMTVERVRALGSQYQNRVRDTHRLITQMQLSLAESEASLGNTNIPASDHYVGPNGFKSLAQEATRLAESHVESASNMEQLTRETEDYSKQALSLVRKALHEGVGSGSGSPDGAVVQGLVEKLEKTKSLAQQLTREATQAEIEADRSYQHSLRLLDSVSRLQGVSDQSFQVEEAKRIKQKADSLSSLVTRHMDEFKRTQKNLGNWKEEAQQLLQNGKSGREKSDQLLSRANLAKSRAQEALSMGNATFYEVESILKNLREFDLQVDNRKAEAEEAMKRLSYISQKVSDASDKTQQAERALGSAAADAQRAKNGAGEALEISSEIEQEIGSLNLEANVTADGALAMEKGLASLKSEMREVEGELERKELEFDTNMDAVQMVITEAQRSWLWYQPSGFCNHLGPAD

SEQ ID NO: 906275 - protein, 985 aa, Homo sapiens
DHLIEGKGRHSGAQSENHQPRRRAATPAAETETERPGTAMPALWLGCCLCFSLLLPAARATSRREVCDCNGKSRQCIFDRELHRQTGNGFRCLNCNDNTDGIHCEKCKNGFYRHRERDRCLPCNCNSKGSLSARCDNSGRCSCKPGVTGARCDRCLPGFHMLTDAGCTQDQRLLDSKCDCDPAGIAGPCDAGRCVCKPAVTGERCDRCRSGYYNLDGGNPEGCTQCFCYGHSASCRSSAEYSVHKITSTFHQDVDGWKAVQRNGSPAKLQWSQRHQDVFSSAQRLDPVYFVAPAKFLGNQQVSYGQSLSFDYRVDRGGRHPSAHDVILEGAGLRITAPLMPLGKTLPCGLTKTYTFRLNEHPSNNWSPQLSYFEYRRLLRNLTALRIRATYGEYSTGYIDNVTLISARPVSGAPAPWVEQCICPVGYKGQFCQDCASGYKRDSARLGPFGTCIPCNCQGGGACDPDTGDCYSGDENPDIECADCPIGFYNDPHDPRSCKPCPCHNGFSCSVMPETEEVVCNNCPPGVTGARCELCADGYFGDPFGEHGPVRPCQPCQCNNNVDPSASGNCDRLTGRCLKCIHNTAGIYCDQCKAGYFGDPLAPNPADKCRACNCNPMGSEPVGCRSDGTCVCKPGFGGPNCEHGAFSCPACYNQVKIQMDQFMQQLQRMEALISKAQGGDGVVPDTELEGRMQQAEQALQDILRDAQISEGASRSLGLQLAKVRSQENSYQSRLDDLKMTVERVRALGSQYQNRVRDTHRLITQMQLSLAESEASLGNTNIPASDHYVGPNGFKSLAQEATRLAESHVESASNMEQLTRETEDYSKQALSLVRKALHEGVGSGSGSPDGAVVQGLVEKLEKTKSLAQQLTREATQAEIEADRSYQHSLRLLDSVSRLQGVSDQSFQVEEAKRIKQKADSLSSLVTRHMDEFKRTQKNLGNWKEEAQQLLQNGKSGREGPARCSTSRSLASDSSTWPRRSFRNMRS

SEQ ID NO: 906276 - protein, 1232 aa, Homo sapiens; identical to SEQ ID NO: 906270

SEQ ID NO: 906277 - protein, 1232 aa, Homo sapiens; identical to SEQ ID NO: 906270

SEQ ID NO: 906278 - protein, 1147 aa, Homo sapiens
DHLIEGKGRHSGAQSENHQPRRRAATPAAETETERPGTAMPALWLGCCLCFSLLLPAARATSRREVCDCNGKSRQCIFDRELHRQTGNGFRCLNCNDNTDGIHCEKCKNGFYRHRERDRCLPCNCNSKGSLSARCDNSGRCSCKPGVTGARCDRCLPGFHMLTDAGCTQDQRLLDSKCDCDPAGIAGPCDAGRCVCKPAVTGERCDRCRSGYYNLDGGNPEGCTQCFCYGHSASCRSSAEYSVHKITSTFHQDVDGWKAVQRNGSPAKLQWSQRHQDVFSSAQRLDPVYFVAPAKFLGNQQVSYGQSLSFDYRVDRGGRHPSAHDVILEGAGLRITAPLMPLGKTLPCGLTKTYTFRLNEHPSNNWSPQLSYFEYRRLLRNLTALRIRATYGEYSTGYIDNVTLISARPVSGAPAPWVEQCICPVGYKGQFCQDCASGYKRDSARLGPFGTCIPCNCQGGGACDPDTGDCYSGDENPDIECADCPIGFYNDPHDPRSCKPCPCHNGFSCSVMPETEEVVCNNCPPGVTGARCELCADGYFGDPFGEHGPVRPCQPCQCNNNVDPSASGNCDRLTGRCLKCIHNTAGIYCDQCKAGYFGDPLAPNPADKCRACNCNPMGSEPVGCRSDGTCVCKPGFGGPNCEHGAFSCPACYNQVKIQMDQFMQQLQRMEALISKAQGGDGVVPDTELEGRMQQAEQALQDILRDAQISEGASRSLGLQLAKVRSQENSYQSRLDDLKMTVERVRALGSQYQNRVRDTHRLITQMQLSLAESEASLGNTNIPASDHYVGPNGFKSLAQEATRLAESHVESASNMEQLTRETEDYSKQALSLVRKALHEGVGSGSGSPDGAVVQGLVEKLEKTKSLAQQLTREATQAEIEADRSYQHSLRLLDSVSRLQGVSDQSFQVEEAKRIKQKADSLSSLVTRHMDEFKRTQKNLGNWKEEAQQLLQNGKSGREKSDQLLSRANLAKSRAQEALSMGNATFYEVESILKNLREFDLQVDNRKAEAEEAMKRLSYISQKVSDASDKTQQAERALGSAAADAQRAKNGAGEALEISSEIEQEIGSLNLEANVTADGALAMEKGLASLKSEMREVEGELERRARQQRGHLHLLETSIDGILADVKNLENIRDNLPPGCYNTQALEQQ

SEQ ID NO: 906279 - protein, 164 aa, Homo sapiens
LISLFREASPLAMEKGLASLKSEMREVEGELERKELEFDTNMDAVQMVITEAQKVDTRAKNAGVTIQDTLNTLDGLLHLMDQPLSVDEEGLVLLEQKLSRAKTQINSQLRPMMSELEERARQQRGHLHLLETSIDGILADVKNLENIRDNLPPGCYNTQALEQQ

SEQ ID NO: 906280 - protein, 125 aa, Homo sapiens
GQFVYTQMVITEAQKVDTRAKNAGVTIQDTLNTLDGLLHLMDQPLSVDEEGLVLLEQKLSRAKTQINSQLRPMMSELEERARQQRGHLHLLETSIDGILADVKNLENIRDNLPPGCYNTQALEQQ

SEQ ID NO: 906281 - protein, 1232 aa, Homo sapiens; identical to SEQ ID NO: 906270

SEQ ID NO: 906282 - protein, 1232 aa, Homo sapiens; identical to SEQ ID NO: 906270

SEQ ID NO: 906283 - protein, 1182 aa, Homo sapiens
DHLIEGKGRHSGAQSENHQPRRRAATPAAETETERPGTAMPALWLGCCLCFSLLLPAARATSRREVCDCNGKSRQCIFDRELHRQTGNGFRCLNCNDNTDGIHCEKCKNGFYRHRERDRCLPCNCNSKGSLSARCDNSGRCSCKPGVTGARCDRCLPGFHMLTDAGCTQDQRLLDSKCDCDPAGIAGPCDAGRCVCKPAVTGERCDRCRSGYYNLDGGNPEGCTQCFCYGHSASCRSSAEYSVHKITSTFHQDVDGWKAVQRNGSPAKLQWSQRHQDVFSSAQRLDPVYFVAPAKFLGNQQVSYGQSLSFDYRVDRGGRHPSAHDVILEGAGLRITAPLMPLGKTLPCGLTKTYTFRLNEHPSNNWSPQLSYFEYRRLLRNLTALRIRATYGEYSTGYIDNVTLISARPVSGAPAPWVEQCICPVGYKGQFCQDCASGYKRDSARLGPFGTCIPCNCQGGGACDPDTGDCYSGDENPDIECADCPIGFYNDPHDPRSCKPCPCHNGFSCSVMPETEEVVCNNCPPGVTGARCELCADGYFGDPFGEHGPVRPCQPCQCNNNVDPSASGNCDRLTGRCLKCIHNTAGIYCDQCKAGYFGDPLAPNPADKCRACNCNPMGSEPVGCRSDGTCVCKPGFGGPNCEHGAFSCPACYNQVKIQMDQFMQQLQRMEALISKAQGGDGVVPDTELEGRMQQAEQALQDILRDAQISEGASRSLGLQLAKVRSQENSYQSRLDDLKMTVERVRALGSQYQNRVRDTHRLITQMQLSLAESEASLGNTNIPASDHYVGPNGFKSLAQEATRLAESHVESASNMEQLTRETEDYSKQALSLVRKALHEGVGSGSGSPDGAVVQGLVEKLEKTKSLAQQLTREATQAEIEADRSYQHSLRLLDSVSRLQGVSDQSFQVEEAKRIKQKADSLSSLVTRHMDEFKRTQKNLGNWKEEAQQLLQNGKSGREKSDQLLSRANLAKSRAQEALSMGNATFYEVESILKNLREFDLQVDNRKAEAEEAMKRLSYISQKVSDASDKTQQAERALGSAAADAQRAKNGAGEALEISSEIEQEIGSLNLEANVTADGALAMEKGLASLKSEMREVEGELERKELEFDTNMDAVQMVITEAQKVDTRAKNAGVTIQDTLNTLDGLLHLMEQPLSVDEEGLVLAETDNYALCPSHNFRPVPNVK

SEQ ID NO: 906284 - protein, 898 aa, Homo sapiens
QPSPEPHSPTEPPAWGSSIVKVPSGIFDVNSRKSSTGSISNVLFSTQDPVEDAVFGEATNLKKNGDRGEKRQKHFPKTSLLHIARTHSFENVSCHLPDSRTCMSESTWNPEHRSSPVPEMLEESQELLEPVVDDVPKTTATVDTYESLLSDSNSNQSRDLKTVSKDLRNKRSSLYGIAKVVQREDVETGLDPLSLLATECTGGKTPDSEDKLFSPVIARNLADEIESYMNLKSPLGSKSSSMELHREENRESGMTTAFIHALERRSSLPLDHGSPAQENPESEKSSPAVSRSKTFTGRFKQQTPSRTHKERSTSLSALVRSSPHGSLGSVVNSLSGLKLDNILSGPKIDVLKSGMKQAATVASKMWVAVASAYSYSDDEEETNRDYSFPAGLEDHILGENISPNTSISGLVPSELTQSNTSLGSSSSSGDVGKLHYPTGEVPFPRGMKGQDFEKSDHGSSQNTSMSSIYQNCAMEVLMSSCSQCRACGALVYDEEIMAGWTADDSNLNTACPFCKSNFLPLLNIEFKDLRGSASFFLKPSTSGDSLQSGSIPLANESLEHKPVSSLAEPDLINFMDFPKHNQIITEETGSAVEPSDEIKRASGDVQTMKISSVPNSLSKRNVSLTRSHSVGGPLQNIDFTQRPFHGISTVSLPNSLQEVVDPLGKRPNPPPVSVPYLSPLVLRKELESLLENEGDQVIHTSSFINQHPIIFWNLVWYFRRLDLPSNLPGLILTSEHCNEGVQLPLSSLSQDSKLVYIQLLWDNINLHQEPREPLYVSWRNFNSEKKSSLLSEEQQETSTLVETIRQSIQHNNVLKPINLLSQQMKPGMKRQRSLYREILFLSLVSLGRENIDIEAFDNEYGIAYNSLSSEILERLQKIDAPPSASVEWCRKCFGAPLI

SEQ ID NO: 906285 - protein, 861 aa, Homo sapiens
QPSPEPHSPTEPPAWGSSIVKVPSGIFDVNSRKSSTGSISNVLFSTQDPVEDAVFGEATNLKKNGDRGEKRQKHFPKTSLLHIARTHSFENVSCHLPDSRTCMSESTWNPEHRSSPVPEMLEESQELLEPVVDDVPKTTATVDTYESLLSDSNSNQSRDLKTVSKDLRNKRSSLYGIAKVVQREDVETGLDPLSLLATECTGGKTPDSEDKLFSPVIARNLADEIESYMNLKSPLGSKSSSMELHREENRESGMTTAFIHALERRSSLPLDHGSPAQENPESEKSSPAVSRSKTFTGRFKQQTPSRTHKERSTSLSALVRSSPHGSLGSVVNSLSGLKLDNILSGPKIDVLKSGMKQAATVASKMWVAVASAYSYSDDEEETNRDYSFPAGLEDHILGENISPNTSISGLVPSELTQSNTSLGSSSSSGDVGKLHYPTGEVPFPRGMKGQDFEKSDHGSSQNTSMSSIYQNCAMEVLMSSCSQCRACGALVYDEEIMAGWTADDSNLNTACPFCKSNFLPLLNIEFKDLRGSASFFLKPSTSGDSLQSGSIPLANESLEHKPVSSLAEPDLINFMDFPKHNQIITEETGSAVEPSDEIKRASGDVQTMKISSVPNSLSKRNVSLTRSHSVGGPLQNIDFTQRPFHGISTVSLPNSLQEVVDPLGKRPNPPPVSVPYLSPLVLRKELESLLENEGDQVIHTSSFINQHPIIFWNLVWYFRRLDLPSNLPGLILTSEHCNEGVQLPLSSLSQDSKLVYIQLLWDNINLHQEPREPLYVSWRNFNSEKKSSLLSEEQQETSTLVETIRQSIQHNNVLKPINLLSQQMKPGMKRQRSLYREILFLSLVSLGRENIDIGKLVNKRL

SEQ ID NO: 906286 - protein, 773 aa, Homo sapiens
QPSPEPHSPTEPPAWGSSIVKVPSGIFDVNSRKSSTGSISNVLFSTQDPVEDAVFGEATNLKKNGDRGEKRQKHFPKTSLLHIARTHSFENVSCHLPDSRTCMSESTWNPEHRSSPVPEMLEESQELLEPVVDDVPKTTATVDTYESLLSDSNSNQSRDLKTVSKDLRNKRSSLYGIAKVVQREDVETGLDPLSLLATECTGGKTPDSEDKLFSPVIARNLADEIESYMNLKSPLGSKSSSMELHREENRESGMTTAFIHALERRSSLPLDHGSPAQENPESEKSSPAVSRSKTFTGRFKQQTPSRTHKERSTSLSALVRSSPHGSLGSVVNSLSGLKLDNILSGPKIDVLKSGMKQAATVASKMWVAVASAYSYSDDEEETNRDYSFPAGLEDHILGENISPNTSISGLVPSELTQSNTSLGSSSSSGDVGKLHYPTGEVPFPRGMKGQDFEKSDHGSSQNTSMSSIYQNCAMEVLMSSCSQCRACGALVYDEEIMAGWTADDSNLNTACPFCKSNFLPLLNIEFKDLRGSASFFLKPSTSGDSLQSGSIPLANESLEHKPVSSLAEPDLINFMDFPKHNQIITEETGSAVEPSDEIKRASGDVQTMKISSVPNSLSKRNVSLTRSHSVGGPLQNIDFTQRPFHGISTVSLPNSLQEVVDPLGKRPNPPPVSVPYLSPLVLRKELESLLENEGDQVIHTSSFINQHPIIFWNLVWYFRRLDLPSNLPGLILTSEHCNEGVQLPLSSLSQDSTGVYTRAVVTGAVELELCKWR

SEQ ID NO: 906287 - protein, 257 aa, Homo sapiens
KSVPASNAIAYKAGLIFRYPEEDYESFPLSESDVPLFCLPMGATIECWDPETKYPLPVFSTFVLTGSSAKKVYGAAIQFYEPYSRELLSEKQLMHLGLLTPVERKMVSKSINTNKCICLLSHWPFFEAFRKFLMFIYKLSVSGPHPLPIEKHISHFMQNIPFPSPQRPRILVQLSVHDALILSQPVSTPLPLSGANFSTLLMNLGPENCATLLLFVLLESKILLHSLRPAVLTGVAEAVVAGAVVTGAVELELCKWR

SEQ ID NO: 906288 - protein, 671 aa, Homo sapiens
KSVPASNAIAYKAGLIFRYPEEDYESFPLSESDVPLFCLPMGATIECWDPETKYPLPVFSTFVLTGSSAKKVYGAAIQFYEPYSRELLSEKQLMHLGLLTPVERKMVSKSINTNKCICLLSHWPFFEAFRKFLMFIYKLSVSGPHPLPIEKHISHFMQTSLFLHHKDHILGENISPNTSISGLVPSELTQSNTSLGSSSSSGDVGKLHYPTGEVPFPRGMKGQDFEKSDHGSSQNTSMSSIYQNCAMEVLMSSCSQCRACGALVYDEEIMAGWTADDSNLNTACPFCKSNFLPLLNIEFKDLRGSASFFLKPSTSGDSLQSGSIPLANESLEHKPVSSLAEPDLINFMDFPKHNQIITEETGSAVEPSDEIKRASGDVQTMKISSVPNSLSKRNVSLTRSHSVGGPLQNIDFTQRPFHGISTVSLPNSLQEVVDPLGKRPNPPPVSVPYLSPLVLRKELESLLENEGDQVIHTSSFINQHPIIFWNLVWYFRRLDLPSNLPGLILTSEHCNEGVQLPLSSLSQDSKLVYIQLLWDNINLHQEPREPLYVSWRNFNSEKKSSLLSEEQQETSTLVETIRQSIQHNNVLKPINLLSQQMKPGMKRQRSLYREILFLSLVSLGRENIDIEAFDNEYGIAYNSLSSEILERLQKIDAPPSASVEWCRKCFGAPLI

SEQ ID NO: 906289 - protein, 880 aa, Homo sapiens
QPSPEPHSPTEPPAWGSSIVKVPSGIFDVNSRKSSTGSISNVLFSTQDPVEDAVFGEATNLKKNGDRGEKRQKHFPERSCSFSSESRAGMLLKKSSLDSNSSEMAIMMGADAKILTAALTCPKTSLLHIARTHSFENVSCHLPDSRTCMSESTWNPEHRSSPVPEMLEESQELLEPVVDDVPKTTATVDTYESLLSDSNSNQSRDLKTVSKDLRNKRSSLYGIAKVVQREDVETGLDPLSLLATECTGGKTPDSEDKLFSPVIARNLADEIESYMNLKSPLGSKSSSMELHREENRESGMTTAFIHALERRSSLPLDHGSPAQENPESEKSSPAVSRSKTFTGRFKQQTPSRTHKERSTSLSALVRSSPHGSLGSVVNSLSGLKLDNILSGPKIDVLKSGMKQAATVASKMWVAVASAYSYSDDEEETNRDYSFPAGLEDHILGENISPNTSISGLVPSELTQSNTSLGSSSSSGDVGKLHYPTGEVPFPRGMKGQDFEKSDHGSSQNTSMSSIYQNCAMEVLMSSCSQCRACGALVYDEEIMAGWTADDSNLNTACPFCKSNFLPLLNIEFKDLRGSASFFLKPSTSGDSLQSGSIPLANESLEHKPVSSLAEPDLINFMDFPKHNQIITEETGSAVEPSDEIKRASGDVQTMKISSVPNSLSKRNVSLTRSHSVGGPLQNIDFTQRPFHGISTVSLPNSLQEVVDPLGKRPNPPPVSVPYLSPLVLRKELESLLENEGDQVIHTSSFINQHPIIFWNLVWYFRRLDLPSNLPGLILTSEHCNEGVQLPLSSLSQDSKLVYIQLLWDNINLHQEPREPLYVSWRNFNSEKKSSLLSEEQQETSTLVETIRQSIQHNNVLKPINLLSQQMKPGMKRQRGI

SEQ ID NO: 906290 - protein, 612 aa, Homo sapiens
QPSPEPHSPTEPPAWGSSIVKVPSGIFDVNSRKSSTGSISNVLFSTQDPVEDAVFGEATNLKKNGDRGEKRQKHFPKTSLLHIARTHSFENVSCHLPDSRTCMSESTWNPEHRSSPVPEMLEESQELLEPVVDDVPKTTATVDTYESLLSDSNSNQSRDLKTVSKDLRNKRSSLYGIAKVVQREDVETGLDPLSLLATECTGGKTPDSEDKLFSPVIARNLADEIESYMNLKSPLGSKSSSMELHREENRESGMTTAFIHALERRSSLPLDHGSPAQENPESEKSSPAVSRSKTFTGRFKQQTPSRTHKERSTSLSALVRSSPHGSLGSVVNSLSGLKLDNILSGPKIDVLKSGMKQAATVASKMWVAVASAYSYSDDEEETNRDYSFPAGLEDHILGENISPNTSISGLVPSELTQSNTSLGSSSSSGDVGKLHYPTGEVPFPRGMKGQDFEKSDHGSSQNTSMSSIYQNCAMEVLMSSCSQCRACGALVYDEEIMAGWTADDSNLNTACPFCKSNFLPLLNIEFKDLRGSASFFLKPSTSGDSLQSGSIPLANESLEHKPVSSLAEPDLINFMDFPKHNQIITEETGSAVEPRYQRVQRPLYVVINGVPL

SEQ ID NO: 906291 - protein, 135 aa, Homo sapiens
RRSSLPLDHGSPAQENPESEKSSPAVSRSKTFTGRFKQQTPSRTHKERSTSLSALVRSSPHGSLGSVVNSLSGLKLDNILSGPKIDVLKSGMKQAATVASKMWVAVASAYSYSDDEVRKLYVCSLSAIGVFIVSF

SEQ ID NO: 906292 - protein, 427 aa, Homo sapiens
METLCLRASFWLALVGCVISDNPERYSTNLSNHVDDFTTFRGTELSFLVTTHQPTNLVLPSNGSMHNYCPQQTKITSAFKYINTVISCTIFIVGMVGNATLLRIIYQNKCMRNGPNALIASLALGDLIYVVIDLPINVFKLLAGRWPFDHNDFGVFLCKLFPFLQKSSVGITVLNLCALSVDRYRAVASWSRVQGIGIPLVTAIEIVSIWILSFILAIPEAIGFVMVPFEYRGEQHKTCMLNATSKFMEFYQDVKDWWLFGFYFCMPLVCTAIFYTLMTCEMLNRRNGSLRIALSEHLKQRREVAKTVFCLVVIFALCWFPLHLSRILKKTVYNEMDKNRCELLSFLLLMDYIGINLATMNSCINPIALYFVSKKFKNCFQSCLCCCCYQSKSLMTSVPMNGTSIQWKNHDQNNHNTDRSSHKDSMN

SEQ ID NO: 906293 - protein, 427 aa, Homo sapiens; identical to SEQ ID NO: 906292

SEQ ID NO: 906294 - protein, 318 aa, Homo sapiens
METLCLRASFWLALVGCVISDNPERYSTNLSNHVDDFTTFRGTELSFLVTTHQPTNLVLPSNGSMHNYCPQQTKITSAFKYINTVISCTIFIVGMVGNATLLRIIYQNKCMRNGPNALIASLALGDLIYVVIDLPINVFKFYQDVKDWWLFGFYFCMPLVCTAIFYTLMTCEMLNRRNGSLRIALSEHLKQRREVAKTVFCLVVIFALCWFPLHLSRILKKTVYNEMDKNRCELLSFLLLMDYIGINLATMNSCINPIALYFVSKKFKNCFQSCLCCCCYQSKSLMTSVPMNGTSIQWKNHDQNNHNTDRSSHKDSMN

SEQ ID NO: 906295 - protein, 162 aa, Homo sapiens
MPLVCTAIFYTLMTCEMLNRRNGSLRIALSEHLKQRREVAKTVFCLVVIFALCWFPLHLSRILKKTVYNEMDKNRCELLSFLLLMDYIGINLATMNSCINPIALYFVSKKFKNCFQSCLCCCCYQSKSLMTSVPMNGTSIQWKNHDQNNHNTDRSSHKDSMN

SEQ ID NO: 906296 - protein, 155 aa, Homo sapiens [sequence omitted]

SEQ ID NO: 906297 - protein, 427 aa, Homo sapiens; identical to SEQ ID NO: 906292

SEQ ID NO: 906298 - protein, 187 aa, Homo sapiens
METLCLRASFWLALVGCVISDNPERYSTNLSNHVDDFTTFRGTELSFLVTTHQPTNLVLPSNGSMHNYCPQQTKITSAFKYINTVISCTIFIVGMVGNATLLRIIYQNKCMRNGPNALIASLALGDLIYVVIDLPINVFKLLAGRWPFDHNDFGVFLCKLFPFLQKSSVGITVLNLCALSVDSSTKM

SEQ ID NO: 906299 - protein, 256 aa, Homo sapiens
MWSLISLSMYLRYRAVASWSRVQGIGIPLVTAIEIVSIWILSFILAIPEAIGFVMVPFEYRGEQHKTCMLNATSKFMEFYQDVKDWWLFGFYFCMPLVCTAIFYTLMTCEMLNRRNGSLRIALSEHLKQRREVAKTVFCLVVIFALCWFPLHLSRILKKTVYNEMDKNRCELLSFLLLMDYIGINLATMNSCINPIALYFVSKKFKNCFQSCLCCCCYQSKSLMTSVPMNGTSIQWKNHDQNNHNTDRSSHKDSMN

SEQ ID NO: 906300 - protein, 1029 aa, Homo sapiens
SGAGGGPKVQYVGPGHSSRASATESVSFSGIVQMDEDTHYDKVEDVVGSHIEDAVTFWAQSINRNKDIMKIGCSLSEVCPQASSVLGNLDPNKIYGGLFSEDQCWYRCKVLKIISVEKCLVRYIDYGNTEILNRSDIVEIPLELQFSSVAKKYKLWGLHIPSDQEVTQFDQGTTFLGSLIFEKEIKMRIKATSEDGTVIAQAEYGSVDIGEEVLKKGFAEKCRLASRTDICEEKKLDPGQLVLRNLKSPIPLWGHRSNQSTFSRPKGHLSEKMTLDLKDENDAGNLITFPKESLAVGDFNLGSNVSLEKIKQDQKLIEENEKLKTEKDALLESYKALELKVEQIAQELQQEKAAAVDLTNHLEYTLKTYIDTRMKNLAAKMEILKEMRHVDISVRFGKDLSDAIQVLDEGCFTTPASLNGLEIIWAEYSLAQENIKTCEYVSEGNILIAQRNEMQQKLYMSVEDFILEVDESSLNKRLKTLQDLSVSLEAVYGQAKEGANSDEILKKFYDWKCDKREEFTSVRSETDASLHRLVAWFQRTLKVFDLSVEGSLISEDAMDNIDEILEKTESSVCKELEIALVDQGDADKEIISNTYSQVLQKIHSEERLIATVQAKYKDSIEFKKQLIEYLNKSPSVDHLLSIKKTLKSLKALLRWKLVEKSNLEESDDPDGSQIEKIKEEITQLRNNVFQEIYHEREEYEMLTSLAQKWFPELPLLHPEIGLLKYMNSGGLLTMSLERDLLDAEPMKELSSKRPLVRSEVNGQIILLKGYSVDVDTEAKVIERAATYHRAWREAEGDSGLLPLIFLFLCKSDPMAYLMVPYYPRANLNAVQANMPLNSEETLKVMKGVAQGLHTLHKADIIHGSLHQNNVFALNREQGIVGDFDFTKSVSQRASVNMMVGDLSLMSPELKMGKPASPGSDLYAYGCLLLWLSVQNQEFEINKDGIPKVDQFHLDDKVKSLLCSLICYRSSMTAEQVLNAECFLMPKEQSVPNPEKDTEYTLYKKEEEIKTENLDKCMEKTRNGEANFDC

SEQ ID NO: 906301 - protein, 933 aa, Homo sapiens
SGAGGGPKVQYVGPGHSSRASATESVSFSGIVQMDEDTHYDKVEDVVGSHIEDAVTFWAQSINRNKDIMKIGCSLSEVCPQASSVLGNLDPNKIYGGLFSEDQCWYRCKVLKIISVEKCLVRYIDYGNTEILNRSDIVEIPLELQFSSVAKKYKLWGLHIPSDQEVTQFDQGTTFLGSLIFEKEIKMRIKATSEDGTVIAQAEYGSVDIGEEVLKKGFAEKCRLASRTDICEEKKLDPGQLVLRNLKSPIPLWGHRSNQSTFSRPKGHLSEKMTLDLKDENDAGNLITFPKESLAVGDFNLGSNVSLEKIKQDQKLIEENEKLKTEKDALLESYKALELKVEQIAQELQQEKAAAVDLTNHLEYTLKTYIDTRMKNLAAKMEILKEMRHVDISVRFGKDLSDAIQVLDEGCFTTPASLNGLEIIWAEYSLAQENIKTCEYVSEGNILIAQRNEMQQKLYMSVEDFILEVDESSLNKRLKTLQDLSVSLEAVYGQAKEGANSDEILKKFYDWKCDKREEFTSVRSETDASLHRLVAWFQRTLKVFDLSVEGSLISEDAMDNIDEILEKTESSVCKELEIALVDQGDADKEIISNTYSQVLQKIHSEERLIATVQAKYKDSIEFKKQLIEYLNKSPSVDHLLSIKKTLKSLKALLRWKLVEKSNLEESDDPDGSQIEKIKEEITQLRNNVFQEIYHEREEYEMLTSLAQKWFPELPLLHPEIGLLKYMNSGGLLTMSLERDLLDAEPMKELSSKRPLVRSEVNGQIILLKGYSVDVDTEAKVIERAATYHRAWREAEGDSGLLPLIFLFLCKSDPMAYLMVPYYPRANLNAVQANMPLNSEETLKVMKGVAQGLHTLHKADIIHGSLHQNNVFALNREQGIVGDFDFTKSVSQRASVNMMVGDLSLMSPELKMGKPASPGSDLYAYGCLLLWFKN

SEQ ID NO: 906302 - protein, 560 aa, Homo sapiens
  misc_feature (8)..(8): Xaa can be any naturally occurring amino acid
DAETTLLXLHRYSDLSVSLEAVYGQAKEGANSDEILKKFYDWKCDKREEFTSVRSETDASLHRLVAWFQRTLKVFDLSVEGSLISEDAMDNIDEILEKTESSVCKELEIALVDQGDADKEIISNTYSQVLQKIHSEERLIATVQAKYKDSIEFKKQLIEYLNKSPSVDHLLSIKKTLKSLKALLRWKLVEKSNLEESDDPDGSQIEKIKEEITQLRNNVFQEIYHEREEYEMLTSLAQKWFPELPLLHPEIGLLKYMNSGGLLTMSLERDLLDAEPMKELSSKRPLVRSEVNGQIILLKGYSVDVDTEAKVIERAATYHRAWREAEGDSGLLPLIFLFLCKSDPMAYLMVPYYPRANLNAVQANMPLNSEETLKVMKGVAQGLHTLHKADIIHGSLHQNNVFALNREQGIVGDFDFTKSVSQRASVNMMVGDLSLMSPELKMGKPASPGSDLYAYGCLLLWLSVQNQEFEINKDGIPKVDQFHLDDKVKSLLCSLICYRSSMTAEQVLNAECFLMPKEQSVPNPEKDTEYTLYKKEEEIKTENLDKCMEKTRNGEANFDC

SEQ ID NO: 906303 - protein, 996 aa, Homo sapiens
MDEDTHYDKVEDVVGSHIEDAVTFWAQSINRNKDIMKIGCSLSEVCPQASSVLGNLDPNKIYGGLFSEDQCWYRCKVLKIISVEKCLVRYIDYGNTEILNRSDIVEIPLELQFSSVAKKYKLWGLHIPSDQEVTQFDQGTTFLGSLIFEKEIKMRIKATSEDGTVIAQAEYGSVDIGEEVLKKGFAEKCRLASRTDICEEKKLDPGQLVLRNLKSPIPLWGHRSNQSTFSRPKGHLSEKMTLDLKDENDAGNLITFPKESLAVGDFNLGSNVSLEKIKQDQKLIEENEKLKTEKDALLESYKALELKVEQIAQELQQEKAAAVDLTNHLEYTLKTYIDTRMKNLAAKMEILKEMRHVDISVRFGKDLSDAIQVLDEGCFTTPASLNGLEIIWAEYSLAQENIKTCEYVSEGNILIAQRNEMQQKLYMSVEDFILEVDESSLNKRLKTLQDLSVSLEAVYGQAKEGANSDEILKKFYDWKCDKREEFTSVRSETDASLHRLVAWFQRTLKVFDLSVEGSLISEDAMDNIDEILEKTESSVCKELEIALVDQGDADKEIISNTYSQVLQKIHSEERLIATVQAKYKDSIEFKKQLIEYLNKSPSVDHLLSIKKTLKSLKALLRWKLVEKSNLEESDDPDGSQIEKIKEEITQLRNNVFQEIYHEREEYEMLTSLAQKWFPELPLLHPEIGLLKYMNSGGLLTMSLERDLLDAEPMKELSSKRPLVRSEVNGQIILLKGYSVDVDTEAKVIERAATYHRAWREAEGDSGLLPLIFLFLCKSDPMAYLMVPYYPRANLNAVQANMPLNSEETLKVMKGVAQGLHTLHKADIIHGSLHQNNVFALNREQGIVGDFDFTKSVSQRASVNMMVGDLSLMSPELKMGKPASPGSDLYAYGCLLLWLSVQNQEFEINKDGIPKVDQFHLDDKVKSLLCSLICYRSSMTAEQVLNAECFLMPKEQSVPNPEKDTEYTLYKKEEEIKTENLDKCMEKTRNGEANFDC

SEQ ID NO: 906304 - protein, 851 aa, Homo sapiens
SGAGGGPKVQYVGPGHSSRASATESVSFSGIVQMDEDTHYDKVEDVVGSHIEDAVTFWAQSINRNKDIMKIGCSLSEVCPQASSVLGNLDPNKIYGGLFSEDQCWYRCKVLKIISVEKCLVRYIDYGNTEILNRSDIVEIPLELQFSSVAKKYKLWGLHIPSDQEVTQFDQQEKAAAVDLTNHLEYTLKTYIDTRMKNLAAKMEILKEMRHVDISVRFGKDLSDAIQVLDEGCFTTPASLNGLEIIWAEYSLAQENIKTCEYVSEGNILIAQRNEMQQKLYMSVEDFILEVDESSLNKRLKTLQDLSVSLEAVYGQAKEGANSDEILKKFYDWKCDKREEFTSVRSETDASLHRLVAWFQRTLKVFDLSVEGSLISEDAMDNIDEILEKTESSVCKELEIALVDQGDADKEIISNTYSQVLQKIHSEERLIATVQAKYKDSIEFKKQLIEYLNKSPSVDHLLSIKKTLKSLKALLRWKLVEKSNLEESDDPDGSQIEKIKEEITQLRNNVFQEIYHEREEYEMLTSLAQKWFPELPLLHPEIGLLKYMNSGGLLTMSLERDLLDAEPMKELSSKRPLVRSEVNGQIILLKGYSVDVDTEAKVIERAATYHRAWREAEGDSGLLPLIFLFLCKSDPMAYLMVPYYPRANLNAVQANMPLNSEETLKVMKGVAQGLHTLHKADIIHGSLHQNNVFALNREQGIVGDFDFTKSVSQRASVNMMVGDLSLMSPELKMGKPASPGSDLYAYGCLLLWLSVQNQEFEINKDGIPKVDQFHLDDKVKSLLCSLICYRSSMTAEQVLNAECFLMPKEQSVPNPEKDTEYTLYKKEEEIKTENLDKCMEKTRNGEANFDC

SEQ ID NO: 906305 - protein, 616 aa, Homo sapiens
MPPLETQSSLAPPSLQTPPASLTTPPLENLPSLAPPPLQTASAPLTTPHLETPPCPAPCPLQAPPSPLTTPPPETPSSIATPPPQAPPALASPPLQGLPSPPLSPLATPPPQAPPALALPPLQAPPSPPASPPLSPLATPSPQAPNALAVHLLQAPFSPPPSPPVQAPFSPPASPPVSPSATPPSQAPPSLAAPPLQVPPSPPASPPMSPSATPPPQAPPPLAAPPLQVPPSPPASPPMSPSATPPPRVPPLLAAPPLQVPPSPPASLPMSPLAKPPPQAPPALATPPLQALPSPPASFPGQAPFSPSASLPMSPLATPPPQAPPVLAAPLLQVPPSPPASPTLQAPRRPPTPGPDTSVSGPRLTLALAPGPPPPPSRSPSSTLSGPDLAGHSSSATSTPEELRGYDSGPEGGAAASPPPDAELAACHPAAWSRGPAPPLAFRGAPGAPLPWPPATGPGSADGLCTIYETEGPESATPAPGALDPGPSPGTSGGKAAAGAGAGASSRSPKQARLGELPLGALQASVVQHLLSRTLLLAAAEGAAGGSGGGPGGAEGGGVTGGARAALSDAELGRWAELLSPLDESRASITSVTSFSPDDVASPQGDWTVVEVETFH

SEQ ID NO: 906306 - protein, 460 aa, Homo sapiens
MDNKRDKAKAGAAARTPAARAPGLLTPRPPGSPRPPPPVTPAALRVLGAAGAVGRKPLAERAGGIGGATIPESAPRAGPTRSAGTSSRNPASRPPASGRGERAPPAKNTSPGPVSSPGRASGTTRPGPLGQKGLRISAEETVARGKATEAPKRSALSAGARRARSGPSARGTPRAPAHPSQPKPKGLQALRPPQVTPPRKDAAPALGPLSSSPLAHPLHRVPSPSSTLSGPDLAGHSSSATSTPEELRGYDSGPEGGAAASPPPDAELAACHPAAWSRGPAPPLAFRGAPGAPLPWPPATGPGSADGLCTIYETEGPESATPAPGALDPGPSPGTSGGKAAAGAGAGASSRSPKQARLGELPLGALQASVVQHLLSRTLLLAAAEGAAGGSGGGPGGAEGGGVTGGARAALSDAELGRWAELLSPLDESRASITSVTSFSPDDVASPQGDWTVVEVETFH

SEQ ID NO: 906307 - protein, 677 aa, Homo sapiens
ASTPPDSPPLQAPLSLPASPPLQTSLSPAVSPLSSPLTIHPLQALSSLASHSPQAPLSSLIMPPLETQSSLAPPSLQTPPASLTTPPLENLPSLAPPPLQTASAPLTTPHLETPPCPAPCPLQAPPSPLTTPPPETPSSIATPPPQAPPALASPPLQGLPSPPLSPLATPPPQAPPALALPPLQAPPSPPASPPLSPLATPSPQAPNALAVHLLQAPFSPPPSPPVQAPFSPPASPPVSPSATPPSQAPPSLAAPPLQVPPSPPASPPMSPSATPPPQAPPPLAAPPLQVPPSPPASPPMSPSATPPPRVPPLLAAPPLQVPPSPPASLPMSPLAKPPPQAPPALATPPLQALPSPPASFPGQAPFSPSASLPMSPLATPPPQAPPVLAAPLLQVPPSPPASPTLQAPRRPPTPGPDTSVSGPRLTLALAPGPPPPPSRSPSSTLSGPDLAGHSSSATSTPEELRGYDSGPEGGAAASPPPDAELAACHPAAWSRGPAPPLAFRGAPGAPLPWPPATGPGSADGLCTIYETEGPESATPAPGALDPGPSPGTSGGKAAAGAGAGASSRSPKQARLGELPLGALQASVVQHLLSRTLLLAAAEGAAGGSGGGPGGAEGGGVTGGARAALSDAELGRWAELLSPLDESRASITSVTSFSPDDVASPQGDWTVVEVETFH

SEQ ID NO: 906308 - protein, 550 aa, Homo sapiens
MDNKRDKAKAGAAARTPAARAPGLLTPRPPGSPRPPPPVTPAALRVLGAAGAVGRKPLAERAGGIGGATIPESAPRAGPTRSAGTSSRNPASRPPASGRGERAPPAKNTSPGPVSSPGRASGTTRPGPLGQKGLRISAEETVARGKATEAPKRSALSAGARRDTSGPTPGTPSPAMARRSRAAGTEVGLPRPAPSARPRPPTEGPRKSVSSASEHSTTEPSPAARRRPSAGGGLQRPASRSLSSSATPLSSPARSGPSARGTPRAPAHPSQPKPKGLQALRPPQVTPPRKDAAPALGPLSSSPLAHPLHRVPSPSSTLSGPDLAGHSSSATSTPEELRGYDSGPEGGAAASPPPDAELAACHPAAWSRGPAPPLAFRGAPGAPLPWPPATGPGSADGLCTIYETEGPESATPAPGALDPGPSPGTSGGKAAAGAGAGASSRSPKQARLGELPLGALQASVVQHLLSRTLLLAAAEGAAGGSGGGPGGAEGGGVTGGARAALSDAELGRWAELLSPLDESRASITSVTSFSPDDVASPQGDWTVVEVETFH

SEQ ID NO: 906309 - protein, 214 aa, Homo sapiens
SGQARGRSKRRKHKGPEGSRGDRWGTREAGAGRRCSHGGARPAGLGNEGLGLGGDPDHTDTGSRSKQRINNWKESKHKVIMASASARGNQDKDAHFPPPSKQSLLFCPKSKLHIHRAEISKIMRECQEESFWKRALPFSLVSMLVTQGLVYQGYLAANSRFGSLPKVALAGLLGFGLGKVSYIGVCQSKFHFFEDQLRGAGFGPQHKQALPPYL

SEQ ID NO: 906310 - protein, 186 aa, Homo sapiens
RAGEGAEQEKKTQRAGRKPGRQVGYSGSWSGPAVQSRGSEACWAWQRGTRPRRRPRPHSDSLLPSLDTGSRSKQRINNWKESKHKVIMASASARGNQDKDAHFPPPSKQSLLFCPKSKLHIHRAEISKIMRECQEESFWKRALPFSLVSMLVTQGLVYQGYLAANSRFGSLPKVARTASLPVRNAK

SEQ ID NO: 906311 - protein, 68 aa, Homo sapiens
AGRRGGGAREENTKGRKEAGETGGVLGKLERAGGAVTGERGLLGLATRDSASEATQTTQTLGQGVSRG

SEQ ID NO: 906312 - protein, 141 aa, Homo sapiens
SGQARGRSKRRKHKGPEGSRGDRWGTREAGAGRRCSHGGARPAGLGNEGLGLGGDPDHTDTGSRSKQRINNWKESKHKVIMASASARGNQDKDAHFPPPSKQSLLFCPKSKLHIHRAEISKIMRECQEESFWKRACLSPRD

SEQ ID NO: 906313 - protein, 171 aa, Homo sapiens
SGQARGRSKRRKHKGPEGSRGDRWGTREAGAGRRCSHGGARPAGLGNEGLGLGGDPDHTDTGSRSKQRINNWKESKHKVIMASASARGNQDKDAHFPPPSKQSLLFCPKSKLHIHRAEISKIMRECQEESFWKRALPFSLVSMLVTQGLVYQGYLAANSRFGSLPKVARKS

SEQ ID NO: 906314 - protein, 106 aa, Homo sapiens
CCLRQSVNHSHSPTRILLLPKSISVPSEKALLETDNCFGLPLVENTHCVTSEETSLFSSVENKVGDFSMTSVSSPYNFPYKPVVLSKIKTAHPQSRDLKDYARMSG

SEQ ID NO: 906315 - protein, 179 aa, Homo sapiens
SGQARGRSKRRKHKGPEGSRGDRWGTREAGAGRRCSHGGARPAGLGNEGLGLGGDPDHTDTGSRSKQRINNWKESKHKVIMASASARGNQDKDAHFPPPSKQSLLFCPKSKLHIHRAEISKIMRECQEESFWKRALPFSLVSMLVTQGLVYQGYLAANSRFGSLPKVARTASLPVRNAK

SEQ ID NO: 906316 - protein, 214 aa, Homo sapiens; identical to SEQ ID NO: 906309

SEQ ID NO: 906317 - protein, 214 aa, Homo sapiens; identical to SEQ ID NO: 906309

SEQ ID NO: 906318 - protein, 68 aa, Homo sapiens; identical to SEQ ID NO: 906311

SEQ ID NO: 906319 - protein, 351 aa, Homo sapiens
DQFLKPRPKPAPLALVWASVIKASGAGSEFQDQTRIRFMLETMLALKNNDMRKIPGYDPEPVEKLRKLQRALVRNAGSGSETQLRVSWDSVLSAEQTGRWWIVGSAWSGAPMIDNSHHTHLQKQLVGTVSSKILELARKQRMNTDIRRNIFCTIMTSEDFLDAFEKLLKLGLKDQQEREIIHVLMDCCLQEKTYNPFYAFLASKFCEYERRFQMTFQFSIWDKFRDLENLPATNFSNLVHLVAHLLKTKSLSLSILKVVEFSELDKPRVRFLRKVLSILLMETEVEDLSLIFTRVSDNPKLGVLREGLKLFISHFLLKNAQAHRSADEANVLREKADLATKCLQGKASLRM

SEQ ID NO: 906320 - protein, 675 aa, Homo sapiens
SRSAGEAGPGGSQGRVVRMKRRGGRGPRRGPAGGGEKALKRLKLAVEEFVHATSEGEAPGGCEGRGAPVSFRPGGRKSRKELRKEKRHLRKARRLQRTAGPEQGPGLGGRSGAEEASGHRQDTEERARPAPSRDPSPPRKPRPSRVKAKATAATAKTRPSAAATAAARKRALLAANEEEDREIRKLERCLGLNKRKKKDGSSSVPLSFARDGLDYILGALESGKNSGLYDSSGEEEEDAGQTLPESDLESDSQDESEEEEEGDVEKEKKAQEAEAQSEDDDEDTEEEQGEEKEKGAQEKRRGKRVRFAEDEEKSENSSEDGDITDKSLCGSGEKYIPPHVRQAEETVDFKKKEELERLKKHVKGLLNRLSEPNMASISGQLEELYMAHSRKDMNDTLTSALMGACVTASAMPSRLMMEHVLLVSILHHTVGIEVGAHFLEAVVRKFDAIYKYGSEGKECDNLFTVIAHLYNFHVVQSLLIFDILKKLIGTFTEKDIELILLMLKNVGFSLRKDDALSLKELITEAQTKASGAGSEFQDQTRIRFMLETMLALKNNDMRKIPGYDPEPVEKLRKLQRALVRNAGSGSETQLRVSWDSVLSAEQTGRWWIVGSAWSGAPMIDNSHHTHLQKQLVGTVSSKILELARKQRMNTDIRRNIFCTIMTSEDFLDAFEKLLK

SEQ ID NO: 906321 - protein, 675 aa, Homo sapiens; identical to SEQ ID NO: 906320

SEQ ID NO: 906322 - protein, 768 aa, Homo sapiens
SRSAGEAGPGGSQGRVVRMKRRGGRGPRRGPAGGGEKALKRLKLAVEEFVHATSEGEAPGGCEGRGAPVSFRPGGRKSRKELRKEKRHLRKARRLQRTAGPEQGPGLGGRSGAEEASGHRQDTEERARPAPSRDPSPPRKPRPSRVKAKATAATAKTRPSAAATAAARKRALLAANEEEDREIRKLERCLGLNKRKKKDGSSSVPLSFARDGLDYILGALESGKNSGLYDSSGEEEEDAGQTLPESDLESDSQDESEEEEEGDVEKEKKAQEAEAQSEDDDEDTEEEQGEEKEKGAQEKRRGKRVRFAEDEEKSENSSEDGDITDKSLCGSGEKYIPPHVRQAEETVDFKKKEELERLKKHVKGLLNRLSEPNMASISGQLEELYMAHSRKDMNDTLTSALMGACVTASAMPSRLMMEHVLLVSILHHTVGIEVGAHFLEAVVRKFDAIYKYGSEGKECDNLFTVIAHLYNFHVVQSLLIFDILKKLIGTFTEKDIELILLMLKNVGFSLRKDDALSLKELITEAQTKASGAGSEFQDQTRIRFMLETMLALKNNDMRKIPGYDPEPVEKLRKLQRALVRNAGSGSETQLRVSWDSVLSAEQTGRWWIVGSAWSGAPMIDNSHHTHLQKQLVGTVSSKILELARKQRMNTDIRRNIFCTIMTSEDFLDAFEKLLKLGLKDQQEREIIHVLMDCCLQEKTYNPFYAFLASKFCEYERRFQMTFQFSIWDKFRDLENLPATNFSNLVHLVAHLLKTKSLSLSILKLSFTF

SEQ ID NO: 906323 - protein, 857 aa, Homo sapiens
SRSAGEAGPGGSQGRVVRMKRRGGRGPRRGPAGGGEKALKRLKLAVEEFVHATSEGEAPGGCEGRGAPVSFRPGGRKSRKELRKEKRHLRKARRLQRTAGPEQGPGLGGRSGAEEASGHRQDTEERARPAPSRDPSPPRKPRPSRVKAKATAATAKTRPSAAATAAARKRALLAANEEEDREIRKLERCLGLNKRKKKDGSSSVPLSFARDGLDYILGALESGKNSGLYDSSGEEEEDAGQTLPESDLESDSQDESEEEEEGDVEKEKKAQEAEAQSEDDDEDTEEEQGEEKEKGAQEKRRGKRVRFAEDEEKSENSSEDGDITDKSLCGSGEKYIPPHVRQAEETVDFKKKEELERLKKHVKGLLNRLSEPNMASISGQLEELYMAHSRKDMNDTLTSALMGACVTASAMPSRLMMEHVLLVSILHHTVGIEVGAHFLEAVVRKFDAIYKYGSEGKECDNLFTVIAHLYNFHVVQSLLIFDILKKLIGTFTEKDIELILLMLKNVGFSLRKDDALSLKELITEAQTKASGAGSEFQDQTRIRFMLETMLALKNNDMRKIPGYDPEPVEKLRKLQRALVRNAGSGSETQLRVSWDSVLSAEQTGRWWIVGSAWSGAPMIDNSHHTHLQKQLVGTVSSKILELARKQRMNTDIRRNIFCTIMTSEDFLDAFEKLLKLGLKDQQEREIIHVLMDCCLQEKTYNPFYAFLASKFCEYERRFQMTFQFSIWDKFRDLENLPATNFSNLVHLVAHLLKTKSLSLSILKVVEFSELDKPRVRFLRKVLSILLMETEVEDLSLIFTRVSDNPKLGVLREGLKLFISHFLLKNAQAHRSADEANVLREKADLATKCLQGKASLRM

SEQ ID NO: 906324 - protein, 167 aa, Homo sapiens
MDCCLQEKTYNPFYAFLASKFCEYERRFQMTFQFSIWDKFRDLENLPATNFSNLVHLVAHLLKTKSLSLSILKVVEFSELDKPRVRFLRKVLSILLMETEVEDLSLIFTRVSDNPKLGVLREGLKLFISHFLLKNAQAHRSADEANVLREKADLATKCLQGKASLRM

SEQ ID NO: 906325 - protein, 827 aa, Homo sapiens
  misc_feature (804)..(804): Xaa can be any naturally occurring amino acid
SRSAGEAGPGGSQGRVVRMKRRGGRGPRRGPAGGGEKALKRLKLAVEEFVHATSEGEAPGGCEGRGAPVSFRPGGRKSRKELRKEKRHLRKARRLQRTAGPEQGPGLGGRSGAEEASGHRQDTEERARPAPSRDPSPPRKPRPSRVKAKATAATAKTRPSAAATAAARKRALLAANEEEDREIRKLERCLGLNKRKKKDGSSSVPLSFARDGLDYILGALESGKNSGLYDSSGEEEEDAGQTLPESDLESDSQDESEEEEEGDVEKEKKAQEAEAQSEDDDEDTEEEQGEEKEKGAQEKRRGKRVRFAEDEEKSENSSEDGDITDKSLCGSGEKYIPPHVRQAEETVDFKKKEELERLKKHVKGLLNRLSEPNMASISGQLEELYMAHSRKDMNDTLTSALMGACVTASAMPSRLMMEHVLLVSILHHTVGIEVGAHFLEAVVRKFDAIYKYGSEGKECDNLFTVIAHLYNFHVVQSLLIFDILKKLIGTFTEKDIELILLMLKNVGFSLRKDDALSLKELITEAQTKASGAGSEFQDQTRIRFMLETMLALKNNDMRKIPGYDPEPVEKLRKLQRALVRNAGSGSETQLRVSWDSVLSAEQTGRWWIVGSAWSGAPMIDNSHHTHLQKQLVGTVSSKILELARKQRMNTDIRRNIFCTIMTSEDFLDAFEKLLKLGLKDQQEREIIHVLMDCCLQEKTYNPFYAFLASKFCEYERRFQMTFQFSIWDKFRDLENLPATNFSNLVHLVAHLLKTKSLSLSILKVVEFSELDKPRVRFLRKVLSILLMETEVEDLSLIFTRVSEXPKLGVLREGALDHLGTSSIDAGN

SEQ ID NO: 906326 - protein, 669 aa, Homo sapiens
SRSAGEAGPGGSQGRVVRMKRRGGRGPRRGPAGGGEKALKRLKLAVEEFVHATSEGEAPGGCEGRGAPVSFRPGGRKSRKELRKEKRHLRKARRLQRTAGPEQGPGLGGRSGAEEASGHRQDTEERARPAPSRDPSPPRKPRPSRVKAKATAATAKTRPSAAATAAARKRALLAANEEEDREIRKLERCLGLNKRKKKDGSSSVPLSFARDGLDYILGALESGKNSGLYDSSGEEEEDAGQTLPESDLESDSQDESEEEEEGDVEKEKKAQEAEAQSEDDDEDTEEEQGEEKEKGAQEKRRGKRVRFAEDEEKSENSSEDGDITDKSLCGSGEKYIPPHVRQAEETVDFKKKEELERLKKHVKGLLNRLSEPNMASISGQLEELYMAHSRKDMNDTLTSALMGACVTASAMPSRLMMEHVLLVSILHHTVGIEVGAHFLEAVVRKFDAIYKYGSEGKECDNLFTVIAHLYNFHVVQSLLIFDILKKLIGTFTEKDIELILLMLKNVGFSLRKDDALSLKELITEAQTKASGAGSEFQDQTRIRFMLETMLALKNNDMRKIPGYDPEPVEKLRKLQRALVRNAGSGSETQLRVSWDSVLSAEQTGRWWIVGSAWSGAPMIDNSHHTHLQKQLVGTVGTPMLKAARQRHPPVWCVVLALPGAALLLFLNGH

SEQ ID NO: 906327 - protein, 79 aa, Homo sapiens
SGRLLLLNSRPRRRRRRSLSLENHAVLFPSFIRSGNPNLPLMSSHGKYPHLQPPGLTLYPVLVERTTRSSVSCSPIDRA

SEQ ID NO: 906328 - protein, 221 aa, Homo sapiens
MLSRLRDPPGCSSEGLKCMDPPAGKPKRCPRSCEIRNRRLLHGVGDKSPPQCSAEGEFMPVQCKFVNTTDMMIFDLVHSYNRFPDAFVTFSSFQRRFPEVSGYCHCADSQGRELAETGLELLLDEIYDTIFAGLDLPSTFTETTLYRILQRRFLAVQSVISGRFRCPTKCEVERFTATSFGHPYVPSCRLRRHHHLRHRARRWARTSVLGRTVVLAHGAAR

SEQ ID NO: 906329 - protein, 128 aa, Homo sapiens
ERNCLPQARDDTLVRTWSSGTCSLGSNPGSVTPSSETLGKWLQLYPGAPSKVEIILLLPSSWDCSEREAPHSPRPPSSAMRGLSSRQLLWQRRSVAPCHPAKKWCPASARSLPMSSMMPRPRMDHLSA

SEQ ID NO: 906330 - protein, 132 aa, Homo sapiens
MKFMTPFLLAWTFLPPSLKPPCTGYCRDGSSQFNQSSLADSDAPQNVKWSGLQQPALVTPMFQAAAEMATIRRCSARRKGPAGVWTPRGRKCMEPGSKGSRHLVVGFLWGLPLSASDHITLAVLQTNLSGPH

SEQ ID NO: 906331 - protein, 113 aa, Homo sapiens
MDISFFSFAQKSQLTPYEFSRKVPTFATPWPDFVPRAGGENYKEFSELLPNRQGLKKADCSFWSKYISSLKTSADGAKGGQSAESEEEELTAGSGLREDLLSLQEPGSKTYSK

SEQ ID NO: 906332 - protein, 162 aa, Homo sapiens
NYFLHKSPQEAYKSYIRAYDSPLALTSEQAGKQFEESRGRTSSKTAFYQALQNSLGGEDSDARVEAAATWYYSLEHSTDDYASFSRALENATRDYFIICPIIDMASAWAKRARGNVFMYHAPENYGHGKPGAAGGMFSLPWGFPFYPAYEGQFSLEEKKPVA

SEQ ID NO: 906333 - protein, 170 aa, Homo sapiens
FFSTPGGEVTCLTLNSLGIQMCSEENGGAWRILDCGSPDIEVHTYPFGWYQKPIAQNNAPSFCPLVVLPSLTEKVSLDSWQSLALSSVVVDPSIRHFDVAHVSTAATSNFSAVRDLCLSECSQHEACLITTLQTQPGAVRCMFYADTQSCTHSLQKKSRRGREFSSSRRP

SEQ ID NO: 906334 - protein, 1027 aa, Homo sapiens
SFRVCNPGLFPTLLSRLSKLGITAASAPGLPRPQLWQTIQTQGHFQLQLPPGKMCSADYADLLQTFQVFILDELTARGFCQIQVKTFGTLVSIPVCNNSSVQVGCLTRERLGVNVTWKSRLEDIPVASLPDLHDIERALVGKDLLGRFTDLIQSGSFQLHLDSKTFPAETIRFLQGDHFGTSPRTWFGCSEGFYQVLTSEASQDGLGCVKCPEGSYSQDEECIPCPVGFYQEQAGSLACVPCPVGRTTISAGAFSQTHCVTDCQRNEAGLQCDQNGQYRASQKDRGSGKAFCVDGEGRRLPWWETEAPLEDSQCLMMQKFEKVPESKVIFDANAPVAVRSKVPDSEFPVMQCLTDCTEDEACSFFTVSTTEPEISCDFYAWTSDNVACMTSDQKRDALGNSKATSFGSLRCQVKVRSHGQDSPAVYLKKGQGSTTTLQKRFEPTGFQNMLSGLYNPIVFSASGANLTDAHLFCLLACDRDLCCDGFVLTQVQGGAIICGLLSSPSVLLCNVKDWMDPSEAWANATCPGVTYDQESHQVILRLGDQEFIKSLTPLEGTQDTFTNFQQVYLWKDSDMGSRPESMGCRKDTVPRPASPTEAGLTTELFSPVDLNQVIVNGNQSLSSQKHWLFKHLFSAQQANLWCLSRCVQEHSFCQLAEITESASLYFTCTLYPEAQVCDDIMESNAQGCRLILPQMPKALFRKKVILEDKVKNFYTRLPFQKLMGISIRNKVPMSEKSISNGFFECERRCDADPCCTGFGFLNVSQLKGGEVTCLTLNSLGIQMCSEENGGAWRILDCGSPDIEVHTYPFGWYQKPIAQNNAPSFCPLVVLPSLTEKVSLDSWQSLALSSVVVDPSIRHFDVAHVSTAATSNFSAVRDLCLSECSQHEACLITTLQTQPGAVRCMFYADTQSCTHSLQGQNCRLLLREEATHIYRKPGISLLSYEASVPSVPISTHGPAAGQVPGHPGGYLMEASGPVPWSSICCPAPGREALPGTRALELDRLLGCQQAKGQLLAARHQNIHVSWSQ

SEQ ID NO: 906335 - protein, 2083 aa, Homo sapiens
MLSRLRDPPGCSSEGLKCMDPPAGKPKRCPRSCEIRNRRLLHGVGDKSPPQCSAEGEFMPVQCKFVNTTDMMIFDLVHSYNRFPDAFVTFSSFQRRFPEVSGYCHCADSQGRELAETGLELLLDEIYDTIFAGLDLPSTFTETTLYRILQRRFLAVQSVISGRFRCPTKCEVERFTATSFGHPYVPSCRRNGDYQAVQCQTEGPCWCVDAQGKEMHGTRQQGEPPSCAEGQSCASERQQALSRLYFGTSGYFSQHDLFSSPEKRWASPRVARFATSCPPTIKELFVDSGLLRPMVEGQSQQFSVSENLLKEAIRAIFPSRGLARLALQFTTNPKRLQQNLFGGKFLVNVGQFNLSGALGTRGTFNFSQFFQQLGLASFLNGGRQEDLAKPLSVGLDSNSSTGTPEAAKKDGTMNKPTVGSFGFEINLQENQNALKFLASLLELPEFLLFLQHAISVPEDVARDLGDVMETVLSSQTCEQTPERLFVPSCTTEGSYEDVQCFSGECWCVNSWGKELPGSRVRGGQPRCPTDCEKQRARMQSLMGSQPAGSTLFVPACTSEGHFLPVQCFNSECYCVDAEGQAIPGTRSAIGKPKKCPTPCQLQSEQAFLRTVQALLSNSSMLPTLSDTYIPQCSTDGQWRQVQCNGPPEQVFELYQRWEAQNKGQDLTPAKLLVKIMSYREAASGNFSLFIQSLYEAGQQDVFPVLSQYPSLQDVPLAALEGKRPQPRENILLEPYLFWQILNGQLSQYPGSYSDFSTPLAHFDLRNCWCVDEAGQELEGMRSEPSKLPTCPGSCEEAKLRVLQFIRETEEIVSASNSSRFPLGESFLVAKGIRLRNEDLGLPPLFPPREAFAEQFLRGSDYAIRLAAQSTLSFYQRRRFSPDDSAGASALLRSGPYMPQCDAFGSWEPVQCHAGTGHCWCVDEKGGFIPGSLTARSLQIPQCPTTCEKSRTSGLLSSWKQARSQENPSPKDLFVPACLETGEYARLQASGAGTWCVDPASGEELRPGSSSSAQCPSLCNVLKSGVLSRRVSPGYVPACRAEDGGFSPVQCDQAQGSCWCVMDSGEEVPGTRVTGGQPACESPRCPLPFNASEVVGGTILCETISGPTGSAMQQCQLLCRQGSWSVFPPGPLICSLESGRWESQLPQPRACQRPQLWQTIQTQGHFQLQLPPGKMCSADYADLLQTFQVFILDELTARGFCQIQVKTFGTLVSIPVCNNSSVQVGCLTRERLGVNVTWKSRLEDIPVASLPDLHDIERALVGKDLLGRFTDLIQSGSFQLHLDSKTFPAETIRFLQGDHFGTSPRTWFGCSEGFYQVLTSEASQDGLGCVKCPEGSYSQDEECIPCPVGFYQEQAGSLACVPCPVGRTTISAGAFSQTHCVTDCQRNEAGLQCDQNGQYRASQKDRGSGKAFCVDGEGRRLPWWETEAPLEDSQCLMMQKFEKVPESKVIFDANAPVAVRSKVPDSEFPVMQCLTDCTEDEACSFFTVSTTEPEISCDFYAWTSDNVACMTSDQKRDALGNSKATSFGSLRCQVKVRSHGQDSPAVYLKKGAIICGLLSSPSVLLCNVKDWMDPSEAWANATCPGVTYDQESHQVILRLGDQEFIKSLTPLEGTQDTFTNFQQVYLWKDSDMGSRPESMGCRKDTVPRPASPTEAGLTTELFSPVDLNQVIVNGNQSLSSQKHWLFKHLFSAQQANLWCLSRCVQEHSFCQLAEITESASLYFTCTLYPEAQVCDDIMESNAQGCRLILPQMPKALFRKKVILEDKVKNFYTRLPFQKLMGISIRNKVPMSEKSISNGFFECERRCDADPCCTGFGFLNVSQLKGGEVTCLTLNSLGIQMCSEENGGAWRILDCGSPDIEVHTYPFGWYQKPIAQNNAPSFCPLVVLPSLTEKVSLDSWQSLALSSVVVDPSIRHFDVAHVSTAATSNFSAVRDLCLSECSQHEACLITTLQTQPGAVRCMFYADTQSCTHSLQGQNCRLLLREEATHIYRKPGISLLSYEASVPSVPISTHGPAAGQVPGHPGGYLMEASGPVPWSSICCPAPGREALPGTRALELDRLLGCQQAKGQLLAARHQNIHVSWSQ

SEQ ID NO: 906336 - protein, 2101 aa, Homo sapiens
MLSRLRDPPGCSSEGLKCMDPPAGKPKRCPRSCEIRNRRLLHGVGDKSPPQCSAEGEFMPVQCKFVNTTDMMIFDLVHSYNRFPDAFVTFSSFQRRFPEVSGYCHCADSQGRELAETGLELLLDEIYDTIFAGLDLPSTFTETTLYRILQRRFLAVQSVISGRFRCPTKCEVERFTATSFGHPYVPSCRRNGDYQAVQCQTEGPCWCVDAQGKEMHGTRQQGEPPSCAEGQSCASERQQALSRLYFGTSGYFSQHDLFSSPEKRWASPRVARFATSCPPTIKELFVDSGLLRPMVEGQSQQFSVSENLLKEAIRAIFPSRGLARLALQFTTNPKRLQQNLFGGKFLVNVGQFNLSGALGTRGTFNFSQFFQQLGLASFLNGGRQEDLAKPLSVGLDSNSSTGTPEAAKKDGTMNKPTVGSFGFEINLQENQNALKFLASLLELPEFLLFLQHAISVPEDVARDLGDVMETVLSSQTCEQTPERLFVPSCTTEGSYEDVQCFSGECWCVNSWGKELPGSRVRGGQPRCPTDCEKQRARMQSLMGSQPAGSTLFVPACTSEGHFLPVQCFNSECYCVDAEGQAIPGTRSAIGKPKKCPTPCQLQSEQAFLRTVQALLSNSSMLPTLSDTYIPQCSTDGQWRQVQCNGPPEQVFELYQRWEAQNKGQDLTPAKLLVKIMSYREAASGNFSLFIQSLYEAGQQDVFPVLSQYPSLQDVPLAALEGKRPQPRENILLEPYLFWQILNGQLSQYPGSYSDFSTPLAHFDLRNCWCVDEAGQELEGMRSEPSKLPTCPGSCEEAKLRVLQFIRETEEIVSASNSSRFPLGESFLVAKGIRLRNEDLGLPPLFPPREAFAEQFLRGSDYAIRLAAQSTLSFYQRRRFSPDDSAGASALLRSGPYMPQCDAFGSWEPVQCHAGTGHCWCVDEKGGFIPGSLTARSLQIPQCPTTCEKSRTSGLLSSWKQARSQENPSPKDLFVPACLETGEYARLQASGAGTWCVDPASGEELRPGSSSSAQCPSLCNVLKSGVLSRRVSPGYVPACRAEDGGFSPVQCDQAQGSCWCVMDSGEEVPGTRVTGGQPACESPRCPLPFNASEVVGGTILCETISGPTGSAMQQCQLLCRQGSWSVFPPGPLICSLESGRWESQLPQPRACQRPQLWQTIQTQGHFQLQLPPGKMCSADYADLLQTFQVFILDELTARGFCQIQVKTFGTLVSIPVCNNSSVQVGCLTRERLGVNVTWKSRLEDIPVASLPDLHDIERALVGKDLLGRFTDLIQSGSFQLHLDSKTFPAETIRFLQGDHFGTSPRTWFGCSEGFYQVLTSEASQDGLGCVKCPEGSYSQDEECIPCPVGFYQEQAGSLACVPCPVGRTTISAGAFSQTHCVTDCQRNEAGLQCDQNGQYRASQKDRGSGKAFCVDGEGRRLPWWETEAPLEDSQCLMMQKFEKVPESKVIFDANAPVAVRSKVPDSEFPVMQCLTDCTEDEACSFFTVSTTEPEISCDFYAWTSDNVACMTSDQKRDALGNSKATSFGSLRCQVKVRSHGQDSPAVYLKKGQGSTTTLQKRFEPTGFQNMLSGLYNPIVFSASGANLTDAHLFCLLACDRDLCCDGFVLTQVQGGAIICGLLSSPSVLLCNVKDWMDPSEAWANATCPGVTYDQESHQVILRLGDQEFIKSLTPLEGTQDTFTNFQQVYLWKDSDMGSRPESMGCRKDTVPRPASPTEAGCVQEHSFCQLAEITESASLYFTCTLYPEAQVCDDIMESNAQGCRLILPQMPKALFRKKVILEDKVKNFYTRLPFQKLMGISIRNKVPMSEKSISNGFFECERRCDADPCCTGFGFLNVSQLKGGEVTCLTLNSLGIQMCSEENGGAWRILDCGSPDIEVHTYPFGWYQKPIAQNNAPSFCPLVVLPSLTEKVSLDSWQSLALSSVVVDPSIRHFDVAHVSTAATSNFSAVRDLCLSECSQHEACLITTLQTQPGAVRCMFYADTQSCTHSLQGQNCRLLLREEATHIYRKPGISLLSYEASVPSVPISTHGPAAGQVPGHPGGYLMEASGPVPWSSICCPAPGREALPGTRALELDRLLGCQQAKGQLLAARHQNIHVSWSQ

SEQ ID NO: 906337 - protein, 2147 aa, Homo sapiens
MLSRLRDPPGCSSEGLKCMDPPAGKPKRCPRSCEIRNRRLLHGVGDKSPPQCSAEGEFMPVQCKFVNTTDMMIFDLVHSYNRFPDAFVTFSSFQRRFPEVSGYCHCADSQGRELAETGLELLLDEIYDTIFAGLDLPSTFTETTLYRILQRRFLAVQSVISGRFRCPTKCEVERFTATSFGHPYVPSCRRNGDYQAVQCQTEGPCWCVDAQGKEMHGTRQQGEPPSCAEGQSCASERQQALSRLYFGTSGYFSQHDLFSSPEKRWASPRVARFATSCPPTIKELFVDSGLLRPMVEGQSQQFSVSENLLKEAIRAIFPSRGLARLALQFTTNPKRLQQNLFGGKFLVNVGQFNLSGALGTRGTFNFSQFFQQLGLASFLNGGRQEDLAKPLSVGLDSNSSTGTPEAAKKDGTMNKPTVGSFGFEINLQENQNALKFLASLLELPEFLLFLQHAISVPEDVARDLGDVMETVLSSQTCEQTPERLFVPSCTTEGSYEDVQCFSGECWCVNSWGKELPGSRVRGGQPRCPTDCEKQRARMQSLMGSQPAGSTLFVPACTSEGHFLPVQCFNSECYCVDAEGQAIPGTRSAIGKPKKCPTPCQLQSEQAFLRTVQALLSNSSMLPTLSDTYIPQCSTDGQWRQVQCNGPPEQVFELYQRWEAQNKGQDLTPAKLLVKIMSYREAASGNFSLFIQSLYEAGQQDVFPVLSQYPSLQDVPLAALEGKRPQPRENILLEPYLFWQILNGQLSQYPGSYSDFSTPLAHFDLRNCWCVDEAGQELEGMRSEPSKLPTCPGSCEEAKLRVLQFIRETEEIVSASNSSRFPLGESFLVAKGIRLRNEDLGLPPLFPPREAFAEQFLRGSDYAIRLAAQSTLSFYQRRRFSPDDSAGASALLRSGPYMPQCDAFGSWEPVQCHAGTGHCWCVDEKGGFIPGSLTARSLQIPQCPTTCEKSRTSGLLSSWKQARSQENPSPKDLFVPACLETGEYARLQASGAGTWCVDPASGEELRPGSSSSAQCPSLCNVLKSGVLSRRVSPGYVPACRAEDGGFSPVQCDQAQGSCWCVMDSGEEVPGTRVTGGQPACESPRCPLPFNASEVVGGTILCETISGPTGSAMQQCQLLCRQGSWSVFPPGPLICSLESGRWESQLPQPRACQRPQLWQTIQTQGHFQLQLPPGKMCSADYADLLQTFQVFILDELTARGFCQIQVKTFGTLVSIPVCNNSSVQVGCLTRERLGVNVTWKSRLEDIPVASLPDLHDIERALVGKDLLGRFTDLIQSGSFQLHLDSKTFPAETIRFLQGDHFGTSPRTWFGCSEGFYQVLTSEASQDGLGCVKCPEGSYSQDEECIPCPVGFYQEQAGSLACVPCPVGRTTISAGAFSQTHCVTDCQRNEAGLQCDQNGQYRASQKDRGSGKAFCVDGEGRRLPWWETEAPLEDSQCLMMQKFEKVPESKVIFDANAPVAVRSKVPDSEFPVMQCLTDCTEDEACSFFTVSTTEPEISCDFYAWTSDNVACMTSDQKRDALGNSKATSFGSLRCQVKVRSHGQDSPAVYLKKGQGSTTTLQKRFEPTGFQNMLSGLYNPIVFSASGANLTDAHLFCLLACDRDLCCDGFVLTQVQGGAIICGLLSSPSVLLCNVKDWMDPSEAWANATCPGVTYDQESHQVILRLGDQEFIKSLTPLEGTQDTFTNFQQVYLWKDSDMGSRPESMGCRKDTVPRPASPTEAGLTTELFSPVDLNQVIVNGNQSLSSQKHWLFKHLFSAQQANLWCLSRCVQEHSFCQLAEITESASLYFTCTLYPEAQVCDDIMESNAQGCRLILPQMPKALFRKKVILEDKVKNFYTRLPFQKLMGISIRNKVPMSEKSISNGFFECERRCDADPCCTGFGFLNVSQLKGGEVTCLTLNSLGIQMCSEENGGAWRILDCGSPDIEVHTYPFGWYQKPIAQNNAPSFCPLVVLPSLTEKVSLDSWQSLALSSVVVDPSIRHFDVAHVSTAATSNFSAVRDLCLSECSQHEACLITTLQTQPGAVRCMFYADTQSCTHSLQGQNCRLLLREEATHIYRKPGISLLSYEASVPSVPISTHGPAAGQVPGHPGGYLMEASGPVPWSSICCPAPGREALPGTRALELDRLLGCQQAKGQLLAARHQNIHVSWSQ

SEQ ID NO: 906338 - protein, 2126 aa, Homo sapiens
MLSRLRDPPGCSSEGLKCMDPPAGKPKRCPRSCEIRNRRLLHGVGDKSPPQCSAEGEFMPVQCKFVNTTDMMIFDLVHSYNRFPDAFVTFSSFQRRFPEVSGYCHCADSQGRELAETGLELLLDEIYDTIFAGLDLPSTFTETTLYRILQRRFLAVQSVISGRFRCPTKCEVERFTATSFGHPYVPSCRRNGDYQAVQCQTEGPCWCVDAQGKEMHGTRQQGEPPSCAEGQSCASERQQALSRLYFGTSGYFSQHDLFSSPEKRWASPRVARFATSCPPTIKELFVDSGLLRPMVEGQSQQFSVSENLLKEAIRAIFPSRGLARLALQFTTNPKRLQQNLFGGKFLVNVGQFNLSGALGTRGTFNFSQFFQQLGLASFLNGGRQEDLAKPLSVGLDSNSSTGTPEAAKKDGTMNKPTVGSFGFEINLQENQNALKFLASLLELPEFLLFLQHAISVPEDVARDLGDVMETVLSSQTCEQTPERLFVPSCTTEGSYEDVQCFSGECWCVNSWGKELPGSRVRGGQPRCPTDCEKQRARMQSLMGSQPAGSTLFVPACTSEGHFLPVQCFNSECYCVDAEGQAIPGTRSAIGKPKKCPTPCQLQSEQAFLRTVQALLSNSSMLPTLSDTYIPQCSTDGQWRQVQCNGPPEQVFELYQRWEAQNKGQDLTPAKLLVKIMSYREAASGNFSLFIQSLYEAGQQDVFPVLSQYPSLQDVPLAALEGKRPQPRENILLEPYLFWQILNGQLSQYPGSYSDFSTPLAHFDLRNCWCVDEAGQELEGMRSEPSKLPTCPGSCEEAKLRVLQFIRETEEIVSASNSSRFPLGESFLVAKGIRLRNEDLGLPPLFPPREAFAEQFLRGSDYAIRLAAQSTLSFYQRRRFSPDDSAGASALLRSGPYMPQCDAFGSWEPVQCHAGTGHCWCVDEKGGFIPGSLTARSLQIPQCPTTCEKSRTSGLLSSWKQARSQENPSPKDLFVPACLETGEYARLQASGAGTWCVDPASGEELRPGSSSSAQCPSLCNVLKSGVLSRRVSPGYVPACRAEDGGFSPVQCDQAQGSCWCVMDSGEEVPGTRVTGGQPACESPRCPLPFNASEVVGGTILCETISGPTGSAMQQCQLLCRQGSWSVFPPGPLICSLESGRWESQLPQPRACQRPQLWQTIQTQGHFQLQLPPGKMCSADYADLLQTFQVFILDELTARGFCQIQVKTFGTLVSIPVCNNSSVQVGCLTRERLGVNVTWKSRLEDIPVASLPDLHDIERALVGKDLLGRFTDLIQSGSFQLHLDSKTFPAETIRFLQGDHFGTSPRTWFGCSEGFYQVLTSEASQDGLGCVKCPEGSYSQDEECIPCPVGFYQEQAGSLACVPCPVGRTTISAGAFSQTHCVTDCQRNEAGLQCDQNGQYRASQKDRGSGKAFCVDGEGRRLPWWETEAPLEDSQCLMMQKFEKVPESKVIFDANAPVAVRSKVPDSEFPVMQCLTDCTEDEACSFFTVSTTEPEISCDFYAWTSDNVACMTSDQKRDALGNSKATSFGSLRCQVKVRSHGQDSPAVYLKKGQGSTTTLQKRFEPTGFQNMLSGLYNPIVFSASGANLTDAHLFCLLACDRDLCCDGFVLTQVQGGAIICGLLSSPSVLLCNVKDWMDPSEAWANATCPGVTYDQESHQVILRLGDQEFIKSLTPLEGTQDTFTNFQQVYLWKDSDMGSRPESMGCRKDTVPRPASPTEAGLTTELFSPVDLNQVIVNGNQSLSSQKHWLFKHLFSAQQANLWCLSRCVQEHSFCQLAEITESASLYFTCTLYPEAQVCDDIMESNAQGCRLILPQMPKALFRKKVILEDKVKNFYTRLPFQKLMGISIRNKVPMSEKSISNGFFECERRCDADPCCTGFGFLNVSQLKGGEVTCLTLNSLGIQMCSEENGGAWRILDCGSPDIEVHTYPFGWYQKPMSLDSWQSLALSSVVVDPSIRHFDVAHVSTAATSNFSAVRDLCLSECSQHEACLITTLQTQPGAVRCMFYADTQSCTHSLQGQNCRLLLREEATHIYRKPGISLLSYEASVPSVPISTHGPAAGQVPGHPGGYLMEASGPVPWSSICCPAPGREALPGTRALELDRLLGCQQAKGQLLAARHQNIHVSWSQ

SEQ ID NO: 906339 - protein, 2147 aa, Homo sapiens; identical to SEQ ID NO: 906337

SEQ ID NO: 906340 - protein, 2166 aa, Homo sapiens
MLSRLRDPPGCSSEGLKCMDPPAGKPKRCPRSCEIRNRRLLHGVGDKSPPQCSAEGEFMPVQCKFVNTTDMMIFDLVHSYNRFPDAFVTFSSFQRRFPEVSGYCHCADSQGRELAETGLELLLDEIYDTIFAGLDLPSTFTETTLYRILQRRFLAVQSVISGRFRCPTKCEVERFTATSFGHPYVPSCRRNGDYQAVQCQTEGPCWCVDAQGKEMHGTRQQGEPPSCAEGQSCASERQQALSRLYFGTSGYFSQHDLFSSPEKRWASPRVARFATSCPPTIKELFVDSGLLRPMVEGQSQQFSVSENLLKEAIRAIFPSRGLARLALQFTTNPKRLQQNLFGGKFLVNVGQFNLSGALGTRGTFNFSQFFQQLGLASFLNGGRQEDLAKPLSVGLDSNSSTGTPEAAKKDGTMNKPTVGSFGFEINLQENQNALKFLASLLELPEFLLFLQHAISVPEDVARDLGDVMETVLSSQTCEQTPERLFVPSCTTEGSYEDVQCFSGECWCVNSWGKELPGSRVRGGQPRCPTDCEKQRARMQSLMGSQPAGSTLFVPACTSEGHFLPVQCFNSECYCVDAEGQAIPGTRSAIGKPKKCPTPCQLQSEQAFLRTVQALLSNSSMLPTLSDTYIPQCSTDGQWRQVQCNGPPEQVFELYQRWEAQNKGQDLTPAKLLVKIMSYREAASGNFSLFIQSLYEAGQQDVFPVLSQYPSLQDVPLAALEGKRPQPRENILLEPYLFWQILNGQLSQYPGSYSDFSTPLAHFDLRNCWCVDEAGQELEGMRSEPSKLPTCPGSCEEAKLRVLQFIRETEEIVSASNSSRFPLGESFLVAKGIRLRNEDLGLPPLFPPREAFAEQFLRGSDYAIRLAAQSTLSFYQRRRFSPDDSAGASALLRSGPYMPQCDAFGSWEPVQCHAGTGHCWCVDEKGGFIPGSLTARSLQIPQCPTTCEKSRTSGLLSSWKQARSQENPSPKDLFVPACLETGEYARLQASGAGTWCVDPASGEELRPGSSSSAQCPSLCNVLKSGVLSRRVSPGYVPACRAEDGGFSPVQCDQAQGSCWCVMDSGEEVPGTRVTGGQPACESPRCPLPFNASEVVGGTILCETISGPTGSAMQQCQLLCRQGSWSVFPPGPLICSLESGRWESQLPQPRACQRPQLWQTIQTQGHFQLQLPPGKMCSADYADLLQTFQVFILDELTARGFCQIQVKTFGTLVSIPVCNNSSVQVGCLTRERLGVNVTWKSRLEDIPVASLPDLHDIERALVGKDLLGRFTDLIQSGSFQLHLDSKTFPAETIRFLQGDHFGTSPRTWFGCSEGFYQVLTSEASQDGLGCVKCPEGSYSQDEECIPCPVGFYQEQAGSLACVPCPVGRTTISAGAFSQTHCVTDCQRNEAGLQCDQNGQYRASQKDRGSGKAFCVDGEGRRLPWWETEAPLEDSQCLMMQKFEKVPESKVIFDANAPVAVRSKVPDSEFPVMQCLTDCTEDEACSFFTVSTTEPEISCDFYAWTSDNVACMTSDQKRDALGNSKATSFGSLRCQVKVRSHGQDSPAVYLKKGQGSTTTLQKRFEPTGFQNMLSGLYNPIVFSASGANLTDAHLFCLLACDRDLCCDGFVLTQVQGGAIICGLLSSPSVLLCNVKDWMDPSEAWANATCPGVTYDQESHQVILRLGDQEFIKSLTPLEGTQDTFTNFQQVYLWKDSDMGSRPESMGCRKDTVPRPASPTEAGLTTELFSPVDLNQVIVNGNQSLSSQKHWLFKHLFSAQQANLWCLSRCVQEHSFCQLAEITESASLYFTCTLYPEAQVCDDIMESNAQGCRLILPQMPKALFRKKVILEDKVKNFYTRLPFQKLMGISIRNKVPMSEKSISNGFFECERRCDADPCCTGFGFLNVSQLKGGEVTCLTLNSLGIQMCSEENGGAWRILDCGSPDIEVHTYPFGWYQKPIAQNNAPSFCPLVVLPSLTEKVSLDSWQSLALSSVVVDPSIRHFDVAHVSTAATSNFSAVRDLCLSEWFPTLKACLHQPLCKPMSECSQHEACLITTLQTQPGAVRCMFYADTQSCTHSLQGQNCRLLLREEATHIYRKPGISLLSYEASVPSVPISTHGPAAGQVPGHPGGYLMEASGPVPWSSICCPAPGREALPGTRALELDRLLGCQQAKGQLLAARHQNIHVSWSQ

SEQ ID NO: 906341 - protein, 2147 aa, Homo sapiens; identical to SEQ ID NO: 906337

SEQ ID NO: 906342 - protein, 2147 aa, Homo sapiens; identical to SEQ ID NO: 906337

SEQ ID NO: 906343 - protein, 2147 aa, Homo sapiens; identical to SEQ ID NO: 906337

SEQ ID NO: 906344 - protein, 2147 aa, Homo sapiens; identical to SEQ ID NO: 906337

SEQ ID NO: 906345 - protein, 2147 aa, Homo sapiens; identical to SEQ ID NO: 906337

SEQ ID NO: 906346 - protein, 2147 aa, Homo sapiens; identical to SEQ ID NO: 906337

SEQ ID NO: 906347 - protein, 2147 aa, Homo sapiens; identical to SEQ ID NO: 906337

SEQ ID NO: 906348 - protein, 2147 aa, Homo sapiens; identical to SEQ ID NO: 906337

SEQ ID NO: 906349 - protein, 2147 aa, Homo sapiens; identical to SEQ ID NO: 906337

SEQ ID NO: 906350 - protein, 150 aa, Homo sapiens
FLLADSRVSPQRAITEQAGKQFEESRGRTSSKTAFYQALQNSLGGEDSDARVEAAATWYYSLEHSTDDYASFSRALENATRDYFIICPIIDMASAWAKRARGNVFMYHAPENYGHGKPGAAGGMFSLPWGFPFYPAYEGQFSLEEKKPVA

SEQ ID NO: 906351 - protein, 2131 aa, Homo sapiens
  misc_feature (2121)..(2122): Xaa can be any naturally occurring amino acid
MLSRLRDPPGCSSEGLKCMDPPAGKPKRCPRSCEIRNRRLLHGVGDKSPPQCSAEGEFMPVQCKFVNTTDMMIFDLVHSYNRFPDAFVTFSSFQRRFPEVSGYCHCADSQGRELAETGLELLLDEIYDTIFAGLDLPSTFTETTLYRILQRRFLAVQSVISGRFRCPTKCEVERFTATSFGHPYVPSCRRNGDYQAVQCQTEGPCWCVDAQGKEMHGTRQQGEPPSCAEGQSCASERQQALSRLYFGTSGYFSQHDLFSSPEKRWASPRVARFATSCPPTIKELFVDSGLLRPMVEGQSQQFSVSENLLKEAIRAIFPSRGLARLALQFTTNPKRLQQNLFGGKFLVNVGQFNLSGALGTRGTFNFSQFFQQLGLASFLNGGRQEDLAKPLSVGLDSNSSTGTPEAAKKDGTMNKPTVGSFGFEINLQENQNALKFLASLLELPEFLLFLQHAISVPEDVARDLGDVMETVLSSQTCEQTPERLFVPSCTTEGSYEDVQCFSGECWCVNSWGKELPGSRVRGGQPRCPTDCEKQRARMQSLMGSQPAGSTLFVPACTSEGHFLPVQCFNSECYCVDAEGQAIPGTRSAIGKPKKCPTPCQLQSEQAFLRTVQALLSNSSMLPTLSDTYIPQCSTDGQWRQVQCNGPPEQVFELYQRWEAQNKGQDLTPAKLLVKIMSYREAASGNFSLFIQSLYEAGQQDVFPVLSQYPSLQDVPLAALEGKRPQPRENILLEPYLFWQILNGQLSQYPGSYSDFSTPLAHFDLRNCWCVDEAGQELEGMRSEPSKLPTCPGSCEEAKLRVLQFIRETEEIVSASNSSRFPLGESFLVAKGIRLRNEDLGLPPLFPPREAFAEQFLRGSDYAIRLAAQSTLSFYQRRRFSPDDSAGASALLRSGPYMPQCDAFGSWEPVQCHAGTGHCWCVDEKGGFIPGSLTARSLQIPQCPTTCEKSRTSGLLSSWKQARSQENPSPKDLFVPACLETGEYARLQASGAGTWCVDPASGEELRPGSSSSAQCPSLCNVLKSGVLSRRVSPGYVPACRAEDGGFSPVQCDQAQGSCWCVMDSGEEVPGTRVTGGQPACESPRCPLPFNASEVVGGTILCETISGPTGSAMQQCQLLCRQGSWSVFPPGPLICSLESGRWESQLPQPRACQRPQLWQTIQTQGHFQLQLPPGKMCSADYADLLQTFQVFILDELTARGFCQIQVKTFGTLVSIPVCNNSSVQVGCLTRERLGVNVTWKSRLEDIPVASLPDLHDIERALVGKDLLGRFTDLIQSGSFQLHLDSKTFPAETIRFLQGDHFGTSPRTWFGCSEGFYQVLTSEASQDGLGCVKCPEGSYSQDEECIPCPVGFYQEQAGSLACVPCPVGRTTISAGAFSQTHCVTDCQRNEAGLQCDQNGQYRASQKDRGSGKAFCVDGEGRRLPWWETEAPLEDSQCLMMQKFEKVPESKVIFDANAPVAVRSKVPDSEFPVMQCLTDCTEDEACSFFTVSTTEPEISCDFYAWTSDNVACMTSDQKRDALGNSKATSFGSLRCQVKVRSHGQDSPAVYLKKGQGSTTTLQKRFEPTGFQNMLSGLYNPIVFSASGANLTDAHLFCLLACDRDLCCDGFVLTQVQGGAIICGLLSSPSVLLCNVKDWMDPSEAWANATCPGVTYDQESHQVILRLGDQEFIKSLTPLEGTQDTFTNFQQVYLWKDSDMGSRPESMGCRKDTVPRPASPTEAGLTTELFSPVDLNQVIVNGNQSLSSQKHWLFKHLFSAQQANLWCLSRCVQEHSFCQLAEITESASLYFTCTLYPEAQVCDDIMESNAQGCRLILPQMPKALFRKKVILEDKVKNFYTRLPFQKLMGISIRNKVPMSEKSISNGFFECERRCDADPCCTGFGFLNVSQLKGGEVTCLTLNSLGIQMCSEENGGAWRILDCGSPDIEVHTYPFGWYQKPIAQNNAPSFCPLVVLPSLTEKVSLDSWQSLALSSVVVDPSIRHFDVAHVSTAATSNFSAVRDLCLSECSQHEACLITTLQTQPGAVRCMFYADTQSCTHSLQGQNCRLLLREEATHIYRKPGISLLSYEASVPSVPISTHGPAAGQVPGHPGGYLMEASGPVPWSSICCPALQKAFSPNPDWQLWXXSKACEQPNI

SEQ ID NO: 906352 - protein, 123 aa, Homo sapiens
ERSRGSHPRVGQRGPEETSSCTMLLKTTAMASLELLAECSVCLGASLSTQPTRGSFLWRRRSLSLENHAVLFPSFIRSGNPNLPLMSSHGKYPHLQPPGLTLYPVLVERTTRSSVSCSPIDRA

SEQ ID NO: 906353 - protein, 2018 aa, Homo sapiens
MLSRLRDPPGCSSEGLKCMDPPAGKPKRCPRSCEIRNRRLLHGVGDKSPPQCSAEGEFMPVQCKFVNTTDMMIFDLVHSYNRFPDAFVTFSSFQRRFPEVSGYCHCADSQGRELAETGLELLLDEIYDTIFAGLDLPSTFTETTLYRILQRRFLAVQSVISGRFRCPTKCEVERFTATSFGHPYVPSCRRNGDYQAVQCQTEGPCWCVDAQGKEMHGTRQQGEPPSCAEGQSCASERQQALSRLYFGTSGYFSQHDLFSSPEKRWASPRVARFATSCPPTIKELFVDSGLLRPMVEGQSQQFSVSENLLKEAIRAIFPSRGLARLALQFTTNPKRLQQNLFGGKFLVNVGQFNLSGALGTRGTFNFSQFFQQLGLASFLNGGRQEDLAKPLSVGLDSNSSTGTPEAAKKDGTMNKPTVGSFGFEINLQENQNALKFLASLLELPEFLLFLQHAISVPEDVARDLGDVMETVLSSQTCEQTPERLFVPSCTTEGSYEDVQCFSGECWCVNSWGKELPGSRVRGGQPRCPTDCEKQRARMQSLMGSQPAGSTLFVPACTSEGHFLPVQCFNSECYCVDAEGQAIPGTRSAIGKPKKCPTPCQLQSEQAFLRTVQALLSNSSMLPTLSDTYIPQCSTDGQWRQVQCNGPPEQVFELYQRWEAQNKGQDLTPAKLLVKIMSYREAASGNFSLFIQSLYEAGQQDVFPVLSQYPSLQDVPLAALEGKRPQPRENILLEPYLFWQILNGQLSQYPGSYSDFSTPLAHFDLRNCWCVDEAGQELEGMRSEPSKLPTCPGSCEEAKLRVLQFIRETEEIVSASNSSRFPLGESFLVAKGIRLRNEDLGLPPLFPPREAFAEQFLRGSDYAIRLAAQSTLSFYQRRRFSPDDSAGASALLRSGPYMPQCDAFGSWEPVQCHAGTGHCWCVDEKGGFIPGSLTARSLQIPQCPTTCEKSRTSGLLSSWKQARSQENPSPKDLFVPACLETGEYARLQASGAGTWCVDPASGEELRPGSSSSAQCPSLCNVLKSGVLSRRVSPGYVPACRAEDGGFSPVQCDQAQGSCWCVMDSGEEVPGTRVTGGQPACESPRCPLPFNASEVVGGTILCETISGPTGSAMQQCQLLCRQGSWSVFPPGPLICSLESGRWESQLPQPRACQRPQLWQTIQTQGHFQLQLPPGKMCSADYADLLQTFQVFILDELTARGFCQIQVKTFGTLVSIPVCNNSSVQVGCLTRERLGVNVTWKSRLEDIPVASLPDLHDIERALVGKDLLGRFTDLIQSGSFQLHLDSKTFPAETIRFLQGDHFGTSPRTWFGCSEGFYQVLTSEASQDGLGCVKCPEGSYSQDEECIPCPVGFYQEQAGSLACVPCPVGRTTISAGAFSQTHCVTDCQRNEAGLQCDQNGQYRASQKDRGSGKAFCVDGEGRRLPWWETEAPLEDSQCLMMQKFEKVPESKVIFDANAPVAVRSKVPDSEFPVMQCLTDCTEDEACSFFTVSTTEPEISCDFYAWTSDNVACMTSDQKRDALGNSKATSFGSLRCQVKVRSHGQDSPAVYLKKGQGSTTTLQKRFEPTGFQNMLSGLYNPIVFSASGANLTDAHLFCLLACDRDLCCDGFVLTQVQGGAIICGLLSSPSVLLCNVKDWMDPSEAWANATCPGVTYDQESHQVILRLGDQEFIKSLTPLEGTQDTFTNFQQVYLWKDSDMGSRPESMGCRKDTVPRPASPTEAGLTTELFSPVDLNQVIVNGNQSLSSQKHWLFKHLFSAQQANLWCLSRCVQEHSFCQLAEITESASLYFTCTLYPEAQVCDDIMESNAQGCRLILPQMPKALFRKKVILEDKVKNFYTRLPFQKLMGISIRNKVPMSEKSISNGFFECERRCDADPCCTGFGFLNVSQLKGGEVTCLTLNSLGIQMCSEENGGAWRILDCGSPDIEVHTYPFGWYQKPIAQNNAPSFCPLVVLPSLTEKVSLDSWQSLALSSVVVDPSIRHFDVAHVSTAATSNFSAVRDLCLSECSQHPACFLQSGCELD

SEQ ID NO: 906354 - protein, 1972 aa, Homo sapiens
MLSRLRDPPGCSSEGLKCMDPPAGKPKRCPRSCEIRNRRLLHGVGDKSPPQCSAEGEFMPVQCKFVNTTDMMIFDLVHSYNRFPDAFVTFSSFQRRFPEVSGYCHCADSQGRELAETGLELLLDEIYDTIFAGLDLPSTFTETTLYRILQRRFLAVQSVISGRFRCPTKCEVERFTATSFGHPYVPSCRRNGDYQAVQCQTEGPCWCVDAQGKEMHGTRQQGEPPSCAEGQSCASERQQALSRLYFGTSGYFSQHDLFSSPEKRWASPRVARFATSCPPTIKELFVDSGLLRPMVEGQSQQFSVSENLLKEAIRAIFPSRGLARLALQFTTNPKRLQQNLFGGKFLVNVGQFNLSGALGTRGTFNFSQFFQQLGLASFLNGGRQEDLAKPLSVGLDSNSSTGTPEAAKKDGTMNKPTVGSFGFEINLQENQNALKFLASLLELPEFLLFLQHAISVPEDVARDLGDVMETVLSSQTCEQTPERLFVPSCTTEGSYEDVQCFSGECWCVNSWGKELPGSRVRGGQPRCPTDCEKQRARMQSLMGSQPAGSTLFVPACTSEGHFLPVQCFNSECYCVDAEGQAIPGTRSAIGKPKKCPTPCQLQSEQAFLRTVQALLSNSSMLPTLSDTYIPQCSTDGQWRQVQCNGPPEQVFELYQRWEAQNKGQDLTPAKLLVKIMSYREAASGNFSLFIQSLYEAGQQDVFPVLSQYPSLQDVPLAALEGKRPQPRENILLEPYLFWQILNGQLSQYPGSYSDFSTPLAHFDLRNCWCVDEAGQELEGMRSEPSKLPTCPGSCEEAKLRVLQFIRETEEIVSASNSSRFPLGESFLVAKGIRLRNEDLGLPPLFPPREAFAEQFLRGSDYAIRLAAQSTLSFYQRRRFSPDDSAGASALLRSGPYMPQCDAFGSWEPVQCHAGTGHCWCVDEKGGFIPGSLTARSLQIPQCPTTCEKSRTSGLLSSWKQARSQENPSPKDLFVPACLETGEYARLQASGAGTWCVDPASGEELRPGSSSSAQCPSLCNVLKSGVLSRRVSPGYVPACRAEDGGFSPVQCDQAQGSCWCVMDSGEEVPGTRVTGGQPACESPRCPLPFNASEVVGGTILCETISGPTGSAMQQCQLLCRQGSWSVFPPGPLICSLESGRWESQLPQPRACQRPQLWQTIQTQGHFQLQLPPGKMCSADYADLLQTFQVFILDELTARGFCQIQVKTFGTLVSIPVCNNSSVQVGCLTRERLGVNVTWKSRLEDIPVASLPDLHDIERALVGKDLLGRFTDLIQSGSFQLHLDSKTFPAETIRFLQGDHFGTSPRTWFGCSEGFYQVLTSEASQDGLGCVKCPEGSYSQDEECIPCPVGFYQEQAGSLACVPCPVGRTTISAGAFSQTHCVTDCQRNEAGLQCDQNGQYRASQKDRGSGKAFCVDGEGRRLPWWETEAPLEDSQCLMMQKFEKVPESKVIFDANAPVAVRSKVPDSEFPVMQCLTDCTEDEACSFFTVSTTEPEISCDFYAWTSDNVACMTSDQKRDALGNSKATSFGSLRCQVKVRSHGQDSPAVYLKKGQGSTTTLQKRFEPTGFQNMLSGLYNPIVFSASGANLTDAHLFCLLACDRDLCCDGFVLTQVQGGAIICGLLSSPSVLLCNVKDWMDPSEAWANATCPGVTYDQESHQVILRLGDQEFIKSLTPLEGTQDTFTNFQQVYLWKDSDMGSRPESMGCRKDTVPRPASPTEAGLTTELFSPVDLNQVIVNGNQSLSSQKHWLFKHLFSAQQANLWCLSRCVQEHSFCQLAEITESASLYFTCTLYPEAQVCDDIMESNAQGCRLILPQMPKALFRKKVILEDKVKNFYTRLPFQKLMGISIRNKVPMSEKSISNGFFECERRCDADPCCTGFGFLNVSQLKGGEVTCLTLNSLGIQMCSEENGGAWRILDCGSPDIEVHTYPFGWYQKPIAQNNAPSFCPLVVLPSLTEKVFKVREVRGTQLKRME

SEQ ID NO: 906355 - protein, 2047 aa, Homo sapiens
MLSRLRDPPGCSSEGLKCMDPPAGKPKRCPRSCEIRNRRLLHGVGDKSPPQCSAEGEFMPVQCKFVNTTDMMIFDLVHSYNRFPDAFVTFSSFQRRFPEVSGYCHCADSQGRELAETGLELLLDEIYDTIFAGLDLPSTFTETTLYRILQRRFLAVQSVISGRFRCPTKCEVERFTATSFGHPYVPSCRRNGDYQAVQCQTEGPCWCVDAQGKEMHGTRQQGEPPSCAEGQSCASERQQALSRLYFGTSGYFSQHDLFSSPEKRWASPRVARFATSCPPTIKELFVDSGLLRPMVEGQSQQFSVSENLLKEAIRAIFPSRGLARLALQFTTNPKRLQQNLFGGKFLVNVGQFNLSGALGTRGTFNFSQFFQQLGLASFLNGGRQEDLAKPLSVGLDSNSSTGTPEAAKKDGTMNKPTVGSFGFEINLQENQNALKFLASLLELPEFLLFLQHAISVPEDVARDLGDVMETVLSSQTCEQTPERLFVPSCTTEGSYEDVQCFSGECWCVNSWGKELPGSRVRGGQPRCPTDCEKQRARMQSLMGSQPAGSTLFVPACTSEGHFLPVQCFNSECYCVDAEGQAIPGTRSAIGKPKKCPTPCQLQSEQAFLRTVQALLSNSSMLPTLSDTYIPQCSTDGQWRQVQCNGPPEQVFELYQRWEAQNKGQDLTPAKLLVKIMSYREAASGNFSLFIQSLYEAGQQDVFPVLSQYPSLQDVPLAALEGKRPQPRENILLEPYLFWQILNGQLSQYPGSYSDFSTPLAHFDLRNCWCVDEAGQELEGMRSEPSKLPTCPGSCEEAKLRVLQFIRETEEIVSASNSSRFPLGESFLVAKGIRLRNEDLGLPPLFPPREAFAEQFLRGSDYAIRLAAQSTLSFYQRRRFSPDDSAGASALLRSGPYMPQCDAFGSWEPVQCHAGTGHCWCVDEKGGFIPGSLTARSLQIPQCPTTCEKSRTSGLLSSWKQARSQENPSPKDLFVPACLETGEYARLQASGAGTWCVDPASGEELRPGSSSSAQCPSLCNVLKSGVLSRRVSPGYVPACRAEDGGFSPVQCDQAQGSCWCVMDSGEEVPGTRVTGGQPACESPRCPLPFNASEVVGGTILCETISGPTGSAMQQCQLLCRQGSWSVFPPGPLICSLESGRWESQLPQPRACQRPQLWQTIQTQGHFQLQLPPGKMCSADYADLLQTFQVFILDELTARGFCQIQVKTFGTLVSIPVCNNSSVQVGCLTRERLGVNVTWKSRLEDIPVASLPDLHDIERALVGKDLLGRFTDLIQSGSFQLHLDSKTFPAETIRFLQGDHFGTSPRTWFGCSEGFYQVLTSEASQDGLGCVKCPEGSYSQDEECIPCPVGFYQEQAGSLACVPCPVGRTTISAGAFSQTHCVTDCQRNEAGLQCDQNGQYRASQKDRGSGKAFCVDGEGRRLPWWETEAPLEDSQCLMMQKFEKVPESKVIFDANAPVAVRSKVPDSEFPVMQCLTDCTEDEACSFFTVSTTEPEISCDFYAWTSDNVACMTSDQKRDALGNSKATSFGSLRCQVKVRSHGQDSPAVYLKKGQGSTTTLQKRFEPTGFQNMLSGLYNPIVFSASGANLTDAHLFCLLACDRDLCCDGFVLTQVQGGAIICGLLSSPSVLLCNVKDWMDPSEAWANATCPGVTYDQESHQVILRLGDQEFIKSLTPLEGTQDTFTNFQQVYLWKDSDMGSRPESMGCRKDTVPRPASPTEAGLTTELFSPVDLNQVIVNGNQSLSSQKHWLFKHLFSAQQANLWCLSRCVQEHSFCQLAEITESASLYFTCTLYPEAQVCDDIMESNAQGCRLILPQMPKALFRKKVILEDKVKNFYTRLPFQKLMGISIRNKVPMSEKSISNGFFECERRCDADPCCTGFGFLNVSQLKGGEVTCLTLNSLGIQMCSEENGGAWRILDCGSPDIEVHTYPFGWYQKPIAQNNAPSFCPLVVLPSLTEKGIMKVCWGPERLFLPERFQNVTVYPSQPVQVWKPPLLFPSYSIFRSNHLMSAEQLKEIPLGFDCGKKGEDPEDFWMPWTHCLFLMSPKKVM

SEQ ID NO: 906356 - protein, 1966 aa, Homo sapiens
MLSRLRDPPGCSSEGLKCMDPPAGKPKRCPRSCEIRNRRLLHGVGDKSPPQCSAEGEFMPVQCKFVNTTDMMIFDLVHSYNRFPDAFVTFSSFQRRFPEVSGYCHCADSQGRELAETGLELLLDEIYDTIFAGLDLPSTFTETTLYRILQRRFLAVQSVISGRFRCPTKCEVERFTATSFGHPYVPSCRRNGDYQAVQCQTEGPCWCVDAQGKEMHGTRQQGEPPSCAEGQSCASERQQALSRLYFGTSGYFSQHDLFSSPEKRWASPRVARFATSCPPTIKELFVDSGLLRPMVEGQSQQFSVSENLLKEAIRAIFPSRGLARLALQFTTNPKRLQQNLFGGKFLVNVGQFNLSGALGTRGTFNFSQFFQQLGLASFLNGGRQEDLAKPLSVGLDSNSSTGTPEAAKKDGTMNKPTVGSFGFEINLQENQNALKFLASLLELPEFLLFLQHAISVPEDVARDLGDVMETVLSSQTCEQTPERLFVPSCTTEGSYEDVQCFSGECWCVNSWGKELPGSRVRGGQPRCPTDCEKQRARMQSLMGSQPAGSTLFVPACTSEGHFLPVQCFNSECYCVDAEGQAIPGTRSAIGKPKKCPTPCQLQSEQAFLRTVQALLSNSSMLPTLSDTYIPQCSTDGQWRQVQCNGPPEQVFELYQRWEAQNKGQDLTPAKLLVKIMSYREAASGNFSLFIQSLYEAGQQDVFPVLSQYPSLQDVPLAALEGKRPQPRENILLEPYLFWQILNGQLSQYPGSYSDFSTPLAHFDLRNCWCVDEAGQELEGMRSEPSKLPTCPGSCEEAKLRVLQFIRETEEIVSASNSSRFPLGESFLVAKGIRLRNEDLGLPPLFPPREAFAEQFLRGSDYAIRLAAQSTLSFYQRRRFSPDDSAGASALLRSGPYMPQCDAFGSWEPVQCHAGTGHCWCVDEKGGFIPGSLTARSLQIPQCPTTCEKSRTSGLLSSWKQARSQENPSPKDLFVPACLETGEYARLQASGAGTWCVDPASGEELRPGSSSSAQCPSLCNVLKSGVLSRRVSPGYVPACRAEDGGFSPVQCDQAQGSCWCVMDSGEEVPGTRVTGGQPACESPRCPLPFNASEVVGGTILCETISGPTGSAMQQCQLLCRQGSWSVFPPGPLICSLESGRWESQLPQPRACQRPQLWQTIQTQGHFQLQLPPGKMCSADYADLLQTFQVFILDELTARGFCQIQVKTFGTLVSIPVCNNSSVQVGCLTRERLGVNVTWKSRLEDIPVASLPDLHDIERALVGKDLLGRFTDLIQSGSFQLHLDSKTFPAETIRFLQGDHFGTSPRTWFGCSEGFYQVLTSEASQDGLGCVKCPEGSYSQDEECIPCPVGFYQEQAGSLACVPCPVGRTTISAGAFSQTHCVTDCQRNEAGLQCDQNGQYRASQKDRGSGKAFCVDGEGRRLPWWETEAPLEDSQCLMMQKFEKVPESKVIFDANAPVAVRSKVPDSEFPVMQCLTDCTEDEACSFFTVSTTEPEISCDFYAWTSDNVACMTSDQKRDALGNSKATSFGSLRCQVKVRSHGQDSPAVYLKKGQGSTTTLQKRFEPTGFQNMLSGLYNPIVFSASGANLTDAHLFCLLACDRDLCCDGFVLTQVQGGAIICGLLSSPSVLLCNVKDWMDPSEAWANATCPGVTYDQESHQVILRLGDQEFIKSLTPLEGTQDTFTNFQQVYLWKDSDMGSRPESMGCRKDTVPRPASPTEAGLTTELFSPVDLNQVIVNGNQSLSSQKHWLFKHLFSAQQANLWCLSRCVQEHSFCQLAEITESASLYFTCTLYPEAQVCDDIMESNAQGCRLILPQMPKALFRKKVILEDKVKNFYTRLPFQKLMGISIRNKVPMSEKSISNGFFECERRCDADPCCTGFGFLNVSQLKGGEVTCLTLNSLGIQMCSEENGGAWRILDCGSPDIEVHTYPFGWYQKPIAQNNAPSFCPLVVLPSLTEKGKFIVFLSLG

SEQ ID NO: 906357 - protein, 1694 aa, Homo sapiens
MLSRLRDPPGCSSEGLKCMDPPAGKPKRCPRSCEIRNRRLLHGVGDKSPPQCSAEGEFMPVQCKFVNTTDMMIFDLVHSYNRFPDAFVTFSSFQRRFPEVSGYCHCADSQGRELAETGLELLLDEIYDTIFAGLDLPSTFTETTLYRILQRRFLAVQSVISGRFRCPTKCEVERFTATSFGHPYVPSCRRNGDYQAVQCQTEGPCWCVDAQGKEMHGTRQQGEPPSCAEGQSCASERQQALSRLYFGTSGYFSQHDLFSSPEKRWASPRVARFATSCPPTIKELFVDSGLLRPMVEGQSQQFSVSENLLKEAIRAIFPSRGLARLALQFTTNPKRLQQNLFGGKFLVNVGQFNLSGALGTRGTFNFSQFFQQLGLASFLNGGRQEDLAKPLSVGLDSNSSTGTPEAAKKDGTMNKPTVGSFGFEINLQENQNALKFLASLLELPEFLLFLQHAISVPEDVARDLGDVMETVLSSQTCEQTPERLFVPSCTTEGSYEDVQCFSGECWCVNSWGKELPGSRVRGGQPRCPTDCEKQRARMQSLMGSQPAGSTLFVPACTSEGHFLPVQCFNSECYCVDAEGQAIPGTRSAIGKPKKCPTPCQLQSEQAFLRTVQALLSNSSMLPTLSDTYIPQCSTDGQWRQVQCNGPPEQVFELYQRWEAQNKGQDLTPAKLLVKIMSYREAASGNFSLFIQSLYEAGQQDVFPVLSQYPSLQDVPLAALEGKRPQPRENILLEPYLFWQILNGQLSQYPGSYSDFSTPLAHFDLRNCWCVDEAGQELEGMRSEPSKLPTCPGSCEEAKLRVLQFIRETEEIVSASNSSRFPLGESFLVAKGIRLRNEDLGLPPLFPPREAFAEQFLRGSDYAIRLAAQSTLSFYQRRRFSPDDSAGASALLRSGPYMPQCDAFGSWEPVQCHAGTGHCWCVDEKGGFIPGSLTARSLQIPQCPTTCEKSRTSGLLSSWKQARSQENPSPKDLFVPACLETGEYARLQASGAGTWCVDPASGEELRPGSSSSAQCPSLCNVLKSGVLSRRVSPGYVPACRAEDGGFSPVQCDQAQGSCWCVMDSGEEVPGTRVTGGQPACESPRCPLPFNASEVVGGTILCETISGPTGSAMQQCQLLCRQGSWSVFPPGPLICSLESGRWESQLPQPRACQRPQLWQTIQTQGHFQLQLPPGKMCSADYADLLQTFQVFILDELTARGFCQIQVKTFGTLVSIPVCNNSSVQVGCLTRERLGVNVTWKSRLEDIPVASLPDLHDIERALVGKDLLGRFTDLIQSGSFQLHLDSKTFPAETIRFLQGDHFGTSPRTWFGCSEGFYQVLTSEASQDGLGCVKCPEGSYSQDEECIPCPVGFYQEQAGSLACVPCPVGRTTISAGAFSQTHCVTDCQRNEAGLQCDQNGQYRASQKDRGSGKAFCVDGEGRRLPWWETEAPLEDSQCLMMQKFEKVPESKVIFDANAPVAVRSKVPDSEFPVMQCLTDCTEDEACSFFTVSTTEPEISCDFYAWTSDNVACMTSDQKRDALGNSKATSFGSLRCQVKVRSHGQDSPAVYLKKGQGSTTTLQKRFEPTGFQNMLSGLYNPIVFSASGANLTDAHLFCLLACDRDLCCDGFVLTQVQGGAIICGLLSSPSVLLCNVKDWMDPSEAWANATCPGVTYDQESHQVILRLGDQEFIKSKSLPFVHILSKLLFTRARPSATFL

SEQ ID NO: 906358 - protein, 1570 aa, Homo sapiens
  misc_feature (1552)..(1552): Xaa can be any naturally occurring amino acid
  misc_feature (1560)..(1560): Xaa can be any naturally occurring amino acid
  misc_feature (1564)..(1564): Xaa can be any naturally occurring amino acid
MLSRLRDPPGCSSEGLKCMDPPAGKPKRCPRSCEIRNRRLLHGVGDKSPPQCSAEGEFMPVQCKFVNTTDMMIFDLVHSYNRFPDAFVTFSSFQRRFPEVSGYCHCADSQGRELAETGLELLLDEIYDTIFAGLDLPSTFTETTLYRILQRRFLAVQSVISGRFRCPTKCEVERFTATSFGHPYVPSCRRNGDYQAVQCQTEGPCWCVDAQGKEMHGTRQQGEPPSCAEGQSCASERQQALSRLYFGTSGYFSQHDLFSSPEKRWASPRVARFATSCPPTIKELFVDSGLLRPMVEGQSQQFSVSENLLKEAIRAIFPSRGLARLALQFTTNPKRLQQNLFGGKFLVNVGQFNLSGALGTRGTFNFSQFFQQLGLASFLNGGRQEDLAKPLSVGLDSNSSTGTPEAAKKDGTMNKPTVGSFGFEINLQENQNALKFLASLLELPEFLLFLQHAISVPEDVARDLGDVMETVLSSQTCEQTPERLFVPSCTTEGSYEDVQCFSGECWCVNSWGKELPGSRVRGGQPRCPTDCEKQRARMQSLMGSQPAGSTLFVPACTSEGHFLPVQCFNSECYCVDAEGQAIPGTRSAIGKPKKCPTPCQLQSEQAFLRTVQALLSNSSMLPTLSDTYIPQCSTDGQWRQVQCNGPPEQVFELYQRWEAQNKGQDLTPAKLLVKIMSYREAASGNFSLFIQSLYEAGQQDVFPVLSQYPSLQDVPLAALEGKRPQPRENILLEPYLFWQILNGQLSQYPGSYSDFSTPLAHFDLRNCWCVDEAGQELEGMRSEPSKLPTCPGSCEEAKLRVLQFIRETEEIVSASNSSRFPLGESFLVAKGIRLRNEDLGLPPLFPPREAFAEQFLRGSDYAIRLAAQSTLSFYQRRRFSPDDSAGASALLRSGPYMPQCDAFGSWEPVQCHAGTGHCWCVDEKGGFIPGSLTARSLQIPQCPTTCEKSRTSGLLSSWKQARSQENPSPKDLFVPACLETGEYARLQASGAGTWCVDPASGEELRPGSSSSAQCPSLCNVLKSGVLSRRVSPGYVPACRAEDGGFSPVQCDQAQGSCWCVMDSGEEVPGTRVTGGQPACESPRCPLPFNASEVVGGTILCETISGPTGSAMQQCQLLCRQGSWSVFPPGPLICSLESGRWESQLPQPRACQRPQLWQTIQTQGHFQLQLPPGKMCSADYADLLQTFQVFILDELTARGFCQIQVKTFGTLVSIPVCNNSSVQVGCLTRERLGVNVTWKSRLEDIPVASLPDLHDIERALVGKDLLGRFTDLIQSGSFQLHLDSKTFPAETIRFLQGDHFGTSPRTWFGCSEGFYQVLTSEASQDGLGCVKCPEGSYSQDEECIPCPVGFYQEQAGSLACVPCPVGRTTISAGAFSQTHCVTDCQRNEAGLQCDQNGQYRASQKDRGSGKAFCVDGEGRRLPWWETEAPLEDSQCLMMQKFEKVPESKVIFDANAPVAVRSKVPDSEFPVMQCLTDCTEDEACSFFTVSTTEPEISCDFYAWTSDNVACMTSDQKRDALGNSKATSFGSLRCQVKVRSHGQDSPAVYLKKGPXSPHLNLDXGSKXLCTMVT

SEQ ID NO: 906359 - protein, 1456 aa, Homo sapiens
MLSRLRDPPGCSSEGLKCMDPPAGKPKRCPRSCEIRNRRLLHGVGDKSPPQCSAEGEFMPVQCKFVNTTDMMIFDLVHSYNRFPDAFVTFSSFQRRFPEVSGYCHCADSQGRELAETGLELLLDEIYDTIFAGLDLPSTFTETTLYRILQRRFLAVQSVISGRFRCPTKCEVERFTATSFGHPYVPSCRRNGDYQAVQCQTEGPCWCVDAQGKEMHGTRQQGEPPSCAEGQSCASERQQALSRLYFGTSGYFSQHDLFSSPEKRWASPRVARFATSCPPTIKELFVDSGLLRPMVEGQSQQFSVSENLLKEAIRAIFPSRGLARLALQFTTNPKRLQQNLFGGKFLVNVGQFNLSGALGTRGTFNFSQFFQQLGLASFLNGGRQEDLAKPLSVGLDSNSSTGTPEAAKKDGTMNKPTVGSFGFEINLQENQNALKFLASLLELPEFLLFLQHAISVPEDVARDLGDVMETVLSSQTCEQTPERLFVPSCTTEGSYEDVQCFSGECWCVNSWGKELPGSRVRGGQPRCPTDCEKQRARMQSLMGSQPAGSTLFVPACTSEGHFLPVQCFNSECYCVDAEGQAIPGTRSAIGKPKKCPTPCQLQSEQAFLRTVQALLSNSSMLPTLSDTYIPQCSTDGQWRQVQCNGPPEQVFELYQRWEAQNKGQDLTPAKLLVKIMSYREAASGNFSLFIQSLYEAGQQDVFPVLSQYPSLQDVPLAALEGKRPQPRENILLEPYLFWQILNGQLSQYPGSYSDFSTPLAHFDLRNCWCVDEAGQELEGMRSEPSKLPTCPGSCEEAKLRVLQFIRETEEIVSASNSSRFPLGESFLVAKGIRLRNEDLGLPPLFPPREAFAEQFLRGSDYAIRLAAQSTLSFYQRRRFSPDDSAGASALLRSGPYMPQCDAFGSWEPVQCHAGTGHCWCVDEKGGFIPGSLTARSLQIPQCPTTCEKSRTSGLLSSWKQARSQENPSPKDLFVPACLETGEYARLQASGAGTWCVDPASGEELRPGSSSSAQCPSLCNVLKSGVLSRRVSPGYVPACRAEDGGFSPVQCDQAQGSCWCVMDSGEEVPGTRVTGGQPACESPRCPLPFNASEVVGGTILCETISGPTGSAMQQCQLLCRQGSWSVFPPGPLICSLESGRWESQLPQPRACQRPQLWQTIQTQGHFQLQLPPGKMCSADYADLLQTFQVFILDELTARGFCQIQVKTFGTLVSIPVCNNSSVQVGCLTRERLGVNVTWKSRLEDIPVASLPDLHDIERALVGKDLLGRFTDLIQSGSFQLHLDSKTFPAETIRFLQGDHFGTSPRTWFGCSEGFYQVLTSEASQDGLGCVKCPEGSYSQDEECIPCPVGFYQEQAGSLACVPCPVGRTTISAGAFSQTHLMQKFEKVPESKVIFDANAPVAVRSKVPDSEFPVMQCLTDFTEDEACSIASRVSSDGSQRYSCECYACTRMFRYRAES

SEQ ID NO: 906360 - protein, 1008 aa, Homo sapiens
MLSRLRDPPGCSSEGLKCMDPPAGKPKRCPRSCEIRNRRLLHGVGDKSPPQCSAEGEFMPVQCKFVNTTDMMIFDLVHSYNRFPDAFVTFSSFQRRFPEVSGYCHCADSQGRELAETGLELLLDEIYDTIFAGLDLPSTFTETTLYRILQRRFLAVQSVISGRFRCPTKCEVERFTATSFGHPYVPSCRRNGDYQAVQCQTEGPCWCVDAQGKEMHGTRQQGEPPSCAEGQSCASERQQALSRLYFGTSGYFSQHDLFSSPEKRWASPRVARFATSCPPTIKELFVDSGLLRPMVEGQSQQFSVSENLLKEAIRAIFPSRGLARLALQFTTNPKRLQQNLFGGKFLVNVGQFNLSGALGTRGTFNFSQFFQQLGLASFLNGGRQEDLAKPLSVGLDSNSSTGTPEAAKKDGTMNKPTVGSFGFEINLQENQNALKFLASLLELPEFLLFLQHAISVPEDVARDLGDVMETVLSSQTCEQTPERLFVPSCTTEGSYEDVQCFSGECWCVNSWGKELPGSRVRGGQPRCPTDCEKQRARMQSLMGSQPAGSTLFVPACTSEGHFLPVQCFNSECYCVDAEGQAIPGTRSAIGKPKKCPTPCQLQSEQAFLRTVQALLSNSSMLPTLSDTYIPQCSTDGQWRQVQCNGPPEQVFELYQRWEAQNKGQDLTPAKLLVKIMSYREAASGNFSLFIQSLYEAGQQDVFPVLSQYPSLQDVPLAALEGKRPQPRENILLEPYLFWQILNGQLSQYPGSYSDFSTPLAHFDLRNCWCVDEAGQELEGMRSEPSKLPTCPGSCEEAKLRVLQFIRETEEIVSASNSSRFPLGESFLVAKGIRLRNEDLGLPPLFPPREAFAEQFLRGSDYAIRLAAQSTLSFYQRRRFSPDDSAGASALLRSGPYMPQCDAFGSWEPVQCHAGTGHCWCVDEKGGFIPGSLTARSLQIPQCPTTCEKSRTSGLLSSWKQARSQENPSPKDLFVPACLEVRVWKHRIGAGTCPRWSEMIFLFVQYVQL

SEQ ID NO: 906361 - protein, 152 aa, Homo sapiens
LLSRLQPWLVPHFEEPSEQAGKQFEESRGRTSSKTAFYQALQNSLGGEDSDARVEAAATWYYSLEHSTDDYASFSRALENATRDYFIICPIIDMASAWAKRARGNVFMYHAPENYGHGKPGAAGGMFSLPWGFPFYPAYEGQFSLEEKKPVA

SEQ ID NO: 906362 - protein, 498 aa, Homo sapiens
MLSRLRDPPGCSSEGLKCMDPPAGKPKRCPRSCEIRNRRLLHGVGDKSPPQCSAEGEFMPVQCKFVNTTDMMIFDLVHSYNRFPDAFVTFSSFQRRFPEVSGYCHCADSQGRELAETGLELLLDEIYDTIFAGLDLPSTFTETTLYRILQRRFLAVQSVISGRFRCPTKCEVERFTATSFGHPYVPSCRRNGDYQAVQCQTEGPCWCVDAQGKEMHGTRQQGEPPSCAEGQSCASERQQALSRLYFGTSGYFSQHDLFSSPEKRWASPRVARFATSCPPTIKELFVDSGLLRPMVEGQSQQFSVSENLLKEAIRAIFPSRGLARLALQFTTNPKRLQQNLFGGKFLVNVGQFNLSGALGTRGTFNFSQFFQQLGLASFLNGGRQEDLAKPLSVGLDSNSSTGTPEAAKKDGTMNKPTVGSFGFEINYKEFSELLPNRQGLKKADCSFWSKYISSLKTSADGAKGGQSAESEEEELTAGSGLREDLLSLQEPGSKTYSK

SEQ ID NO: 906363 - protein, 310 aa, Homo sapiens
MLSRLRDPPGCSSEGLKCMDPPAGKPKRCPRSCEIRNRRLLHGVGDKSPPQCSAEGEFMPVQCKFVNTTDMMIFDLVHSYNRFPDAFVTFSSFQRRFPEVSGYCHCADSQGRELAETGLELLLDEIYDTIFAGLDLPSTFTETTLYRILQRRFLAVQSVISGRFRCPTKCEVERFTATSFGHPYVPSCRRNGDYQAVQCQTEGPCWCVDAQGKEMHGTRQQGEPPSCGGFPLGASSFGLGSYYFGGPPDQPLWTPLIQLPSSVPLWPFKLNLSENQFIIINFQHVSHLVSDLVAFSGSSGNIRRLIDEEK

SEQ ID NO: 906364 - protein, 126 aa, Homo sapiens
MLRCLLKLRADGLIQVEGRAERKGSRPRPGPESLTGPGKGRGGGPSVSEKETPTSRHAQSSRGWAGAHHGSTFLLPGPRCPLPFNASEVVGGTILCETISGPTGSAMQQCQLLCRQGSWSVFPPGP

SEQ ID NO: 906365 - protein, 176 aa, Homo sapiens
LVDGNGRRVKKFFTLSSSQLFRRAVLMGGSALSPAAVISHERAQQQAIALAKEVSCPMSSSQEVVSCLRQKPANVLNDAQTKLLAVSGPFHYWGPVIDGHFLREPPARALKRSLRVEVDLLIGSCHGRSFQELVHEDVSSGPLCPGTGHVDYRADDKVVPGGILQSPGEGGIVIRG

SEQ ID NO: 906366 - protein, 150 aa, Homo sapiens
NVDPLPHDYRGSRLSSWEFNEATCCPSRMKSITQFQNSQGGQLRSWLKVTGSYQKKQFKEENVRVSQEVQLFSDMIFMYHAPENYGHGSLELLAECSVCLGASLSTQPTRGSFLWRRRSLSLENHAVLFPSFIRSGNPQITLMSSQLAQV

SEQ ID NO: 906367 - protein, 2293 aa, Homo sapiens
ASSGFSSFLPGRARKMALVLEIFTLLASICWVSANIFEYQVDAQPLRPCELQRETAFLKQADYVPQCAEDGSFQTVQCQNDGRSCWCVGANGSEVLGSRQPGRPVACLSFCQLQKQQILLSGYINSTDTSYLPQCQDSGDYAPVQCDVQQVQCWCVDAEGMEVYGTRQLGRPKRCPRSCEIRNRRLLHGVGDKSPPQCSAEGEFMPVQCKFVNTTDMMIFDLVHSYNRFPDAFVTFSSFQRRFPEVSGYCHCADSQGRELAETGLELLLDEIYDTIFAGLDLPSTFTETTLYRILQRRFLAVQSVISGRFRCPTKCEVERFTATSFGHPYVPSCRRNGDYQAVQCQTEGPCWCVDAQGKEMHGTRQQGEPPSCAEGQSCASERQQALSRLYFGTSGYFSQHDLFSSPEKRWASPRVARFATSCPPTIKELFVDSGLLRPMVEGQSQQFSVSENLLKEAIRAIFPSRGLARLALQFTTNPKRLQQNLFGGKFLVNVGQFNLSGALGTRGTFNFSQFFQQLGLASFLNGGRQEDLAKPLSVGLDSNSSTGTPEAAKKDGTMNKPTVGSFGFEINLQENQNALKFLASLLELPEFLLFLQHAISVPEDVARDLGDVMETVLSSQTCEQTPERLFVPSCTTEGSYEDVQCFSGECWCVNSWGKELPGSRVRGGQPRCPTDCEKQRARMQSLMGSQPAGSTLFVPACTSEGHFLPVQCFNSECYCVDAEGQAIPGTRSAIGKPKKCPTPCQLQSEQAFLRTVQALLSNSSMLPTLSDTYIPQCSTDGQWRQVQCNGPPEQVFELYQRWEAQNKGQDLTPAKLLVKIMSYREAASGNFSLFIQSLYEAGQQDVFPVLSQYPSLQDVPLAALEGKRPQPRENILLEPYLFWQILNGQLSQYPGSYSDFSTPLAHFDLRNCWCVDEAGQELEGMRSEPSKLPTCPGSCEEAKLRVLQFIRETEEIVSASNSSRFPLGESFLVAKGIRLRNEDLGLPPLFPPREAFAEQFLRGSDYAIRLAAQSTLSFYQRRRFSPDDSAGASALLRSGPYMPQCDAFGSWEPVQCHAGTGHCWCVDEKGGFIPGSLTARSLQIPQCPTTCEKSRTSGLLSSWKQARSQENPSPKDLFVPACLETGEYARLQASGAGTWCVDPASGEELRPGSSSSAQCPSLCNVLKSGVLSRRVSPGYVPACRAEDGGFSPVQCDQAQGSCWCVMDSGEEVPGTRVTGGQPACESPRCPLPFNASEVVGGTILCETISGPTGSAMQQCQLLCRQGSWSVFPPGPLICSLESGRWESQLPQPRACQRPQLWQTIQTQGHFQLQLPPGKMCSADYADLLQTFQVFILDELTARGFCQIQVKTFGTLVSIPVCNNSSVQVGCLTRERLGVNVTWKSRLEDIPVASLPDLHDIERALVGKDLLGRFTDLIQSGSFQLHLDSKTFPAETIRFLQGDHFGTSPRTWFGCSEGFYQVLTSEASQDGLGCVKCPEGSYSQDEECIPCPVGFYQEQAGSLACVPCPVGRTTISAGAFSQTHCVTDCQRNEAGLQCDQNGQYRASQKDRGSGKAFCVDGEGRRLPWWETEAPLEDSQCLMMQKFEKVPESKVIFDANAPVAVRSKVPDSEFPVMQCLTDCTEDEACSFFTVSTTEPEISCDFYAWTSDNVACMTSDQKRDALGNSKATSFGSLRCQVKVRSHGQDSPAVYLKKGQGSTTTLQKRFEPTGFQNMLSGLYNPIVFSASGANLTDAHLFCLLACDRDLCCDGFVLTQVQGGAIICGLLSSPSVLLCNVKDWMDPSEAWANATCPGVTYDQESHQVILRLGDQEFIKSLTPLEGTQDTFTNFQQVYLWKDSDMGSRPESMGCRKDTVPRPASPTEAGLTTELFSPVDLNQVIVNGNQSLSSQKHWLFKHLFSAQQANLWCLSRCVQEHSFCQLAEITESASLYFTCTLYPEAQVCDDIMESNAQGCRLILPQMPKALFRKKVILEDKVKNFYTRLPFQKLMGISIRNKVPMSEKSISNGFFECERRCDADPCCTGFGFLNVSQLKGGEVTCLTLNSLGIQMCSEENGGAWRILDCGSPDIEVHTYPFGWYQKPIAQNNAPSFCPLVVLPSLTEKVSLDSWQSLALSSVVVDPSIRHFDVAHVSTAATSNFSAVRDLCLSECSQHEACLITTLQTQPGAVRCMFYADTQSCTHSLQGQNCRLLLREEATHIYRKPGISLLSYEASVPSVPISTHGPAAGQVPGHPGGYLMEASGPVPWSSICCPAPGREALPGTRALELDRLLGCQQAKGQLLAARHQNIHVSWSQ

SEQ ID NO: 906368 - protein, 197 aa, Homo sapiens
DAAAILEDPARGVSLALSSVVVDPSIRHFDVAHVSTAATSNFSAVRDLCLSECSQHEACLITTLQTQPGAVRCMFYADTQSCTHSLQGQNCRLLLREEATHIYRKPGISLLSYEASVPSVPISTHGPAAGQVPGHPGGYLMEASGPVPWSSICCPAPGREALPGTRALELDRLLGCQQAKGQLLAARHQNIHVSWSQ

SEQ ID NO: 906369 - protein, 2147 aa, Homo sapiens; identical to SEQ ID NO: 906337

SEQ ID NO: 906370 - protein, 974 aa, Homo sapiens
MCSADYADLLQTFQVFILDELTARGFCQIQVKTFGTLVSIPVCNNSSVQVGCLTRERLGVNVTWKSRLEDIPVASLPDLHDIERALVGKDLLGRFTDLIQSGSFQLHLDSKTFPAETIRFLQGDHFGTSPRTWFGCSEGFYQVLTSEASQDGLGCVKCPEGSYSQDEECIPCPVGFYQEQAGSLACVPCPVGRTTISAGAFSQTHCVTDCQRNEAGLQCDQNGQYRASQKDRGSGKAFCVDGEGRRLPWWETEAPLEDSQCLMMQKFEKVPESKVIFDANAPVAVRSKVPDSEFPVMQCLTDCTEDEACSFFTVSTTEPEISCDFYAWTSDNVACMTSDQKRDALGNSKATSFGSLRCQVKVRSHGQDSPAVYLKKGQGSTTTLQKRFEPTGFQNMLSGLYNPIVFSASGANLTDAHLFCLLACDRDLCCDGFVLTQVQGGAIICGLLSSPSVLLCNVKDWMDPSEAWANATCPGVTYDQESHQVILRLGDQEFIKSLTPLEGTQDTFTNFQQVYLWKDSDMGSRPESMGCRKDTVPRPASPTEAGLTTELFSPVDLNQVIVNGNQSLSSQKHWLFKHLFSAQQANLWCLSRCVQEHSFCQLAEITESASLYFTCTLYPEAQVCDDIMESNAQGCRLILPQMPKALFRKKVILEDKVKNFYTRLPFQKLMGISIRNKVPMSEKSISNGFFECERRCDADPCCTGFGFLNVSQLKGGEVTCLTLNSLGIQMCSEENGGAWRILDCGSPDIEVHTYPFGWYQKPIAQNNAPSFCPLVVLPSLTEKVSLDSWQSLALSSVVVDPSIRHFDVAHVSTAATSNFSAVRDLCLSECSQHEACLITTLQTQPGAVRCMFYADTQSCTHSLQGQNCRLLLREEATHIYRKPGISLLSYEASVPSVPISTHGPAAGQVPGHPGGYLMEASGPVPWSSICCPAPGREALPGTRALELDRLLGCQQAKGQLLAARHQNIHVSWSQ

SEQ ID NO: 906371 - protein, 498 aa, Homo sapiens
MLILKAAHIVCRVRTADFCFVKRPPTSTGSQESLCSAMRHLYLLCPFPPMGRLLGRSQAIQVGTSWKQVDQFLGVPYAAPPLAERRFQAPEPLNWTGSWDASKPRASCWQPGTRTSTSPGVSEDCLYLNVFIPQNVAPNASVLVFFHNTMDREESEGWPAIDGSFLAAVGNLIVVTASYRVGVFGFLSSGSGEVSGNWGLLDQVAALTWVQTHIRGFGGDPRRVSLAADRGGADVASIHLLTARATNSQLFRRAVLMGGSALSPAAVISHERAQQQAIALAKEVSCPMSSSQEVVSCLRQKPANVLNDAQTKLLAVSGPFHYWGPVIDGHFLREPPARALKRSLRVEVDLLIGSSQDDGLINRAKAVKQFEESRGRTSSKTAFYQALQNSLGGEDSDARVEAAATWYYSLEHSTDDYASFSRALENATRDYFIICPIIDMASAWAKRARGNVFMYHAPENYGHGKPGAAGGMFSLPWGFPFYPAYEGQFSLEEKKPVA

SEQ ID NO: 906372 - protein, 2177 aa, Homo sapiens
MLSRLRDPPGCSSEGLKCMDPPAGKPKRCPRSCEIRNRRLLHGVGDKSPPQCSAEGEFMPVQCKFVNTTDMMIFDLVHSYNRFPDAFVTFSSFQRRFPEVSGYCHCADSQGRELAETGLELLLDEIYDTIFAGLDLPSTFTETTLYRILQRRFLAVQSVISGRFRCPTKCEVERFTATSFGHPYVPSCRRNGDYQAVQCQTEGPCWCVDAQGKEMHGTRQQGEPPSCAEGQSCASERQQALSRLYFGTSGYFSQHDLFSSPEKRWASPRVARFATSCPPTIKELFVDSGLLRPMVEGQSQQFSVSENLLKEAIRAIFPSRGLARLALQFTTNPKRLQQNLFGGKFLVNVGQFNLSGALGTRGTFNFSQFFQQLGLASFLNGGRQEDLAKPLSVGLDSNSSTGTPEAAKKDGTMNKPTVGSFGFEINLQENQNALKFLASLLELPEFLLFLQHAISVPEDVARDLGDVMETVLSSQTCEQTPERLFVPSCTTEGSYEDVQCFSGECWCVNSWGKELPGSRVRGGQPRCPTDCEKQRARMQSLMGSQPAGSTLFVPACTSEGHFLPVQCFNSECYCVDAEGQAIPGTRSAIGKPKKCPTPCQLQSEQAFLRTVQALLSNSSMLPTLSDTYIPQCSTDGQWRQVQCNGPPEQVFELYQRWEAQNKGQDLTPAKLLVKIMSYREAASGNFSLFIQSLYEAGQQDVFPVLSQYPSLQDVPLAALEGKRPQPRENILLEPYLFWQILNGQLSQYPGSYSDFSTPLAHFDLRNCWCVDEAGQELEGMRSEPSKLPTCPGSCEEAKLRVLQFIRETEEIVSASNSSRFPLGESFLVAKGIRLRNEDLGLPPLFPPREAFAEQFLRGSDYAIRLAAQSTLSFYQRRRFSPDDSAGASALLRSGPYMPQCDAFGSWEPVQCHAGTGHCWCVDEKGGFIPGSLTARSLQIPQCPTTCEKSRTSGLLSSWKQARSQENPSPKDLFVPACLETGEYARLQASGAGTWCVDPASGEELRPGSSSSAQCPSLCNVLKSGVLSRRVSPGYVPACRAEDGGFSPVQCDQAQGSCWCVMDSGEEVPGTRVTGGQPACESPRCPLPFNASEVVGGTILCETISGPTGSAMQQCQLLCRQGSWSVFPPGPLICSLESGRWESQLPQPRACQRPQLWQTIQTQGHFQLQLPPGKMCSADYADLLQTFQVFILDELTARGFCQIQVKTFGTLVSIPVCNNSSVQVGCLTRERLGVNVTWKSRLEDIPVASLPDLHDIERALVGKDLLGRFTDLIQSGSFQLHLDSKTFPAETIRFLQGDHFGTSPRTWFGCSEGFYQVLTSEASQDGLGCVKCPEGSYSQDEECIPCPVGFYQEQAGSLACVPCPVGRTTISAGAFSQTHCVTDCQRNEAGLQCDQNGQYRASQKDRGSGKAFCVDGEGRRLPWWETEAPLEDSQCLMMQKFEKVPESKVIFDANAPVAVRSKVPDSEFPVMQCLTDCTEDEACSFFTVSTTEPEISCDFYAWTSDNVACMTSDQKRDALGNSKATSFGSLRCQVKVRSHGQDSPAVYLKKGQGSTTTLQKRFEPTGFQNMLSGLYNPIVFSASGANLTDAHLFCLLACDRDLCCDGFVLTQVQGGAIICGLLSSPSVLLCNVKDWMDPSEAWANATCPGVTYDQESHQVILRLGDQEFIKSLTPLEGTQDTFTNFQQVYLWKDSDMGSRPESMGCRKDTVPRPASPTEAGLTTELFSPVDLNQVIVNGNQSLSSQKHWLFKHLFSAQQANLWCLSRCVQEHSFCQLAEITESASLYFTCTLYPEAQVCDDIMESNAQGCRLILPQMPKALFRKKVILEDKVKNFYTRLPFQKLMGISIRNKVPMSEKSISNGFFECERRCDADPCCTGFGFLNVSQLKGGEVTCLTLNSLGIQMCSEENGGAWRILDCGSPDIEVHTYPFGWYQKPIAQNNAPSFCPLVVLPSLTEKVFKVREVRGTQLKRMERGLPYKLEYLVSWEVSLDSWQSLALSSVVVDPSIRHFDVAHVSTAATSNFSAVRDLCLSECSQHEACLITTLQTQPGAVRCMFYADTQSCTHSLQGQNCRLLLREEATHIYRKPGISLLSYEASVPSVPISTHGPAAGQVPGHPGGYLMEASGPVPWSSICCPAPGREALPGTRALELDRLLGCQQAKGQLLAARHQNIHVSWSQ

SEQ ID NO: 906373 - protein, 2147 aa, Homo sapiens; identical to SEQ ID NO: 906337

SEQ ID NO: 906374 - protein, 2147 aa, Homo sapiens; identical to SEQ ID NO: 906337

SEQ ID NO: 906375 - protein, 2147 aa, Homo sapiens; identical to SEQ ID NO: 906337

SEQ ID NO: 906376 - protein, 2147 aa, Homo sapiens; identical to SEQ ID NO: 906337

SEQ ID NO: 906377 - protein, 2147 aa, Homo sapiens; identical to SEQ ID NO: 906337

SEQ ID NO: 906378 - protein, 2147 aa, Homo sapiens; identical to SEQ ID NO: 906337

SEQ ID NO: 906379 - protein, 498 aa, Homo sapiens; identical to SEQ ID NO: 906371

SEQ ID NO: 906380 - protein, 211 aa, Homo sapiens
MSSSQEVVSCLRQKPANVLNDAQTKLLAVSGPFHYWGPVIDGHFLREPPARALKRSLRVEVDLLIGSSQDDGLINRAKAVKQFEESRGRTSSKTAFYQALQNSLGGEDSDARVEAAATWYYSLEHSTDDYASFSRALENATRDYFIICPIIDMASAWAKRARGNVFMYHAPENYGHGKPGAAGGMFSLPWGFPFYPAYEGQFSLEEKKPVA

SEQ ID NO: 906381 - protein, 143 aa, Homo sapiens
VRRYRGSRLSSWEQFEESRGRTSSKTAFYQALQNSLGGEDSDARVEAAATWYYSLEHSTDDYASFSRALENATRDYFIICPIIDMASAWAKRARGNVFMYHAPENYGHGKPGAAGGMFSLPWGFPFYPAYEGQFSLEEKKPVA

SEQ ID NO: 906382 - protein, 2126 aa, Homo sapiens
MLSRLRDPPGCSSEGLKCMDPPAGKPKRCPRSCEIRNRRLLHGVGDKSPPQCSAEGEFMPVQCKFVNTTDMMIFDLVHSYNRFPDAFVTFSSFQRRFPEVSGYCHCADSQGRELAETGLELLLDEIYDTIFAGLDLPSTFTETTLYRILQRRFLAVQSVISGRFRCPTKCEVERFTATSFGHPYVPSCRRNGDYQAVQCQTEGPCWCVDAQGKEMHGTRQQGEPPSCAEGQSCASERQQALSRLYFGTSGYFSQHDLFSSPEKRWASPRVARFATSCPPTIKELFVDSGLLRPMVEGQSQQFSVSENLLKEAIRAIFPSRGLARLALQFTTNPKRLQQNLFGGKFLVNVGQFNLSGALGTRGTFNFSQFFQQLGLASFLNGGRQEDLAKPLSVGLDSNSSTGTPEAAKKDGTMNKPTVGSFGFEINLQENQNALKFLASLLELPEFLLFLQHAISVPEDVARDLGDVMETVLSSQTCEQTPERLFVPSCTTEGSYEDVQCFSGECWCVNSWGKELPGSRVRGGQPRCPTDCEKQRARMQSLMGSQPAGSTLFVPACTSEGHFLPVQCFNSECYCVDAEGQAIPGTRSAIGKPKKCPTPCQLQSEQAFLRTVQALLSNSSMLPTLSDTYIPQCSTDGQWRQVQCNGPPEQVFELYQRWEAQNKGQDLTPAKLLVKIMSYREAASGNFSLFIQSLYEAGQQDVFPVLSQYPSLQDVPLAALEGKRPQPRENILLEPYLFWQILNGQLSQYPGSYSDFSTPLAHFDLRNCWCVDEAGQELEGMRSEPSKLPTCPGSCEEAKLRVLQFIRETEEIVSASNSSRFPLGESFLVAKGIRLRNEDLGLPPLFPPREAFAEQFLRGSDYAIRLAAQSTLSFYQRRRFSPDDSAGASALLRSGPYMPQCDAFGSWEPVQCHAGTGHCWCVDEKGGFIPGSLTARSLQIPQCPTTCEKSRTSGLLSSWKQARSQENPSPKDLFVPACLETGEYARLQASGAGTWCVDPASGEELRPGSSSSAQCPSLCNVLKSGVLSRRVSPGYVPACRAEDGGFSPVQCDQAQGSCWCVMDSGEEVPGTRVTGGQPACESPRCPLPFNASEVVGGTILCETISGPTGSAMQQCQLLCRQGSWSVFPPGPLICSLESGRWESQLPQPRACQRPQLWQTIQTQGHFQLQLPPGKMCSADYADLLQTFQVFILDELTARGFCQIQVKTFGTLVSIPVCNNSSVQVGCLTRERLGVNVTWKSRLEDIPVASLPDLHDIERALVGKDLLGRFTDLIQSGSFQLHLDSKTFPAETIRFLQGDHFGTSPRTWFGCSEGFYQVLTSEASQDGLGCVKCPEGSYSQDEECIPCPVGFYQEQAGSLACVPCPVGRTTISAGAFSQTHCVTDCQRNEAGLQCDQNGQYRASQKDRGSGKAFCVDGEGRRLPWWETEAPLEDSQCLMMQKFEKVPESKVIFDANAPVAVRSKVPDSEFPVMQCLTDCTEDEACSFFTVSTTEPEISCDFYAWTSDNVACMTSDQKRDALGNSKATSFGSLRCQVKVRSHGQDSPAVYLKKGQGSTTTLQKRFEPTGFQNMLSGLYNPIVFSASGANLTDAHLFCLLACDRDLCCDGFVLTQVQGGAIICGLLSSPSVLLCNVKDWMDPSEAWANATCPGVTYDQESHQVILRLGDQEFIKSLTPLEGTQDTFTNFQQVYLWKDSDMGSRPESMGCRKDTVPRPASPTEAGLTTELFSPVDLNQVIVNGNQSLSSQKHWLFKHLFSAQQANLWCLSRCVQEHSFCQLAEITESASLYFTCTLYPEAQVCDDIMESNAQGCRLILPQMPKALFRKKVILEDKVKNFYTRLPFQKLMGISIRNKVPMSEKSISNGFFECERRCDADPCCTGFGFLNVSQLKGGEVTCLTLNSLGIQMCSEENGGAWRILDCGSPDIEVHTYPFGWYQKPIAQNNAPSFCPLVVLPSLTEKVSLDSWQSLALSSVVVDPSIRHFDVAHVSTAATSNFSAVRDLCLSECSQHEACLITTLQTQPGAVRCMFYADTQSCTHSLQGQNCRLLLREEATHIYRKPGISLLSYEASVPSVPISTHGPAAGQVPGHPGGYLMEASGPVPWSSICCPAPGREALPGTREVEHREERYR

SEQ ID NO: 906383 - protein, 126 aa, Homo sapiens
RPPTTTKFAAASTGQRGPEETSSCTMLLKTTAMASLELLAECSVCLGASLSTQPTRGSFLWRRRSLSLENHAVLFPSFIRSGNPNLPLMSSHGKYPHLQPPGLTLYPVLVERTTRSSVSCSPIDRA

SEQ ID NO: 906384 - protein, 2009 aa, Homo sapiens
MLSRLRDPPGCSSEGLKCMDPPAGKPKRCPRSCEIRNRRLLHGVGDKSPPQCSAEGEFMPVQCKFVNTTDMMIFDLVHSYNRFPDAFVTFSSFQRRFPEVSGYCHCADSQGRELAETGLELLLDEIYDTIFAGLDLPSTFTETTLYRILQRRFLAVQSVISGRFRCPTKCEVERFTATSFGHPYVPSCRRNGDYQAVQCQTEGPCWCVDAQGKEMHGTRQQGEPPSCAEGQSCASERQQALSRLYFGTSGYFSQHDLFSSPEKRWASPRVARFATSCPPTIKELFVDSGLLRPMVEGQSQQFSVSENLLKEAIRAIFPSRGLARLALQFTTNPKRLQQNLFGGKFLVNVGQFNLSGALGTRGTFNFSQFFQQLGLASFLNGGRQEDLAKPLSVGLDSNSSTGTPEAAKKDGTMNKPTVGSFGFEINLQENQNALKFLASLLELPEFLLFLQHAISVPEDVARDLGDVMETVLSSQTCEQTPERLFVPSCTTEGSYEDVQCFSGECWCVNSWGKELPGSRVRGGQPRCPTDCEKQRARMQSLMGSQPAGSTLFVPACTSEGHFLPVQCFNSECYCVDAEGQAIPGTRSAIGKPKKCPTPCQLQSEQAFLRTVQALLSNSSMLPTLSDTYIPQCSTDGQWRQVQCNGPPEQVFELYQRWEAQNKGQDLTPAKLLVKIMSYREAASGNFSLFIQSLYEAGQQDVFPVLSQYPSLQDVPLAALEGKRPQPRENILLEPYLFWQILNGQLSQYPGSYSDFSTPLAHFDLRNCWCVDEAGQELEGMRSEPSKLPTCPGSCEEAKLRVLQFIRETEEIVSASNSSRFPLGESFLVAKGIRLRNEDLGLPPLFPPREAFAEQFLRGSDYAIRLAAQSTLSFYQRRRFSPDDSAGASALLRSGPYMPQCDAFGSWEPVQCHAGTGHCWCVDEKGGFIPGSLTARSLQIPQCPTTCEKSRTSGLLSSWKQARSQENPSPKDLFVPACLETGEYARLQASGAGTWCVDPASGEELRPGSSSSAQCPSLCNVLKSGVLSRRVSPGYVPACRAEDGGFSPVQCDQAQGSCWCVMDSGEEVPGTRVTGGQPACESPRCPLPFNASEVVGGTILCETISGPTGSAMQQCQLLCRQGSWSVFPPGPLICSLESGRWESQLPQPRACQRPQLWQTIQTQGHFQLQLPPGKMCSADYADLLQTFQVFILDELTARGFCQIQVKTFGTLVSIPVCNNSSVQVGCLTRERLGVNVTWKSRLEDIPVASLPDLHDIERALVGKDLLGRFTDLIQSGSFQLHLDSKTFPAETIRFLQGDHFGTSPRTWFGCSEGFYQVLTSEASQDGLGCVKCPEGSYSQDEECIPCPVGFYQEQAGSLACVPCPVGRTTISAGAFSQTHCVTDCQRNEAGLQCDQNGQYRASQKDRGSGKAFCVDGEGRRLPWWETEAPLEDSQCLMMQKFEKVPESKVIFDANAPVAVRSKVPDSEFPVMQCLTDCTEDEACSFFTVSTTEPEISCDFYAWTSDNVACMTSDQKRDALGNSKATSFGSLRCQVKVRSHGQDSPAVYLKKGQGSTTTLQKRFEPTGFQNMLSGLYNPIVFSASGANLTDAHLFCLLACDRDLCCDGFVLTQVQGGAIICGLLSSPSVLLCNVKDWMDPSEAWANATCPGVTYDQESHQVILRLGDQEFIKSLTPLEGTQDTFTNFQQVYLWKDSDMGSRPESMGCRKDTVPRPASPTEAGLTTELFSPVDLNQVIVNGNQSLSSQKHWLFKHLFSAQQANLWCLSRCVQEHSFCQLAEITESASLYFTCTLYPEAQVCDDIMESNAQGCRLILPQMPKALFRKKVILEDKVKNFYTRLPFQKLMGISIRNKVPMSEKSISNGFFECERRCDADPCCTGFGFLNVSQLKGGEVTCLTLNSLGIQMCSEENGGAWRILDCGSPDIEVHTYPFGWYQKPIAQNNAPSFCPLVVLPSLTEKDSHVPGQTNNSMFSKRLGEHTRYLSSFPLCLSFWRITGRWWFQLKGFLAIFNS

SEQ ID NO: 906385 - protein, 992 aa, Homo sapiens
MLSRLRDPPGCSSEGLKCMDPPAGKPKRCPRSCEIRNRRLLHGVGDKSPPQCSAEGEFMPVQCKFVNTTDMMIFDLVHSYNRFPDAFVTFSSFQRRFPEVSGYCHCADSQGRELAETGLELLLDEIYDTIFAGLDLPSTFTETTLYRILQRRFLAVQSVISGRFRCPTKCEVERFTATSFGHPYVPSCRRNGDYQAVQCQTEGPCWCVDAQGKEMHGTRQQGEPPSCAEGQSCASERQQALSRLYFGTSGYFSQHDLFSSPEKRWASPRVARFATSCPPTIKELFVDSGLLRPMVEGQSQQFSVSENLLKEAIRAIFPSRGLARLALQFTTNPKRLQQNLFGGKFLVNVGQFNLSGALGTRGTFNFSQFFQQLGLASFLNGGRQEDLAKPLSVGLDSNSSTGTPEAAKKDGTMNKPTVGSFGFEINLQENQNALKFLASLLELPEFLLFLQHAISVPEDVARDLGDVMETVLSSQTCEQTPERLFVPSCTTEGSYEDVQCFSGECWCVNSWGKELPGSRVRGGQPRCPTDCEKQRARMQSLMGSQPAGSTLFVPACTSEGHFLPVQCFNSECYCVDAEGQAIPGTRSAIGKPKKCPTPCQLQSEQAFLRTVQALLSNSSMLPTLSDTYIPQCSTDGQWRQVQCNGPPEQVFELYQRWEAQNKGQDLTPAKLLVKIMSYREAASGNFSLFIQSLYEAGQQDVFPVLSQYPSLQDVPLAALEGKRPQPRENILLEPYLFWQILNGQLSQYPGSYSDFSTPLAHFDLRNCWCVDEAGQELEGMRSEPSKLPTCPGSCEEAKLRVLQFIRETEEIVSASNSSRFPLGESFLVAKGIRLRNEDLGLPPLFPPREAFAEQFLRGSDYAIRLAAQSTLSFYQRRRFSPDDSAGASALLRSGPYMPQCDAFGSWEPVQCHAGTGHCWCVDEKGGFIPGSLTARSLQIPQCPTTCEKSRTSGLLSSWKQARSQENPSPKDLFPFYPAYEGQFSLEEKKPVA

SEQ ID NO: 906386 - protein, 1738 aa, Homo sapiens
MLSRLRDPPGCSSEGLKCMDPPAGKPKRCPRSCEIRNRRLLHGVGDKSPPQCSAEGEFMPVQCKFVNTTDMMIFDLVHSYNRFPDAFVTFSSFQRRFPEVSGYCHCADSQGRELAETGLELLLDEIYDTIFAGLDLPSTFTETTLYRILQRRFLAVQSVISGRFRCPTKCEVERFTATSFGHPYVPSCRRNGDYQAVQCQTEGPCWCVDAQGKEMHGTRQQGEPPSCAEGQSCASERQQALSRLYFGTSGYFSQHDLFSSPEKRWASPRVARFATSCPPTIKELFVDSGLLRPMVEGQSQQFSVSENLLKEAIRAIFPSRGLARLALQFTTNPKRLQQNLFGGKFLVNVGQFNLSGALGTRGTFNFSQFFQQLGLASFLNGGRQEDLAKPLSVGLDSNSSTGTPEAAKKDGTMNKPTVGSFGFEINLQENQNALKFLASLLELPEFLLFLQHAISVPEDVARDLGDVMETVLSSQTCEQTPERLFVPSCTTEGSYEDVQCFSGECWCVNSWGKELPGSRVRGGQPRCPTDCEKQRARMQSLMGSQPAGSTLFVPACTSEGHFLPVQCFNSECYCVDAEGQAIPGTRSAIGKPKKCPTPCQLQSEQAFLRTVQALLSNSSMLPTLSDTYIPQCSTDGQWRQVQCNGPPEQVFELYQRWEAQNKGQDLTPAKLLVKIMSYREAASGNFSLFIQSLYEAGQQDVFPVLSQYPSLQDVPLAALEGKRPQPRENILLEPYLFWQILNGQLSQYPGSYSDFSTPLAHFDLRNCWCVDEAGQELEGMRSEPSKLPTCPGSCEEAKLRVLQFIRETEEIVSASNSSRFPLGESFLVAKGIRLRNEDLGLPPLFPPREAFAEQFLRGSDYAIRLAAQSTLSFYQRRRFSPDDSAGASALLRSGPYMPQCDAFGSWEPVQCHAGTGHCWCVDEKGGFIPGSLTARSLQIPQCPTTCEKSRTSGLLSSWKQARSQENPSPKDLFVPACLETGEYARLQASGAGTWCVDPASGEELRPGSSSSAQCPSLCNVLKSGVLSRRVSPGYVPACRAEDGGFSPVQCDQAQGSCWCVMDSGEEVPGTRVTGGQPACESPRCPLPFNASEVVGGTILCETISGPTGSAMQQCQLLCRQGSWSVFPPGPLICSLESGRWESQLPQPRACQRPQLWQTIQTQGHFQLQLPPGKMCSADYADLLQTFQVFILDELTARGFCQIQVKTFGTLVSIPVCNNSSVQVGCLTRERLGVNVTWKSRLEDIPVASLPDLHDIERALVGKDLLGRFTDLIQSGSFQLHLDSKTFPAETIRFLQGDHFGTSPRTWFGCSEGFYQVLTSEASQDGLGCVKCPEGSYSQDEECIPCPVGFYQEQAGSLACVPCPVGRTTISAGAFSQTHCVTDCQRNEAGLQCDQNGQYRASQKDRGSGKAFCVDGEGRRLPWWETEAPLEDSQCLMMQKFEKVPESKVIFDANAPVAVRSKVPDSEFPVMQCLTDCTEDEACSFFTVSTTEPEISCDFYAWTSDNVACMTSDQKRDALGNSKATSFGSLRCQVKVRSHGQDSPAVYLKKGQGSTTTLQKRFEPTGFQNMLSGLYNPIVFSASGANLTDAHLFCLLACDRDLCCDGFVLTQVQGGAIICGLLSSPSVLLCNVKDWMDPSEAWANATCPGVTYDQESHQVILRLGDQEFIKSLTPLEGTQDTFTNFQQVYLWKDSDMGSRPESMGCRKDTVPRPASPTEAVTQDFSHCGPQPPSSRDPSR

SEQ ID NO: 906387 - protein, 1633 aa, Homo sapiens
MLSRLRDPPGCSSEGLKCMDPPAGKPKRCPRSCEIRNRRLLHGVGDKSPPQCSAEGEFMPVQCKFVNTTDMMIFDLVHSYNRFPDAFVTFSSFQRRFPEVSGYCHCADSQGRELAETGLELLLDEIYDTIFAGLDLPSTFTETTLYRILQRRFLAVQSVISGRFRCPTKCEVERFTATSFGHPYVPSCRRNGDYQAVQCQTEGPCWCVDAQGKEMHGTRQQGEPPSCAEGQSCASERQQALSRLYFGTSGYFSQHDLFSSPEKRWASPRVARFATSCPPTIKELFVDSGLLRPMVEGQSQQFSVSENLLKEAIRAIFPSRGLARLALQFTTNPKRLQQNLFGGKFLVNVGQFNLSGALGTRGTFNFSQFFQQLGLASFLNGGRQEDLAKPLSVGLDSNSSTGTPEAAKKDGTMNKPTVGSFGFEINLQENQNALKFLASLLELPEFLLFLQHAISVPEDVARDLGDVMETVLSSQTCEQTPERLFVPSCTTEGSYEDVQCFSGECWCVNSWGKELPGSRVRGGQPRCPTDCEKQRARMQSLMGSQPAGSTLFVPACTSEGHFLPVQCFNSECYCVDAEGQAIPGTRSAIGKPKKCPTPCQLQSEQAFLRTVQALLSNSSMLPTLSDTYIPQCSTDGQWRQVQCNGPPEQVFELYQRWEAQNKGQDLTPAKLLVKIMSYREAASGNFSLFIQSLYEAGQQDVFPVLSQYPSLQDVPLAALEGKRPQPRENILLEPYLFWQILNGQLSQYPGSYSDFSTPLAHFDLRNCWCVDEAGQELEGMRSEPSKLPTCPGSCEEAKLRVLQFIRETEEIVSASNSSRFPLGESFLVAKGIRLRNEDLGLPPLFPPREAFAEQFLRGSDYAIRLAAQSTLSFYQRRRFSPDDSAGASALLRSGPYMPQCDAFGSWEPVQCHAGTGHCWCVDEKGGFIPGSLTARSLQIPQCPTTCEKSRTSGLLSSWKQARSQENPSPKDLFVPACLETGEYARLQASGAGTWCVDPASGEELRPGSSSSAQCPSLCNVLKSGVLSRRVSPGYVPACRAEDGGFSPVQCDQAQGSCWCVMDSGEEVPGTRVTGGQPACESPRCPLPFNASEVVGGTILCETISGPTGSAMQQCQLLCRQGSWSVFPPGPLICSLESGRWESQLPQPRACQRPQLWQTIQTQGHFQLQLPPGKMCSADYADLLQTFQVFILDELTARGFCQIQVKTFGTLVSIPVCNNSSVQVGCLTRERLGVNVTWKSRLEDIPVASLPDLHDIERALVGKDLLGRFTDLIQSGSFQLHLDSKTFPAETIRFLQGDHFGTSPRTWFGCSEGFYQVLTSEASQDGLGCVKCPEGSYSQDEECIPCPVGFYQEQAGSLACVPCPVGRTTISAGAFSQTHCVTDCQRNEAGLQCDQNGQYRASQKDRGSGKAFCVDGEGRRLPWWETEAPLEDSQCLMMQKFEKVPESKVIFDANAPVAVRSKVPDSEFPVMQCLTDCTEDEACSFFTVSTTEPEISCDFYAWTSDNVACMTSDQKRDALGNSKATSFGSLRCQVKVRSHGQDSPAVYLKKGQGSTTTLQKRFEPTGFQNMLSGLYNPIVFSASGANLTDAHLFCLLACDRDLCCDGFVLTQVQGGHHLWVAELTQYPVIGDTSR

SEQ ID NO: 906388 - protein, 1500 aa, Homo sapiens
  misc_feature (1477)..(1477): Xaa can be any naturally occurring amino acid
  misc_feature (1486)..(1486): Xaa can be any naturally occurring amino acid
  misc_feature (1494)..(1494): Xaa can be any naturally occurring amino acid
MLSRLRDPPGCSSEGLKCMDPPAGKPKRCPRSCEIRNRRLLHGVGDKSPPQCSAEGEFMPVQCKFVNTTDMMIFDLVHSYNRFPDAFVTFSSFQRRFPEVSGYCHCADSQGRELAETGLELLLDEIYDTIFAGLDLPSTFTETTLYRILQRRFLAVQSVISGRFRCPTKCEVERFTATSFGHPYVPSCRRNGDYQAVQCQTEGPCWCVDAQGKEMHGTRQQGEPPSCAEGQSCASERQQALSRLYFGTSGYFSQHDLFSSPEKRWASPRVARFATSCPPTIKELFVDSGLLRPMVEGQSQQFSVSENLLKEAIRAIFPSRGLARLALQFTTNPKRLQQNLFGGKFLVNVGQFNLSGALGTRGTFNFSQFFQQLGLASFLNGGRQEDLAKPLSVGLDSNSSTGTPEAAKKDGTMNKPTVGSFGFEINLQENQNALKFLASLLELPEFLLFLQHAISVPEDVARDLGDVMETVLSSQTCEQTPERLFVPSCTTEGSYEDVQCFSGECWCVNSWGKELPGSRVRGGQPRCPTDCEKQRARMQSLMGSQPAGSTLFVPACTSEGHFLPVQCFNSECYCVDAEGQAIPGTRSAIGKPKKCPTPCQLQSEQAFLRTVQALLSNSSMLPTLSDTYIPQCSTDGQWRQVQCNGPPEQVFELYQRWEAQNKGQDLTPAKLLVKIMSYREAASGNFSLFIQSLYEAGQQDVFPVLSQYPSLQDVPLAALEGKRPQPRENILLEPYLFWQILNGQLSQYPGSYSDFSTPLAHFDLRNCWCVDEAGQELEGMRSEPSKLPTCPGSCEEAKLRVLQFIRETEEIVSASNSSRFPLGESFLVAKGIRLRNEDLGLPPLFPPREAFAEQFLRGSDYAIRLAAQSTLSFYQRRRFSPDDSAGASALLRSGPYMPQCDAFGSWEPVQCHAGTGHCWCVDEKGGFIPGSLTARSLQIPQCPTTCEKSRTSGLLSSWKQARSQENPSPKDLFVPACLETGEYARLQASGAGTWCVDPASGEELRPGSSSSAQCPSLCNVLKSGVLSRRVSPGYVPACRAEDGGFSPVQCDQAQGSCWCVMDSGEEVPGTRVTGGQPACESPRCPLPFNASEVVGGTILCETISGPTGSAMQQCQLLCRQGSWSVFPPGPLICSLESGRWESQLPQPRACQRPQLWQTIQTQGHFQLQLPPGKMCSADYADLLQTFQVFILDELTARGFCQIQVKTFGTLVSIPVCNNSSVQVGCLTRERLGVNVTWKSRLEDIPVASLPDLHDIERALVGKDLLGRFTDLIQSGSFQLHLDSKTFPAETIRFLQGDHFGTSPRTWFGCSEGFYQVLTSEASQDGLGCVKCPEGSYSQDEECIPCPVGFYQEQAGSLACVPCPVGRTTISAGAFSQTHCVTDCQRNEAGLQCDQNGQYRASQKDRGSGKAFCVDGEGRRLPWWETEAPLEDSQCLMMQKFEKVPESKVIFDANAPVAVRSKVPDSEFPVMQCLTVTXKFEKVPESXVIFDANAXVAVRSK

SEQ ID NO: 906389 - protein, 943 aa, Homo sapiens
MLSRLRDPPGCSSEGLKCMDPPAGKPKRCPRSCEIRNRRLLHGVGDKSPPQCSAEGEFMPVQCKFVNTTDMMIFDLVHSYNRFPDAFVTFSSFQRRFPEVSGYCHCADSQGRELAETGLELLLDEIYDTIFAGLDLPSTFTETTLYRILQRRFLAVQSVISGRFRCPTKCEVERFTATSFGHPYVPSCRRNGDYQAVQCQTEGPCWCVDAQGKEMHGTRQQGEPPSCAEGQSCASERQQALSRLYFGTSGYFSQHDLFSSPEKRWASPRVARFATSCPPTIKELFVDSGLLRPMVEGQSQQFSVSENLLKEAIRAIFPSRGLARLALQFTTNPKRLQQNLFGGKFLVNVGQFNLSGALGTRGTFNFSQFFQQLGLASFLNGGRQEDLAKPLSVGLDSNSSTGTPEAAKKDGTMNKPTVGSFGFEINLQENQNALKFLASLLELPEFLLFLQHAISVPEDVARDLGDVMETVLSSQTCEQTPERLFVPSCTTEGSYEDVQCFSGECWCVNSWGKELPGSRVRGGQPRCPTDCEKQRARMQSLMGSQPAGSTLFVPACTSEGHFLPVQCFNSECYCVDAEGQAIPGTRSAIGKPKKCPTPCQLQSEQAFLRTVQALLSNSSMLPTLSDTYIPQCSTDGQWRQVQCNGPPEQVFELYQRWEAQNKGQDLTPAKLLVKIMSYREAASGNFSLFIQSLYEAGQQDVFPVLSQYPSLQDVPLAALEGKRPQPRENILLEPYLFWQILNGQLSQYPGSYSDFSTPLAHFDLRNCWCVDEAGQELEGMRSEPSKLPTCPGSCEEAKLRVLQFIRETEEIVSASNSSRFPLGESFLVAKGIRLRNEDLGLPPLFPPREAFAEQFLRGSDYAIRLAAQSTLSFYQRRRFSPDDSAGASALLRSGPYMPQCDAFGSWEPVQCHAGTGHCWCVDEKGGFIPGSLTARSLQIPQCK

SEQ ID NO: 906390 - protein, 755 aa, Homo sapiens
MLSRLRDPPGCSSEGLKCMDPPAGKPKRCPRSCEIRNRRLLHGVGDKSPPQCSAEGEFMPVQCKFVNTTDMMIFDLVHSYNRFPDAFVTFSSFQRRFPEVSGYCHCADSQGRELAETGLELLLDEIYDTIFAGLDLPSTFTETTLYRILQRRFLAVQSVISGRFRCPTKCEVERFTATSFGHPYVPSCRRNGDYQAVQCQTEGPCWCVDAQGKEMHGTRQQGEPPSCAEGQSCASERQQALSRLYFGTSGYFSQHDLFSSPEKRWASPRVARFATSCPPTIKELFVDSGLLRPMVEGQSQQFSVSENLLKEAIRAIFPSRGLARLALQFTTNPKRLQQNLFGGKFLVNVGQFNLSGALGTRGTFNFSQFFQQLGLASFLNGGRQEDLAKPLSVGLDSNSSTGTPEAAKKDGTMNKPTVGSFGFEINLQENQNALKFLASLLELPEFLLFLQHAISVPEDVARDLGDVMETVLSSQTCEQTPERLFVPSCTTEGSYEDVQCFSGECWCVNSWGKELPGSRVRGGQPRCPTDCEKQRARMQSLMGSQPAGSTLFVPACTSEGHFLPVQCFNSECYCVDAEGQAIPGTRSAIGKPKKCPTPCQLQSEQAFLRTVQALLSNSSMLPTLSDTYIPQCSTDGQWRQVQCNGPPEQVFELYQRWEAQNKGQDLTPAKLLVKIMSYREAASGNFSLFIQSLYEAGQQDVFPVLSQYPSLQDVPLAALEGKRPQPRENILLEPYLFWQILNGQLSQCSTVLFSD

SEQ ID NO: 906391 - protein, 97 aa, Homo sapiens
SGRLLLLNSRPRRRPDFVPRAGGENYKEFSELLPNRQGLKKADCSFWSKYISSLKTSADGAKGGQSAESEEEELTAGSGLREDLLSLQEPGSKTYSK

SEQ ID NO: 906392 - protein, 38 aa, Homo sapiens
MQKFEKVPESKVIFDANAPVAVRSKVPDSEFPVMQCLT

SEQ ID NO: 906393 - protein, 124 aa, Homo sapiens
MSVAGLKKQFYKASQLVSEKVGGAEGTKLDDDFKEMEKKVDVTSKAVTEVLARTIEYLQPNPAPASRAKLTMLNTVVQGKSDRSVDAMRVTETPGYPQSEGLLGRRALTHDASGEGRTRNGTIG

SEQ ID NO: 906394 - protein, 368 aa, Homo sapiens
MSVAGLKKQFYKASQLVSEKVGGAEGTKLDDDFKEMEKKVDVTSKAVTEVLARTIEYLQPNPASRAKLTMLNTVSKIRGQVKNPGYPQSEGLLGECMIRHGKELGGESNFGDALLDAGESMKRLAEVKDSLDIEVKQNFIDPLQNLCEKDLKEIQHHLKKLEGRRLDFDYKKKRQGKIPDEELRQALEKFEESKEVAETSMHNLLETDIEQVSQLSALVDAQLDYHRQAVQILDELAEKLKRRMREASSRPKREYKPKPREPFDLGEPEQSNGGFPCTTAPKIAASSSFRSSDKPIRTPSRSMPPLDQPSCKALYDFEPENDGELGFHEGDVITLTNQIDENWYEGMLDGQSGFFPLSYVEVLVPLPQ

SEQ ID NO: 906395 - protein, 368 aa, Homo sapiens; identical to SEQ ID NO: 906394

SEQ ID NO: 906396 - protein, 368 aa, Homo sapiens; identical to SEQ ID NO: 906394

SEQ ID NO: 906397 - protein, 368 aa, Homo sapiens; identical to SEQ ID NO: 906394

SEQ ID NO: 906398 - protein, 256 aa, Homo sapiens
MVDGRVVSCGAMNQLMDSLDIEVKQNFIDPLQNLCEKDLKEIQHHLKKLEGRRLDFDYKKKRQGKIPDEELRQALEKFEESKEVAETSMHNLLETDIEQVSQLSALVDAQLDYHRQAVQILDELAEKLKRRMREASSRPKREYKPKPREPFDLGEPEQSNGGFPCTTAPKIAASSSFRSSDKPIRTPSRSMPPLDQPSCKALYDFEPENDGELGFHEGDVITLTNQIDENWYEGMLDGQSGFFPLSYVEVLVPLPQ

SEQ ID NO: 906399 - protein, 238 aa, Homo sapiens
  misc_feature (8)..(8): Xaa can be any naturally occurring amino acid
QAGTAPRXGISSTRPSVRERLKEIQHHLKKLEGRRLDFDYKKKRQGKIPDEELRQALEKFEESKEVAETSMHNLLETDIEQVSQLSALVDAQLDYHRQAVQILDELAEKLKRRMREASSRPKREYKPKPREPFDLGEPEQSNGGFPCTTAPKIAASSSFRSSDKPIRTPSRSMPPLDQPSCKALYDFEPENDGELGFHEGDVITLTNQIDENWYEGMLDGQSGFFPLSYVEVLVPLPQ

SEQ ID NO: 906400 - protein, 368 aa, Homo sapiens; identical to SEQ ID NO: 906394

SEQ ID NO: 906401 - protein, 368 aa, Homo sapiens; identical to SEQ ID NO: 906394

SEQ ID NO: 906402 - protein, 160 aa, Homo sapiens [sequence omitted]

SEQ ID NO: 906403 - protein, 368 aa, Homo sapiens; identical to SEQ ID NO: 906394

SEQ ID NO: 906404 - protein, 160 aa, Homo sapiens [sequence omitted]

SEQ ID NO: 906405 - protein, 74 aa, Homo sapiens
YSMFDAVIKLSRRGAAICSGWRRRRRRGLLRRAEGRRRPGACRWRGPGGRLGGGRQHVGGGAEEAVLQGEPAGQ

SEQ ID NO: 906406 - protein, 99 aa, Homo sapiens
LWVSGRQDPQWCRDSGSKPCVGRPSGRYWCDPCPPRLQHHLKKLEGRRLDFDYKKKRQGKIPDEELRQALEKFEESKEVAETSMHNLLETDVSSSGCHI

SEQ ID NO: 906407 - protein, 148 aa, Homo sapiens
EVAETLSSGTNALTCGSTLYIEQVSQLSALVDAQLDYHRQAVQIPATGRHSDLRKAKRARFPNNAARMQANALPVTAPQAGSIKPQGPRGAKGPPLLLHQSNGGFPCTTAPKIAASSSFRSSDKPIRTPSRSMPRPGNSRSPEKSLLG

SEQ ID NO: 906408 - protein, 368 aa, Homo sapiens; identical to SEQ ID NO: 906394

SEQ ID NO: 906409 - protein, 333 aa, Homo sapiens
MEKKVDVTSKAVTEVLARTIEYLQPNPASRAKLTMLNTVSKIRGQVKNPGYPQSEGLLGECMIRHGKELGGESNFGDALLDAGESMKRLAEVKDSLDIEVKQNFIDPLQNLCEKDLKEIQHHLKKLEGRRLDFDYKKKRQGKIPDEELRQALEKFEESKEVAETSMHNLLETDIEQVSQLSALVDAQLDYHRQAVQILDELAEKLKRRMREASSRPKREYKPKPREPFDLGEPEQSNGGFPCTTAPKIAASSSFRSSDKPIRTPSRSMPPLDQPSCKALYDFEPENDGELGFHEGDVITLTNQIDENWYEGMLDGQSGFFPLSYVEVLVPLPQ

SEQ ID NO: 906410 - protein, 333 aa, Homo sapiens; identical to SEQ ID NO: 906409

SEQ ID NO: 906411 - protein, 368 aa, Homo sapiens; identical to SEQ ID NO: 906394

SEQ ID NO: 906412 - protein, 282 aa, Homo sapiens
MKRLAEVKDSLDIEVKQNFIDPLQNLQPRHCPLGLRQAGSPVVQGQWVKAMRGGPSGRYWCDPCPPRLQHHLKKLEGRRLDFDYKKKRQGKIPDEELRQALEKFEESKEVAETSMHNLLETDIEQVSQLSALVDAQLDYHRQAVQILDELAEKLKRRMREASSRPKREYKPKPREPFDLGEPEQSNGGFPCTTAPKIAASSSFRSSDKPIRTPSRSMPPLDQPSCKALYDFEPENDGELGFHEGDVITLTNQIDENWYEGMLDGQSGFFPLSYVEVLVPLPQ

SEQ ID NO: 906413 - protein, 368 aa, Homo sapiens; identical to SEQ ID NO: 906394

SEQ ID NO: 906414 - protein, 102 aa, Homo sapiens
RKSKSYGLGARLGVYQIAASSSFRSSDKPIRTPSRSMPPLDQPSCKALYDFEPENDGELGFHEGDVITLTNQIDENWYEGMLDGQSGFFPLSYVEVLVPLPQ

SEQ ID NO: 906415 - protein, 263 aa, Homo sapiens
MSVAGLKKQFYKASQLVSEKVGGAEGTKLDDDFKEMEKKVDVTSKAVTEVLARTIEYLQPNPASRAKLTMLNTVSKIRGQVKNPGYPQSEGLLGECMIRHGKELGGESNFGDALLDAGESMKRLAEVKDSLDIEVKQNFIDPLQNLCEKDLKEIQHHLKKLEGRRLDFDYKKNRHPLLGLLHSTEPLLPGRCLSLPAPPGPRPLRYSLSRTPHLGGGAYLGGWGCLFTLALTPNGDGSLPHSMAPASSPAPQLLAQLAEAGQH

SEQ ID NO: 906416 - protein, 308 aa, Homo sapiens
MSVAGLKKQFYKASQLVSEKVGGAEGTKLDDDFKEMEKKVDVTSKAVTEVLARTIEYLQPNPASRAKLTMLNTVSKIRGQVKNPGYPQSEGLLGECMIRHGKELGGESNFGDALLDAGESMKRLAEVKDSLDIEVKQNFIDPLQNLCEKDLKEIQHHLKKLEGRRLDFDYKKKRQGKIPDEELRQALEKFEESKEVAETSMHNLLETDIEQVSQLSALVDAQLDYHRQAVQILDELAEKLKRRMREASSRPKREYKPKPREPFDLGEPEQSNGGFPCTTAPKIAASSSFRSSDKPIRTPSRSMLVRST

SEQ ID NO: 906417 - protein, 520 aa, Homo sapiens
MGSRARGGAAGPPLKETCCGSRSGTRASAAAAAAAGARVGATARRPRVPERPQGSPGRRPRCASPVRAPPRAAPMLDMSEARSQPPCSPSGTASSMSHVEDSDSDAPPSPAGSEGLGRAGVAVGGARGDPAEAADERFPACIRDAVSQVLKGYDWSLVPMPVRGGGGGALKAKPHVKRPMNAFMVWAQAARRKLADQYPHLHNAELSKTLGKLWRLLSESEKRPFVEEAERLRVQHKKDHPDYKYQPRRRKSAKAGHSDSDSGAELGPHPGGGAVYKAEAGLGDGHHHGDHTGQTHGPPTPPTTPKTELQQAGAKPELKLEGRRPVDSGRQNIDFSNVDISELSSEVMGTMDAFDVHEFDQYLPLGGPAPPEPGQAYGGAYFHAGASPVWAHKSAPSASASPTETGPPRPHIKTEQPSPGHYGDQPRGSPDYGSCSGQSSATPAAPAGPFAGSQGDYGDLQASSYYGAYPGYAPGLYQYPCFHSPRRPYASPLLNGLALPPAHSPTSHWDQPVYTTLTRP

SEQ ID NO: 906418 - protein, 981 aa, Homo sapiens
MGSRARGGAAGPPLKETCCGSRSGTRASAAAAAAAGARVGATARRPRVPERPQGSPGRRPRCASPVRAPPRAAPMLDMSEARSQPPCSPSGTASSMSHVEDSDSDAPPSPAGSEGLGRAGVAVGGARGDPAEAADERFPACIRDAVSQVLKGYDWSLVPMPVRGGGGGALKAKPHVKRPMNAFMVWAQAARRKLADQYPHLHNAELSKTLGKLWRLSAGAPGAGFGTLAAPGLGLRAGAWRAQSSRRWWPHAGSGLCTPGGCQGGSQWKNILWPAGVRRQLWESGSAEGSAWGVHPRGGCALEPVLLAGNTLRRAMAGTPTCPPAVASGPSPGRHARHDSKLHAALWRCSLLRKGSAPLAPGPPMGRECGGGWVGSRFACEYPPRSFSLSWTPSVRSREGRSGDDGVRRVHALAWWGRSVFQKLGLQSEELVAQEQAAPTECPLVGFQMVLLVWGSGSRILLLTWKKGAWSLRICTSCLLSGSRAQPRGAVDGRPLLPQVLPHRRLEVSLGKSPKECVLWLSEDGRLGPARASGCLGMEGQQPSCPPKAGTVPGKPRFCPPPAGSCPPPPPPLESPRGREQQARNRGKKKEEDGRRGACSSLAVVSIPTFPNRRRPVLPEECTAWCHGRLRSARQAGFPGQSLLARPLLPVPPVVCACAEGTVGALAIPASALCCSLLSESEKRPFVEEAERLRVQHKKDHPDYKYQPRRRKSAKAGHSDSDSGAELGPHPGGGAVYKAEAGLGDGHHHGDHTGQTHGPPTPPTTPKTELQQAGAKPELKLEGRRPVDSGRQNIDFSNVDISELSSEVMGTMDAFDVHEFDQYLPLGGPAPPEPGQAYGGAYFHAGASPVWAHKSAPSASASPTETGPPRPHIKTEQPSPGHYGDQPRGSPDYGSCSGQSSATPAAPAGPFAGSQGDYGDLQASSYYGAYPGYAPGLYQYPCFHSPRRPYASPLLNGLALPPAHSPTSHWDQPVYTTLTRP

SEQ ID NO: 906419 - protein, 776 aa, Homo sapiens
MALSSEPAEMPRQFPKLNISEVDEQVRLLAEKVFAKVLREEDSKDALSLFTVPEDCPIGQKEAKERELQKELAEQKSVETAKRKKSFKMIRSQSLSLQMPPQQDWKGPPAASPAMSPTTPVVTGATSLPTPAPYAMPEFQRVTISGDYCAGITLEDYEQAAKSLAKALMIREKYARLAYHRFPRITSQYLGHPRADTAPPEEGLPDFHPPPLPQEDPYCLDDAPPNLDYLVHMQGGILFVYDNKKMLEHQEPHSLPYPDLETYTVDMSHILALITDGPTKTYCHRRLNFLESKFSLHEMLNEMSEFKELKSNPHRDFYNVRKVDTHIHAAACMNQKHLLRFIKHTYQTEPDRTVAEKRGRKITLRQVFDGLHMDPYDLTVDSLDVHAGRQTFHRFDKFNSKYNPVGASELRDLYLKTENYLGGEYFARMVKEVARELEESKYQYSEPRLSIYGRSPEEWPNLAYWFIQHKVYSPNMRWIIQVPRIYDIFRSKKLLPNFGKMLENIFLPLFKATINPQDHRELHLFLKYVTGFDSVDDESKHSDHMFSDKSPNPDVWTSEQNPPYSYYLYYMYANIMVLNNLRRERGLSTFLFRPHCGEAGSITHLVSAFLTADNISHGLLLKKSPVLQYLYYLAQIPIAMSPLSNNSLFLEYSKNPLREFLHKGLHVSLSTDDPMQFHYTKEALMEEYAIAAQVWKLSTCDLCEIARNSVLQSGLSHQEKQKFLGQNYYKEGPEGNDIRKTNVAQIRMAFRYETLCNELSFLSDAMKSEEITALTN

SEQ ID NO: 906420 - protein, 774 aa, Homo sapiens
MEPGSAEMPRQFPKLNISEVDEQVRLLAEKVFAKVLREEDSKDALSLFTVPEDCPIGQKEAKERELQKELAEQKSVETAKRKKSFKMIRSQSLSLQMPPQQDWKGPPAASPAMSPTTPVVTGATSLPTPAPYAMPEFQRVTISGDYCAGITLEDYEQAAKSLAKALMIREKYARLAYHRFPRITSQYLGHPRADTAPPEEGLPDFHPPPLPQEDPYCLDDAPPNLDYLVHMQGGILFVYDNKKMLEHQEPHSLPYPDLETYTVDMSHILALITDGPTKTYCHRRLNFLESKFSLHEMLNEMSEFKELKSNPHRDFYNVRKVDTHIHAAACMNQKHLLRFIKHTYQTEPDRTVAEKRGRKITLRQVFDGLHMDPYDLTVDSLDVHAGRQTFHRFDKFNSKYNPVGASELRDLYLKTENYLGGEYFARMVKEVARELEESKYQYSEPRLSIYGRSPEEWPNLAYWFIQHKVYSPNMRWIIQVPRIYDIFRSKKLLPNFGKMLENIFLPLFKATINPQDHRELHLFLKYVTGFDSVDDESKHSDHMFSDKSPNPDVWTSEQNPPYSYYLYYMYANIMVLNNLRRERGLSTFLFRPHCGEAGSITHLVSAFLTADNISHGLLLKKSPVLQYLYYLAQIPIAMSPLSNNSLFLEYSKNPLREFLHKGLHVSLSTDDPMQFHYTKEALMEEYAIAAQVWKLSTCDLCEIARNSVLQSGLSHQEKQKFLGQNYYKEGPEGNDIRKTNVAQIRMAFRYETLCNELSFLSDAMKSEEITALTN

SEQ ID NO: 906421 - protein, 801 aa, Homo sapiens
SACCLLRTILEAPGRAQGSEVGATHLPPMYDTAEMPRQFPKLNISEVDEQVRLLAEKVFAKVLREEDSKDALSLFTVPEDCPIGQKEAKERELQKELAEQKSVETAKRKKSFKMIRSQSLSLQMPPQQDWKGPPAASPAMSPTTPVVTGATSLPTPAPYAMPEFQRVTISGDYCAGITLEDYEQAAKSLAKALMIREKYARLAYHRFPRITSQYLGHPRADTAPPEEGLPDFHPPPLPQEDPYCLDDAPPNLDYLVHMQGGILFVYDNKKMLEHQEPHSLPYPDLETYTVDMSHILALITDGPTKTYCHRRLNFLESKFSLHEMLNEMSEFKELKSNPHRDFYNVRKVDTHIHAAACMNQKHLLRFIKHTYQTEPDRTVAEKRGRKITLRQVFDGLHMDPYDLTVDSLDVHAGRQTFHRFDKFNSKYNPVGASELRDLYLKTENYLGGEYFARMVKEVARELEESKYQYSEPRLSIYGRSPEEWPNLAYWFIQHKVYSPNMRWIIQVPRIYDIFRSKKLLPNFGKMLENIFLPLFKATINPQDHRELHLFLKYVTGFDSVDDESKHSDHMFSDKSPNPDVWTSEQNPPYSYYLYYMYANIMVLNNLRRERGLSTFLFRPHCGEAGSITHLVSAFLTADNISHGLLLKKSPVLQYLYYLAQIPIAMSPLSNNSLFLEYSKNPLREFLHKGLHVSLSTDDPMQFHYTKEALMEEYAIAAQVWKLSTCDLCEIARNSVLQSGLSHQEKQKFLGQNYYKEGPEGNDIRKTNVAQIRMAFRYETLCNELSFLSDAMKSEEITALTN

SEQ ID NO: 906422 - protein, 829 aa, Homo sapiens
MALSSEPAEMPRQFPKLNISEVDEQVRLLAEKVFAKVLREEDSKDALSLFTVPEDCPIGQKEAKERELQKELAEQKSVETAKRKKSFKMIRSQSLSLQMPPQQDWKGPPAASPAMSPTTPVVTGATSLPTPAPYAMPEFQRVTISGDYCAGITLEDYEQAAKSLAKALMIREKYARLAYHRFPRITSQYLGHPRADTAPPEEGLPDFHPPPLPQEDPYCLDDAPPNLDYLVHMQGGILFVYDNKKMLEHQEPHSLPYPDLETYTVDMSHILALITDGPTKTYCHRRLNFLESKFSLHEMLNEMSEFKELKSNPHRDFYNVRKVDTHIHAAACMNQKHLLRFIKHTYQTEPDRTVAEKRGRKITLRQVFDGLHMDPYDLTVDSLDVHAVSELLLQCRQQTAALAGDSAPWKATMIVLAGRCYGSSFLFYLTERSCGLREYQGRQTFHRFDKFNSKYNPVGASELRDLYLKTENYLGGEYFARMVKEVARELEESKYQYSEPRLSIYGRSPEEWPNLAYWFIQHKVYSPNMRWIIQVPRIYDIFRSKKLLPNFGKMLENIFLPLFKATINPQDHRELHLFLKYVTGFDSVDDESKHSDHMFSDKSPNPDVWTSEQNPPYSYYLYYMYANIMVLNNLRRERGLSTFLFRPHCGEAGSITHLVSAFLTADNISHGLLLKKSPVLQYLYYLAQIPIAMSPLSNNSLFLEYSKNPLREFLHKGLHVSLSTDDPMQFHYTKEALMEEYAIAAQVWKLSTCDLCEIARNSVLQSGLSHQEKQKFLGQNYYKEGPEGNDIRKTNVAQIRMAFRYETLCNELSFLSDAMKSEEITALTN

SEQ ID NO: 906423 - protein, 786 aa, Homo sapiens
MALSSEPAEMPRQFPKLNISEVDEQVRLLAEKVFAKVLREEDSKDALSLFTVPEDCPIGQKEAKERELQKELAEQKSVETAKRKKSFKMIRSQSLSLQMPPQQDWKGPPAASPAMSPTTPVVTGATSLPTPAPYAMPEFQRVTISGDYCAGITLEDYEQAAKSLAKALMIREKYARLAYHRFPRITSQYLGHPRADTAPPEEGLPDFHPPPLPQEDPYCLDDAPPNLDYLVHMQGGILFVYDNKKMLEHQEPHSLPYPDLETYTVDMSHILALITDGPTLDTHIHAAACMNQKHLLRFIKHTYQTEPDRTVAEKRGRKITLRQVFDGLHMDPYDLTVDSLDVHAVSELLLQCRQQTAALAGDSAPWKATMIVLAGRCYGSSFLFYLTERSCGLREEQGRQTFHRFDKFNSKYNPVGASELRDLYLKTENYLGGEYFARMVKEVARELEESKYQYSEPRLSIYGRSPEEWPNLAYWFIQHKVYSPNMRWIIQVPRIYDIFRSKKLLPNFGKMLENIFLPLFKATINPQDHRELHLFLKYVTGFDSVDDESKHSDHMFSDKSPNPDVWTSEQNPPYSYYLYYMYANIMVLNNLRRERGLSTFLFRPHCGEAGSITHLVSAFLTADNISHGLLLKKSPVLQYLYYLAQIPIAMSPLSNNSLFLEYSKNPLREFLHKGLHVSLSTDDPMQFHYTKEALMEEYAIAAQVWKLSTCDLCEIARNSVLQSGLSHQEKQKFLGQNYYKEGPEGNDIRKTNVAQIRMAFRYETLCNELSFLSDAMKSEEITALTN

SEQ ID NO: 906424 - protein, 232 aa, Homo sapiens [sequence omitted]

SEQ ID NO: 906425 - protein, 122 aa, Homo sapiens
QGSWKFSTHISYSRENFQPRLFLLWLTAAHRYAKQRPPTPAGRQDPASCTHALTQLSLLGGRQHLTRVHHLSGIFRTSHGARLRSVSGLLQGESGKSRNQLPSYNEGISVALGFLSGGTVAP

SEQ ID NO: 906426 - protein, 63 aa, Homo sapiens
QNPPYSYYLYYMYANIMVLNNLRRCVRPALAHAWVHVLVHARMHTHAHTHACDPCVRVHLNQH

SEQ ID NO: 906427 - protein, 767 aa, Homo sapiens
MPRQFPKLNISEVDEQVRLLAEKVFAKVLREEDSKDALSLFTVPEDCPIGQKEAKERELQKELAEQKSVETAKRKKSFKMIRSQSLSLQMPPQQDWKGPPAASPAMSPTTPVVTGATSLPTPAPYAMPEFQRVTISGDYCAGITLEDYEQAAKSLAKALMIREKYARLAYHRFPRITSQYLGHPRADTAPPEEGLPDFHPPPLPQEDPYCLDDAPPNLDYLVHMQGGILFVYDNKKMLEHQEPHSLPYPDLETYTVDMSHILALITDGPTKTYCHRRLNFLESKFSLHEMLNEMSEFKELKSNPHRDFYNVRKVDTHIHAAACMNQKHLLRFIKHTYQTEPDRTVAEKRGRKITLRQVFDGLHMDPYDLTVDSLDVHAGRQTFHRFDKFNSKYNPVGASELRDLYLKTENYLGGEYFARMVKEVARELEESKYQYSEPRLSIYGRSPEEWPNLAYWFIQHKVYSPNMRWIIQVPRIYDIFRSKKLLPNFGKMLENIFLPLFKATINPQDHRELHLFLKYVTGFDSVDDESKHSDHMFSDKSPNPDVWTSEQNPPYSYYLYYMYANIMVLNNLRRERGLSTFLFRPHCGEAGSITHLVSAFLTADNISHGLLLKKSPVLQYLYYLAQIPIAMSPLSNNSLFLEYSKNPLREFLHKGLHVSLSTDDPMQFHYTKEALMEEYAIAAQVWKLSTCDLCEIARNSVLQSGLSHQEKQKFLGQNYYKEGPEGNDIRKTNVAQIRMAFRYETLCNELSFLSDAMKSEEITALTN

SEQ ID NO: 906428 - protein, 774 aa, Homo sapiens; identical to SEQ ID NO: 906420

SEQ ID NO: 906429 - protein, 767 aa, Homo sapiens; identical to SEQ ID NO: 906427

SEQ ID NO: 906430 - protein, 589 aa, Homo sapiens
LLCEHLRPVPEPVSEGLAYFHPPPLPQEDPYCLDDAPPNLDYLVHMQGGILFVYDNKKMLEHQEPHSLPYPDLETYTVDMSHILALITDGPTKTYCHRRLNFLESKFSLHEMLNEMSEFKELKSNPHRDFYNVRKVDTHIHAAACMNQKHLLRFIKHTYQTEPDRTVAEKRGRKITLRQVFDGLHMDPYDLTVDSLDVHAGRQTFHRFDKFNSKYNPVGASELRDLYLKTENYLGGEYFARMVKEVARELEESKYQYSEPRLSIYGRSPEEWPNLAYWFIQHKVYSPNMRWIIQVPRIYDIFRSKKLLPNFGKMLENIFLPLFKATINPQDHRELHLFLKYVTGFDSVDDESKHSDHMFSDKSPNPDVWTSEQNPPYSYYLYYMYANIMVLNNLRRERGLSTFLFRPHCGEAGSITHLVSAFLTADNISHGLLLKKSPVLQYLYYLAQIPIAMSPLSNNSLFLEYSKNPLREFLHKGLHVSLSTDDPMQFHYTKEALMEEYAIAAQVWKLSTCDLCEIARNSVLQSGLSHQEKQKFLGQNYYKEGPEGNDIRKTNVAQIRMAFRYETLCNELSFLSDAMKSEEITALTN

SEQ ID NO: 906431 - protein, 276 aa, Homo sapiens [sequence omitted]

SEQ ID NO: 906432 - protein, 438 aa, Homo sapiens
MALSSEPAEMPRQFPKLNISEVDEQVRLLAEKVFAKVLREEDSKDALSLFTVPEDCPIGQKEAKERELQKELAEQKSVETAKRKKSFKMIRSQSLSLQMPPQQDWKGPPAASPAMSPTTPVVTGATSLPTPAPYAMPEFQRVTISGDYCAGITLEDYEQAAKSLAKALMIREKYARLAYHRFPRITSQYLGHPRADTAPPEEGLPDFHPPPLPQEDPYCLDDAPPNLDYLVHMQGGILFVYDNKKMLEHQEPHSLPYPDLETYTVDMSHILALITDGPTKTYCHRRLNFLESKFSLHEMLNEMSEFKELKSNPHRDFYNVRKVDTHIHAAACMNQKHLLRFIKHTYQTEPDRTVAEKRGRKITLRQVFDGLHMDPYDLTVDSLDVHAVSELLLQCRQQTAALAGDSAPWKATMIVLAGRCYGSSFLFYLTERSCGLRE

SEQ ID NO: 906433 - protein, 489 aa, Homo sapiens
MALLFLLPLVMQGVSRAEMGTADLGPSSVPTPTNVTIESYNMNPIVYWEYQIMPQVPVFTVEVKNYGVKNSEWIDACINISHHYCNISDHVGDPSNSLWVRVKARVGQKESAYAKSEEFAVCRDGKIGPPKLDIRKEEKQIMIDIFHPSVFVNGDEQEVDYDPETTCYIRVYNVYVRMNGSEIQYKILTQKEDDCDEIQCQLAIPVSSLNSQYCVSAEGVLHVWGVTTEKSKEVCITIFNSSIKGSLWIPVVAALLLFLVLSLVFICFYIKKINPLKEKSIILPKSLISVVRSATLETKPESKYVSLITSYQPFSLEKEVVCEEPLSPATVPGMHTEDNPGKVEHTEELSSITEVVTTEENIPDVVPGSHLTPIERESSSPLSSNQSEPGSIALNSYHSRNCSESDHSRNGFDTDSSCLESHSSLSDSEFPPNNKGEIKTEGQELITVIKAPTSFGYDKPHVLVDLLVDDSGKESLIGYRPTEDSKEFS

SEQ ID NO: 906434 - protein, 38 aa, Homo sapiens
MRCRRTLLVNVGQRGLKDYNIVFLLYLFLWLDTQILTS

SEQ ID NO: 906435 - protein, 106 aa, Homo sapiens
MALLFLLPLVMQGVSRAEMGTADLGPSSVPTPTNVTIESYNMNPIVYWEYQIMPQVPVFTVEVKNYGLSVTLLFILFIPFLFRSLEIPQLCSFISLPTWQNILNCL

SEQ ID NO: 906436 - protein, 479 aa, Homo sapiens
MLLKSPENSLLQFQFKYGVPTPTNVTIESYNMNPIVYWEYQIMPQVPVFTVEVKNYGVKNSEWIDACINISHHYCNISDHVGDPSNSLWVRVKARVGQKESAYAKSEEFAVCRDGKIGPPKLDIRKEEKQIMIDIFHPSVFVNGDEQEVDYDPETTCYIRVYNVYVRMNGSEIQYKILTQKEDDCDEIQCQLAIPVSSLNSQYCVSAEGVLHVWGVTTEKSKEVCITIFNSSIKGSLWIPVVAALLLFLVLSLVFICFYIKKINPLKEKSIILPKSLISVVRSATLETKPESKYVSLITSYQPFSLEKEVVCEEPLSPATVPGMHTEDNPGKVEHTEELSSITEVVTTEENIPDVVPGSHLTPIERESSSPLSSNQSEPGSIALNSYHSRNCSESDHSRNGFDTDSSCLESHSSLSDSEFPPNNKGEIKTEGQELITVIKAPTSFGYDKPHVLVDLLVDDSGKESLIGYRPTEDSKEFS

SEQ ID NO: 906437 - protein, 586 aa, Homo sapiens
  misc_feature (490)..(492): Xaa can be any naturally occurring amino acid
  misc_feature (494)..(494): Xaa can be any naturally occurring amino acid
  misc_feature (497)..(497): Xaa can be any naturally occurring amino acid
  misc_feature (499)..(499): Xaa can be any naturally occurring amino acid
  misc_feature (501)..(501): Xaa can be any naturally occurring amino acid
  misc_feature (504)..(504): Xaa can be any naturally occurring amino acid
  misc_feature (508)..(508): Xaa can be any naturally occurring amino acid
  misc_feature (512)..(513): Xaa can be any naturally occurring amino acid
  misc_feature (516)..(516): Xaa can be any naturally occurring amino acid
  misc_feature (518)..(518): Xaa can be any naturally occurring amino acid
  misc_feature (520)..(521): Xaa can be any naturally occurring amino acid
  misc_feature (524)..(527): Xaa can be any naturally occurring amino acid
  misc_feature (530)..(530): Xaa can be any naturally occurring amino acid
  misc_feature (532)..(532): Xaa can be any naturally occurring amino acid
  misc_feature (537)..(537): Xaa can be any naturally occurring amino acid
  misc_feature (543)..(543): Xaa can be any naturally occurring amino acid
  misc_feature (545)..(546): Xaa can be any naturally occurring amino acid
  misc_feature (550)..(550): Xaa can be any naturally occurring amino acid
  misc_feature (553)..(554): Xaa can be any naturally occurring amino acid
  misc_feature (558)..(559): Xaa can be any naturally occurring amino acid
  misc_feature (561)..(562): Xaa can be any naturally occurring amino acid
  misc_feature (566)..(566): Xaa can be any naturally occurring amino acid
MALLFLLPLVMQGVSRAEMGTADLGPSSVPTPTNVTIESYNMNPIVYWEYQIMPQVPVFTVEVKNYGVKNSEWIDACINISHHYCNISDHVGDPSNSLWVRVKARVGQKESAYAKSEEFAVCRDGKIGPPKLDIRKEEKQIMIDIFHPSVFVNGDEQEVDYDPETTCYIRVYNVYVRMNGSEIQYKILTQKEDDCDEIQCQLAIPVSSLNSQYCVSAEGVLHVWGVTTEKSKEVCITIFNSSIKGSLWIPVVAALLLFLVLSLVFICFYIKKINPLKEKSIILPKSLISVVRSATLETKPESKYVSLITSYQPFSLEKEVVCEEPLSPATVPGMHTEDNPGKVEHTEELSSITEVVTTEENIPDVVPGSHLTPIERESSSPLSSNQSEPGSIALNSYHSRNCSESDHSRNGFDTDSSCLESHSSLSDSEFPPNNKGEIKTEGQELITVIKAPTSFGYDKPHVLVDLLVDDSGKESLIGYRPTEDSKDPHXXXPXAPXPXPXPPXPPPXPTPXXDHXPXNXXPAXXXXMEXPXAHESXKRTRGXPXXGLQXTDXXSPPXXKXXATHXPSHPDRLPVTEQYPVLLVPR

SEQ ID NO: 906438 - protein, 189 aa, Homo sapiens
MALLFLLPLVMQGVSRAEMGTADLGPSSVPTPTNVTIESYNMNPIVYWEYQIMPQVPVFTVEVKNYGVKNSEWIDACINISHHYCNISDHVGDPSNSLWVRVKARVGQKESAYAKSEEFAVCRDGKIGPPKLDIRKEEKQIMIDIFHPSVFVNGDEQEVDYDPETTCYIRVYNVYVRMNGSEVCVSHFS

SEQ ID NO: 906439 - protein, 152 aa, Homo sapiens
MVKARVGQKESAYAKSEEFAVCRDGKIGPPKLDIRKEEKQIMIDIFHPSVFVNGDEQEVDYDPETTCYIRVYNVYVRMNGSEIQYKILTQKEDDCDEIQCQLAIPVSSLNSQYCVSAEGVLHVWGVTTEKSKEVCITIFNSSIKGKFLPFFF

SEQ ID NO: 906440 - protein, 471 aa, Homo sapiens
MALLFLLPLVMQGVSRAEMGTADLGPSSVPTPTNVTIESYNMNPIVYWEYQIMPQVPVFTVEVKNYGVKNSEWIDACINISHHYCNISDHVGDPSNSLWVRVKARVGQKESAYAKSEEFAVCRDGKIGPPKLDIRKEEKQIMIDIFHPSVFVNGDEQEVDYDPETTCYIRVYNVYVRMNGSEIQYKILTQKEDDCDEIQCQLAIPVSSLNSQYCVSAEGVLHVWGVTTEKSKEVCITIFNSSIKGSLWIPVVAALLLFLVLSLVFICFYIKKINPLKEKSIILPKSLISVVRSATLETKPESKYVSLITSYQPFSLEKEVVCEEPLSPATVPGMHTEDNPGKVEHTEELSSITEVVTTEGSSPLSSNQSEPGSIALNSYHSRNCSESDHSRNGFDTDSSCLESHSSLSDSEFPPNNKGEIKTEGQELITVIKAPTSFGYDKPHVLVDLLVDDSGKESLIGYRPTEDSKEFS

SEQ ID NO: 906441 - protein, 156 aa, Homo sapiens
MHTEDNPGKVEHTEELSSITEVVTTEENIPDVVPGSHLTPIERESSSPLSSNQSEPGSIALNSYHSRNCSESDHSRNGFDTDSSCLESHSSLSDSEFPPNNKGEIKTEGQELITVIKAPTSFGYDKPHVLVDLLVDDSGKESLIGYRPTEDSKEFS

SEQ ID NO: 906442 - protein, 252 aa, Homo sapiens
MALLFLLPLVMQGVSRAEMGTADLGPSSVPTPTNVTIESYNMNPIVYWEYQIMPQVPVFTVEVKNYGVKNSEWIDACINISHHYCNISDHVGDPSNSLWVRVKARVGQKESAYAKSEEFAVCRDGKIGPPKLDIRKEEKQIMIDIFHPSVFVNGDEQEVDYDPETTCYIRVYNVYVRMNGSEIQYKILTQKEDDCDEIQCQLAIPVSSLNSQYCVSAEGVLHVWGVTTEKSKEVCITIFNSSIKGKFLPFFF

SEQ ID NO: 906443 - protein, 120 aa, Homo sapiens
MTTPRNSVNGTFPAEPMKGPIAMQSGPKPLFRRMSSLVGPTQSFFMRESKTLGAVQIMNGLFHIALGGLLMIPAGIYAPICVTVWYPLWGGIMYIISGSLLAATEKNSRKCLASNHMSFF

SEQ ID NO: 906444 - protein, 297 aa, Homo sapiens
MTTPRNSVNGTFPAEPMKGPIAMQSGPKPLFRRMSSLVGPTQSFFMRESKTLGAVQIMNGLFHIALGGLLMIPAGIYAPICVTVWYPLWGGIMYIISGSLLAATEKNSRKCLVKGKMIMNSLSLFAAISGMILSIMDILNIKISHFLKMESLNFIRAHTPYINIYNCEPANPSEKNSPSTQYCYSIQSLFLGILSVMLIFAFFQELVIAGIVENEWKRTCSRPKSNIVLLSAEEKKEQTIEIKEEVVGLTETSSQPKNEEDIEIIPIQEEEEEETETNFPEPPQDQESSPIENDSSP

SEQ ID NO: 906445 - protein, 275 aa, Homo sapiens
MQSGPKPLFRRMSSLVGPTQSFFMRESKTLGAVQIMNGLFHIALGGLLMIPAGIYAPICVTVWYPLWGGIMYIISGSLLAATEKNSRKCLVKGKMIMNSLSLFAAISGMILSIMDILNIKISHFLKMESLNFIRAHTPYINIYNCEPANPSEKNSPSTQYCYSIQSLFLGILSVMLIFAFFQELVIAGIVENEWKRTCSRPKSNIVLLSAEEKKEQTIEIKEEVVGLTETSSQPKNEEDIEIIPIQEEEEEETETNFPEPPQDQESSPIENDSSP

SEQ ID NO: 906446 - protein, 203 aa, Homo sapiens
MFSKGKSNPINKSVSPFQVKGKMIMNSLSLFAAISGMILSIMDILNIKISHFLKMESLNFIRAHTPYINIYNCEPANPSEKNSPSTQYCYSIQSLFLGILSVMLIFAFFQELVIAGIVENEWKRTCSRPKSNIVLLSAEEKKEQTIEIKEEVVGLTETSSQPKNEEDIEIIPIQEEEEEETETNFPEPPQDQESSPIENDSSP

SEQ ID NO: 906447 - protein, 297 aa, Homo sapiens; identical to SEQ ID NO: 906444

SEQ ID NO: 906448 - protein, 297 aa, Homo sapiens; identical to SEQ ID NO: 906444

SEQ ID NO: 906449 - protein, 297 aa, Homo sapiens; identical to SEQ ID NO: 906444

SEQ ID NO: 906450 - protein, 124 aa, Homo sapiens
MFFVPLLHFHLHSSVVFQGILSVMLIFAFFQELVIAGIVENEWKRTCSRPKSNIVLLSAEEKKEQTIEIKEEVVGLTETSSQPKNEEDIEIIPIQEEEEEETETNFPEPPQDQESSPIENDSSP

SEQ ID NO: 906451 - protein, 613 aa, Homo sapiens
MRAPGALLARMSRLLLLLLLKVSASSALGVAPASRNETCLGESCAPTVIQRRGRDAWGPGNSARDVLRARAPREEQGAAFLAGPSWDLPAAPGRDPAAGRGAEASAAGPPGPPTRPPGPWRWKGARGQEPSETLGRGNPTALQLFLQISEEEEKGPRGAGISGRSQEQSVKTVPGASDLFYWPRRAGKLQGSHHKPLSKTANGLAGHEGWTIALPGRALAQNGSLGEGIHEPGGPRRGNSTNRRVRLKNPFYPLTQESYGAYAVMCLSVVIFGTGIIGNLAVMCIVCHNYYMRSISNSLLANLAFWDFLIIFFCLPLVIFHELTKKWLLEDFSCKIVPYIEVASLGVTTFTLCALCIDRFRAATNVQMYYEMIENCSSTTAKLAVIWVGALLLALPEVVLRQLSKEDLGFSGRAPAERCIIKISPDLPDTIYVLALTYDSARLWWYFGCYFCLPTLFTITCSLVTARKIRKAEKACTRGNKRQIQLESQMNCTVVALTILYGFCIIPENICNIVTAYMATGVSQQTMDLLNIISQFLLFFKSCVTPVLLFCLCKPFSRAFMECCCCCCEECIQKSSTVTSDDNDNEYTTELELSPFSTIRREMSTFASVGTHC

SEQ ID NO: 906452 - protein, 595 aa, Homo sapiens
MRAPGALLARMSRLLLLLLLKVSASSALGVAPASRNETCLGESCAPTVIQRRGRDAWGPGNSARDVLRARAPREEQGAAFLAGPSWDLPAAPGRDPAAGRGAEASAAGPPGPPTRPPGPWRWKGARGQEPSETLGRGNPTALQLFLQISEEEEKGPRGAGISGRSQEQSVKTVPGASDLFYWPRRAGKLQGSHHKPLSKTANGLAGHEGWTIALPGRALAQNGSLGEGIHEPGGPRRGNSTNRRVRLKNPFYPLTQESYGAYAVMCLSVVIFGTGIIGNLAVMCIVCHNYYMRSISNSLLANLAFWDFLIIFFCLPLVIFHELTKKWLLEDFSCKIVPYIEVASLGVTTFTLCALCIDRFRAATNVQMYYEMIENCSSTTAKLAVIWVGALLLALPEVVLRQLSKEDLGFSGRAPAERCIIKISPDLPDTIYVLALTYDSARLWWYFGCYFCLPTLFTITCSLVTARKIRKAEKACTRGNKRQIQLESQMNCTVVALTILYGFCIIQTMDLLNIISQFLLFFKSCVTPVLLFCLCKPFSRAFMECCCCCCEECIQKSSTVTSDDNDNEYTTELELSPFSTIRREMSTFASVGTHC

SEQ ID NO: 906453 - protein, 613 aa, Homo sapiens; identical to SEQ ID NO: 906451

SEQ ID NO: 906454 - protein, 268 aa, Homo sapiens
AQLPMPHSGKLFSLSLSFLFIHIFFYSFANLHLFPSALIFRGTPGINVFYVPPQVASLGVTTFTLCALCIDRFRAATNVQMYYEMIENCSSTTAKLAVIWVGALLLALPEVVLRQLSKEDLGFSGRAPAERCIIKISPDLPDTIYVLALTYDSARLWWYFGCYFCLPTLFTITCSLVTARKIRKAEKACTRGNKRQIQLESQMNCTVVALTILYGFCIIPENICNIVTAYMATGVSQQTMDLLNIISQFLLFFKSCVTPVLLFCLCKP

SEQ ID NO: 906455 - protein, 137 aa, Homo sapiens
GDNRCFLFSICPSMAVYTHTGYNDHYMYLNHGQQTIPNGLGMGGQHNYFGLWVDVDFGKGHSRAKPTCTTYNSPQLSAQENFQFDKMEVWAVGDPSEEQLAKGNKSILDADPEAQALLEISGHSRHSEGLREVPDDE

SEQ ID NO: 906456 - protein, 137 aa, Homo sapiens; identical to SEQ ID NO: 906455

SEQ ID NO: 906457 - protein, 785 aa, Homo sapiens
ASRPPPRPTAAARAPALGYKMAALSGGGGGGAEPGQALFNGDMEPEAGAGRPAASSAADPAIPEEVWNIKQMIKLTQEHIEALLDKFGGEHNPPSIYLEAYEEYTSKLDALQQREQQLLESLGNGTDFSVSSSASMDTVTSSSSSSLSVLPSSLSVFQNPTDVARSNPKSPQKPIVRVFLPNKQRTVVPARCGVTVRDSLKKALMMRGLIPECCAVYRIQDGEKKPIGWDTDISWLTGEELHVEVLENVPLTTHNFVRKTFFTLAFCDFCRKLLFQGFRCQTCGYKFHQRCSTEVPLMCVNYDQLDLLFVSKFFEHHPIPQEEASLAETALTSGSSPSAPASDSIGPQILTSPSPSKSIPIPQPFRPADEDHRNQFGQRDRSSSAPNVHINTIEPVNIDDLIRDQGFRGDGGSTTGLSATPPASLPGSLTNVKALQKSPGPQRERKSSSSSEDRNRMKTLGRRDSSDDWEIPDGQITVGQRIGSGSFGTVYKGKWHGDVAVKMLNVTAPTPQQLQAFKNEVGVLRKTRHVNILLFMGYSTKPQLAIVTQWCEGSSLYHHLHIIETKFEMIKLIDIARQTAQGMDYLHAKSIIHRDLKSNNIFLHEDLTVKIGDFGLATVKSRWSGSHQFEQLSGSILWMAPEVIRMQDKNPYSFQSDVYAFGIVLYELMTGQLPYSNINNRDQIIFMVGRGYLSPDLSKVRSNCPKAMKRLMAECLKKKRDERPLFPQILASIELLARSLPKIHRSASEPSLNRAGFQTEDFSLYACASPKTPIQAGGYGAFPVH

SEQ ID NO: 906458 - protein, 785 aa, Homo sapiens; identical to SEQ ID NO: 906457

SEQ ID NO: 906459 - protein, 594 aa, Homo sapiens
FQEKGKACGLKPVNLSAGQAFHLPLTGQTLSGSTYLNCVFFWFFVFSSSTPGSGERTFHLQHTTVVRKTFFTLAFCDFCRKLLFQGFRCQTCGYKFHQRCSTEVPLMCVNYDQLDLLFVSKFFEHHPIPQEEASLAETALTSGSSPSAPASDSIGPQILTSPSPSKSIPIPQPFRPADEDHRNQFGQRDRSSSAPNVHINTIEPVNIDDLIRDQGFRGDGGSTTGLSATPPASLPGSLTNVKALQKSPGPQRERKSSSSSEDRNRMKTLGRRDSSDDWEIPDGQITVGQRIGSGSFGTVYKGKWHGDVAVKMLNVTAPTPQQLQAFKNEVGVLRKTRHVNILLFMGYSTKPQLAIVTQWCEGSSLYHHLHIIETKFEMIKLIDIARQTAQGMDYLHAKSIIHRDLKSNNIFLHEDLTVKIGDFGLATVKSRWSGSHQFEQLSGSILWMAPEVIRMQDKNPYSFQSDVYAFGIVLYELMTGQLPYSNINNRDQIIFMVGRGYLSPDLSKVRSNCPKAMKRLMAECLKKKRDERPLFPQILASIELLARSLPKIHRSASEPSLNRAGFQTEDFSLYACASPKTPIQAGGYGAFPVH

SEQ ID NO: 906460 - protein, 786 aa, Homo sapiens
ASRPPPRPTAAARAPALGYKMAALSGGGGGGAEPGQALFNGDMEPEAGAGRPAASSAADPAIPEEVWNIKQMIKLTQEHIEALLDKFGGEHNPPSIYLEAYEEYTSKLDALQQREQQLLESLGNGTDFSVSSSASMDTVTSSSSSSLSVLPSSLSVFQNPTDVARSNPKSPQKPIVRVFLPNKQRTVVPARCGVTVRDSLKKALMMRGLIPECCAVYRIQDGEKKPIGWDTDISWLTGEELHVEVLENVPLTTHNFVRKTFFTLAFCDFCRKLLFQGFRCQTCGYKFHQRCSTEVPLMCVNYDQLDLLFVSKFFEHHPIPQEEASLAETALTSGSSPSAPASDSIGPQILTSPSPSKSIPIPQPFRPADEDHRNQFGQRDRSSSAPNVHINTIEPVNIDDLIRDQGFRGDGGSTTGLSATPPASLPGSLTNVKALQKSPGPQRERKSSSSSEDRNRMKTLGRRDSSDDWEIPDGQITVGQRIGSGSFGTVYKGKWHGDVAVKMLNVTAPTPQQLQAFKNEVGVLRKTRHVNILLFMGYSTKPQLAIVTQWCEGSSLYHHLHIIETKFEMIKLIDIARQTAQGMDYLHAKSIIHRDLKSNNIFLHEDLTVKIGDFGLATVKSRWSGSHQFEQLSGSILWMAPEVIRMQDKNPYSFQSDVYAFGIVLYELMTGQLPYSNINNRDQIIFMVGRGYLSPDLSKVRSNCPKAMKRLMAECLKKKRDERPLFPQILASIELLARSLPKIHRSASEPSLNRAGFQTEDFSLYACASPKTPIQAGGYGEFAAFK

SEQ ID NO: 906461 - protein, 717 aa, Homo sapiens
ASRPPPRPTAAARAPALGYKMAALSGGGGGGAEPGQALFNGDMEPEAGAGRPAASSAADPAIPEEVWNIKQMIKLTQEHIEALLDKFGGEHNPPSIYLEAYEEYTSKLDALQQREQQLLESLGNGTDFSVSSSASMDTVTSSSSSSLSVLPSSLSVFQNPTDVARSNPKSPQKPIVRVFLPNKQRTVVPARCGVTVRDSLKKALMMRGLIPECCAVYRIQDGEKKPIGWDTDISWLTGEELHVEVLENVPLTTHNFVRKTFFTLAFCDFCRKLLFQGFRCQTCGYKFHQRCSTEVPLMCVNYDQLDLLFVSKFFEHHPIPQEEASLAETALTSGSSPSAPASDSIGPQILTSPSPSKSIPIPQPFRPADEDHRNQFGQRDRSSSAPNVHINTIEPVNIDDLIRDQGFRGDGGSTTGLSATPPASLPGSLTNVKALQKSPGPQRERKSSSSSEDRNRMKTLGRRDSSDDWEIPDGQITVGQRIGSGSFGTVYKGKWHGDVAVKMLNVTAPTPQQLQAFKNEVGVLRKTRHVNILLFMGYSTKPQLAIVTQWCEGSSLYHHLHIIETKFEMIKLIDIARQTAQGMDYLHAKSIIHRDLKSNNIFLHEDLTVKIGDFGLATVKSRWSGSHQFEQLSGSILWMAPEVIRMQDKNPYSFQSDVYAFGIVLYELMTGQLPYSNINNRDQASPSPYVRIIDDQLRATAISIDSRAYSQSELDLD

SEQ ID NO: 906462 - protein, 239 aa, Homo sapiens
EALGQILTSPSLQNPFQFHSPSDQQMKIIEINLGNETDPHQLPNVHMNTIEPVNIDVPARCGVTVRDSLKKALMMRGLIPECCAVYRIQDGEKKPIGWDTDISWLTGEELHVEVLENVPLTTHNFVRKTFFTLAFCDFCRKLLFQGFRCQTCGYKFHQRCSTEVPLMCVNYDQLDLLFVSKFFEHHPIPQEEASLAETALTSGSSPSAPASDSIGPKFSPVVSSNHSFPAFDRNKYESL

SEQ ID NO: 906463 - protein, 786 aa, Homo sapiens; identical to SEQ ID NO: 906460

SEQ ID NO: 906464 - protein, 693 aa, Homo sapiens
ASRPPPRPTAAARAPALGYKMAALSGGGGGGAEPGQALFNGDMEPEAGAGRPAASSAADPAIPEEVWNIKQMIKLTQEHIEALLDKFGGEHNPPSIYLEAYEEYTSKLDALQQREQQLLESLGNGTDFSVSSSASMDTVTSSSSSSLSVLPSSLSVFQNPTDVARSNPKSPQKPIVRVFLPNKQRTVVPARCGVTVRDSLKKALMMRGLIPECCAVYRIQDGEKKPIGWDTDISWLTGEELHVEVLENVPLTTHNFVRKTFFTLAFCDFCRKLLFQGFRCQTCGYKFHQRCSTEVPLMCVNYDQLDLLFVSKFFEHHPIPQEEASLAETALTSGSSPSAPASDSIGPQILTSPSPSKSIPIPQPFRPADEDHRNQFGQRDRSSSAPNVHINTIEPVNIDDLIRDQGFRGDGGSTTGLSATPPASLPGSLTNVKALQKSPGPQRERKSSSSSEDRNRMKTLGRRDSSDDWEIPDGQITVGQRIGSGSFGTVYKGKWHGDVAVKMLNVTAPTPQQLQAFKNEVGVLRKTRHVNILLFMGYSTKPQLAIVTQWCEGSSLYHHLHIIETKFEMIKLIDIARQTAQGMDYLHAKSIIHRDLKSNNIFLHEDLTVKIGDFGLATVKSRWSGSHQFEQLSGSILWMAPEVIRMQDKNPYSFQSDVYAFGIVLYELMTGQLPYSNINNRDQVLCPPWEYNK

SEQ ID NO: 906465 - protein, 228 aa, Homo sapiens
ASRPPPRPTAAARAPALGYKMAALSGGGGGGAEPGQALFNGDMEPEAGAGRPAASSAADPAIPEEVWNIKQMIKLTQEHIEALLDKFGGEHNPPSIYLEAYEEYTSKLDALQQREQQLLESLGNGTDFSVSSSASMDTVTSSSSSSLSVLPSSLSVFQNPTDVARSNPKSPQKPIVRVFLPNKQRTVVPARCGVTVRDSLKKALMMRGLIPECCAVYRIQDGYGLYVT

SEQ ID NO: 906466 - protein, 562 aa, Homo sapiens
MRPEPGGCCCRRTVRANGCVANGEVRNGYVRSSAAAAAAAAAGQIHHVTQNGGLYKRPFNEAFEETPMLVAVLTYVGYGVLTLFGYLRDFLRYWRIEKCHHATEREEQKDFVSLYQDFENFYTRNLYMRIRDNWNRPICSVPGARVDIMERQSHDYNWSFKYTGNIIKGVINMGSYNYLGFARNTGSCQEAAAKVLEEYGAGVCSTRQEIGNLDKHEELEELVARFLGVEAAMAYGMGFATNSMNIPALVGKGCLILSDELNHASLVLGARLSGATIRIFKHNNMQSLEKLLKDAIVYGQPRTRRPWKKILILVEGIYSMEGSIVRLPEVIALKKKYKAYLYLDEAHSIGALGPTGRGVVEYFGLDPEDVDVMMGTFTKSFGASGGYIGGKKELIDYLRTHSHSAVYATSLSPPVVEQIITSMKCIMGQDGTSLGKECVQQLAENTRYFRRRLKEMGFIIYGNEDSPVVPLMLYMPAKIGAFGREMLKRNIGVVVVGFPATPIIESRARFCLSAAHTKEILDTALKEIDEVGDLLQLKYSRHRLVPLLDRPFDETTYEETED

SEQ ID NO: 906467 - protein, 1351 aa, Homo sapiens
MNAEFSFILDVLSQLNLALGLGSACLHIFYFFLRNSEHIDLFPKLTFSILTVSYYNQVKGLLSESFILPDQRTNLKITILKLFFQLNQSLSEEDFWHIIPRISLSFCIHQVLQEKDWEQNGKTVYESHVTGRVRWLTPVILALWEAEAGGSLEAGIQDQPGQHGETPSLLKRQKISWAWWRAPIIPPTWRLRQENRLNPGGGGCSETRLCHCTLAWVTEQNCVSKKKKSCYTFKFLKLLLLSVKILNPNSPGCVVISCDMFVHITYSRGCKQYYCLCSFVFNVLSMSYVESLSASENFNKPLRYSKVLFYFFKEQKKMNERTKERCRDYIYMYRLKYRRRLWYLNRSPIKSNTLSTFSAHLVSYHRIPLEYHIAFALQLLFTNVNVGFVKVTNLEAMNLPASLFILACMKSLQIQMSVPAFKIYLYHFVGTKLFQDKCNFVTSLFGRDKSPVIYAGPLYFLKNKMLCRHYTWLVVSSGNCNVNLGSSHILGIIIYPSTWRNTSIYKYQSLRISRFEAYKSSFLHSLTRPDVKTLIGFKQIPVNHDYQNSSSESIDRGVTSPSALFLIPLFIQHCCYLFQVYKTSFSRSHQKPGNAELGDVKSPYEELDQAAVAVSPRIFFFLSFNLAGHGLYSTFSTFCFALDKKSLPLKKASSLHNPQSTAYLFEESSHRSALVTIVNIHDRARILKQDSCFCSHQGEQKHPTQPLRALCLCHASSNTKELNMLPVICLRNAFFLYLAFLSFCTFKFLIFKIPTLEKTNIMVVLGFEDSISDALVLFVHLALHFRRRLFIEGLKLAPLAFKKNFFSNFFITSGSLHLNFSTSSAQLNFLVCNTLCFLLIGENQGDEWLPWRDFLISQGGKEVMTFTTTFMFFPFFQIDKDFWFLVIRDWATVQNCQSCRRPGRKNVSNCCFARICRVMGSCCLKHCYDLIPRYLSSLGVLGKPMSFNLYLLYTVCLEKEVRVVVFLQTVHIHEDYELLGQPGQDRPCLYKNFFLNKPGMVVPACSPTCVGESLEPGRSRLQGAMIAPLHSSLGDRVRPWLNKRGKKKLLGAGCGCSLQSQLLERLRPEDCLNPEFERSLGNTARPHLRKKCFLISLAQRGCEWGGIKSKDYFLATEAKNLQGFFFSVPEPTDTLLLASRGCSVPSSHLNTLNQFKKYLPCGEKHVFFSPQLYPHEMCAHGWAQWLMPVIPTLWEAEAGRLLEARSSRTVWPTWRNLISTKITKIEPGMVAHACNPSYVRRLRHRNCLNPRGRGCNEPRSHHCTPALATEGDSVSKKKKKGGAQAPSHCHVPSQRAKLEGWLPYHTEYMLVLANDPFAFNVIENTVVPFVISSDICFLSSSFLGRKPKGLG

SEQ ID NO: 906468 - protein, 1346 aa, Homo sapiens
MLGLLEANPLKYYSSECKFSFILDVLSQLNLASGARVCLSTYFLFFSGNSEHIDLFPKLTFSILTVFYYNQVKGLLSESFILPDQRTNLKITILKLFFQLNQSLSEEDFWHIIPRISLSFCIHQVLQEKDWEQNGKTVYESHVTGRVRWLTPVILALWEAEAGGSLEAGIQDQPGQHGETPSLLKRQKISWAWWRAPIIPPTWRLRQENRLNPGGGGCSETRLCHCTLAWVTEQNCVSKKKKSCYTFKFLKLLLLSVKILNPNSPGCVVISCDMFVHITYSRGCKQYYCLGSFVFNVLSMSYVESLSASENFNKPLRYSKVLFYFFKEQKKMNERTKEDAETIFSMYRLKYRRRLWYLNRSPIKSNTLSTFSAHLVSYHRIPLEYHIAFALQLLFTNVNVGFVKVTNLEAMNLPASLFILACMKSLQIQMSVPAFKIYLYHFVGTKLFQDKCNFVTSLFGRDKSPVIYAGPLYFLKNKMLCRHYTWLVVSSGNCNVNLGSSHILGIIIYPSTWRNTSIYKYQSLRISRFEAYKSSFLHSLTRPDFKTLIGFKQIPVNHDYQNSSSESIDRGVTSPSALFLIPLFIQHCCYLFQVYKTSFSRSHQKPGNAELGDVKSPYEELDQAAVAVSPRIFFFLSFNLAGHGLYSTFSTFCFALDKKSLPLKKASSLHNPQSTAYLFEESSHRSALVTIVNIHDRARILKQDSCFCSHQGEQKHPTQPLRALCLCHASSNTKELNMLPVICLRNAFFLYLAFLSFCTFKFLIFKIPTLEKTNIMVVLGFEDSISDALVLFVHLALHFRRRLFIEGLKLAPLAFKKNFFSNFFITSGSLHLNFSTSSAYLNFLVCNTLCFLLIGENQGDEWLPWRDFLISQGGKEVMTFTTTFMFFPFFQIDKDFWFLVIRDWATVQNCQSCRRPGRKNVSNCCFARICRVMGSCCLKHCYDLIPKVSFLSWFLGKPMSFNLYLLYTVCLEKEVRVVVFLQTVHIHEDYELLGQPGQDRPCLYKNFFLNNRAWWCLPVVPPVWENHLSLGGQGCSEAMIAPLHSSLGDRVRPWLNKRGKKKLLGAGCGCSLQSQLLERLRPEDCLNPEFERSLGNTARPHLRKKCFLISLAQRGCEWGGIKSKDYFLATKPRTYRDFFFQSQNLTDTLLLASRGCSVPSSHLNTLNQFKKYLPCGEKHVFFSPQLYPHEMCAHGWAQWLMPVIPTLWEAEAGRLLEARSSRTVWPTWRNLISTKITKIEPGMVAHACNPSYVRRLRHRNCLNPRGRGCNEPRSHHCTPALATEGDSVSKKKKKGVPRPLAIAMAQPESQIRGLASLSHRINASAEPMIPLLLMYRKYCCSFCHFQ

SEQ ID NO: 906469 - protein, 470 aa, Homo sapiens
MRPEPGGCCCRRTVRANGCVANGEVRNGYVRSSAAAAAAAAAGQIHHVTQNGGLYKRPFNEAFEETPMLVAVLTYVGYGVLTLFGYLRDFLRYWRIEKCHHATEREEQKDFVSLYQDFENFYTRNLYMRIRDNWNRPICSVPGARVDIMERQSHDYNWSFKYTGNIIKGVINMGSYNYLGFARNTGSCQEAAAKVLEEYGAGVCSTRQEIGNLDKHEELEELVARFLGVEAAMAYGMGFATNSMNIPALVGKGCLILSDELNHASLVLGARLSGATIRIFKHNNMQSLEKLLKDAIVYGQPRTRRPWKKILILVEGIYSMEGSIVRLPEVIALKKKYKAYLYLDEAHSIGALGPTGRGVVEYFGLDPEDVDVMMGTFTKSFGASGGYIGGKKELIDYLRTHSHSAVYATSLSPPVVEQIITSMKCIMGQDGTSLGNGITIHEVVQTRNTYHRFSPLSPVFSHQCLWIMLP

SEQ ID NO: 906470 - protein, 305 aa, Homo sapiens
MRPEPGGCCCRRTVRANGCVANGEVRNGYVRSSAAAAAAAAAGQIHHVTQNGGLYKRPFNEAFEETPMLVAVLTYVGYGVLTLFGYLRDFLRYWRIEKCHHATEREEQKDFVSLYQDFENFYTRNLYMRIRDNWNRPICSVPGARVDIMERQSHDYNWSFKYTGNIIKGVINMGSYNYLGFARNTGSCQEAAAKVLEEYGAGVCSTRQEIGNLDKHEELEELVARFLGVEAAMAYGMGFATNSMNIPALVGKGCLILSDELNHASLVLGARLSGATIRIFKHNNTRSLEKLLEDATPIMESRAMS

SEQ ID NO: 906471 - protein, 1351 aa, Homo sapiens; identical to SEQ ID NO: 906467

SEQ ID NO: 906472 - protein, 562 aa, Homo sapiens; identical to SEQ ID NO: 906466

SEQ ID NO: 906473 - protein, 549 aa, Homo sapiens
MRPEPGGCCCRRTVRANGCVANGEVRNGYVRSSAAAAAAAAAGQIHHVTQNGGLYKRPFNEAFEETPMLVAVLTYVGYGVLTLFGYLRDFLRYWRIEKCHHATEREEQKDFVSLYQDFENFYTRNLYMRIRDNWNRPICSVPGARVDIMERQSHDYNWSFKYTGNIIKGVINMGSYNYLGFARNTGSCQEAAAKVLEEYGAGVCSTRQEIGNLDKHEELEELVARFLGVEAAMAYGMGFATNSMNIPALVGKGCLILSDELNHASLVLGARLSGATIRIFKHNNMQSLEKLLKDAIVYGQPRTRRPWKKILILVEGIYSMEGSIVRLPEVIALKKKYKAYLYLDEAHSIGALGPTGRGVVEYFGLDPEDVDVMMGTFTKSFGASGGYIGGKKELIDYLRTHSHSAVYATSLSPPVVEQIITSMKCIMGQDGTSLGKECVQQLAENTRYFRRRLKEMGFIIYGNEDSPVVPLMLYMPAKIGAFGREMLKRNIGVVVVGFPATPIIESRARFCLSAAHTKEILDTALKEIDEVGDLLQLKYSRRLVKGPVQ

SEQ ID NO: 906474 - protein, 161 aa, Homo sapiens
MRPEPGGCCCRRTVRANGCVANGEVRNGYVRSSAAAAAAAAAGQIHHVTQNGGLYKRPFNEAFEETPMLVAVLTYVGYGVLTLFGYLRDFLRYWRIEKCHHATEREEQKDFVSLYQDFENFYTRNLYMRIRDNWNRPICSVPGARVDIMERQSHDYNWSFK

SEQ ID NO: 906475 - protein, 490 aa, Homo sapiens
MEPFVVLVLCLSFMLLFSLWRQSCRRRKLPPGPTPLPIIGNMLQIDVKDICKSFTNFSKVYGPVFTVYFGMNPIVVFHGYEAVKEALIDNGEEFSGRGNSPISQRITKGLGIISSNGKRWKEIRRFSLTTLRNFGMGKRSIEDRVQEEAHCLVEELRKTKASPCDPTFILGCAPCNVICSVVFQKRFDYKDQNFLTLMKRFNENFRILNSPWIQVCNNFPLLIDCFPGTHNKVLKNVALTRSYIREKVKEHQASLDVNNPRDFIDCFLIKMEQEKDNQKSEFNIENLVGTVADLFVAGTETTSTTLRYGLLLLLKHPEVTAKVQEEIDHVIGRHRSPCMQDRSHMPYTDAVVHEIQRYSDLVPTGVPHAVTTDTKFRNYLIPKGTTIMALLTSVLHDDKEFPNPNIFDPGHFLDKNGNFKKSDYFMPFSAGKRICAGEGLARMELFLFLTTILQNFNLKSVDDLKNLNTTAVTKGIVSLPPSYQICFIPV

SEQ ID NO: 906476 - protein, 393 aa, Homo sapiens
MEPFVVLVLCLSFMLLFSLWRQSCRRRKLPPGPTPLPIIGNMLQIDVKDICKSFTNFSKVYGPVFTVYFGMNPIVVFHGYEAVKEALIDNGEEFSGRGNSPISQRITKGLGIISSNGKRWKEIRRFSLTTLRNFGMGKRSIEDRVQEEAHCLVEELRKTKASPCDPTFILGCAPCNVICSVVFQKRFDYKDQNFLTLMKRFNENFRILNSPWIQVCNNFPLLIDCFPGTHNKVLKNVALTRSYIREKVKEHQASLDVNNPRDFIDCFLIKMEQEKDNQKSEFNIENLVGTVADLFVAGTETTSTTLRYGLLLLLKHPEVTAKVQEEIDHVIGRHRSPCMQDRSHMPYTDAVVHEIQRYSDLVPTGVPHAVTTDTKFRNYLIPKSFDNKIMLAA

SEQ ID NO: 906477 - protein, 174 aa, Homo sapiens
MEPFVVLVLCLSFMLLFSLWRQSCRRRKLPPGPTPLPIIGNMLQIDVKDICKSFTNFSKVYGPVFTVYFGMNPIVVFHGYEAVKEALIDNGEEFSGRGNSPISQRITKGLGIISSNGKRWKEIRRFSLTTLRNFGMGKRSIEDRVQEEAHCLVEELRKTKEWEPVRWFSETIDF

SEQ ID NO: 906478 - protein, 454 aa, Homo sapiens
MEPFVVLVLCLSFMLLFSLWRQSCRRRKLPPGPTPLPIIGNMLQIDVKDICKSFTNFSKVYGPVFTVYFGMNPIVVFHGYEAVKEALIDNGEEFSGRGNSPISQRITKGLGIISSNGKRWKEIRRFSLTTLRNFGMGKRSIEDRVQEEAHCLVEELRKTKASPCDPTFILGCAPCNVICSVVFQKRFDYKDQNFLTLMKRFNENFRILNSPWIQVCNNFPLLIDCFPGTHNKVLKNVALTRSYIREKVKEHQASLDVNNPRDFIDCFLIKMEQEKDNQKSEFNIDTTLRYGLLLLLKHPEVTAKVQEEIDHVIGRHRSPCMQDRSHMPYTDAVVHEIQRYSDLVPTGVPHAVTTDTKFRNYLIPKGTTIMALLTSVLHDDKEFPNPNIFDPGHFLDKNGNFKKSDYFMPFSAVTTILQNFNLKSVDDLKNLNTTAVTKGIVSLPPSYQICFIPV

SEQ ID NO: 906479 - protein, 293 aa, Homo sapiens
MKRFNENFRILNSPWIQVCNNFPLLIDCFPGTHNKVLKNVALTRSYIREKVKEHQASLDVNNPRDFIDCFLIKMEQEKDNQKSEFNIENLVGTVADLFVAGTETTSTTLRYGLLLLLKHPEVTAKVQEEIDHVIGRHRSPCMQDRSHMPYTDAVVHEIQRYSDLVPTGVPHAVTTDTKFRNYLIPKGTTIMALLTSVLHDDKEFPNPNIFDPGHFLDKNGNFKKSDYFMPFSAGKRICAGEGLARMELFLFLTTILQNFNLKSVDDLKNLNTTAVTKGIVSLPPSYQICFIPV

SEQ ID NO: 906480 - protein, 420 aa, Homo sapiens
MNPIVVFHGYEAVKEALIDNGEEFSGRGNSPISQRITKGLGIISSNGKRWKEIRRFSLTTLRNFGMGKRSIEDRVQEEAHCLVEELRKTKASPCDPTFILGCAPCNVICSVVFQKRFDYKDQNFLTLMKRFNENFRILNSPWIQVCNNFPLLIDCFPGTHNKVLKNVALTRSYIREKVKEHQASLDVNNPRDFIDCFLIKMEQEKDNQKSEFNIENLVGTVADLFVAGTETTSTTLRYGLLLLLKHPEVTAKVQEEIDHVIGRHRSPCMQDRSHMPYTDAVVHEIQRYSDLVPTGVPHAVTTDTKFRNYLIPKGTTIMALLTSVLHDDKEFPNPNIFDPGHFLDKNGNFKKSDYFMPFSAGKRICAGEGLARMELFLFLTTILQNFNLKSVDDLKNLNTTAVTKGIVSLPPSYQICFIPV

SEQ ID NO: 906481 - protein, 275 aa, Homo sapiens
MKRFNVLIDCFPGTHNKVLKNVALTRSYIREKVKEHQASLDVNNPRDFIDCFLIKMEQEKDNQKSEFNIENLVGTVADLFVAGTETTSTTLRYGLLLLLKHPEVTAKVQEEIDHVIGRHRSPCMQDRSHMPYTDAVVHEIQRYSDLVPTGVPHAVTTDTKFRNYLIPKGTTIMALLTSVLHDDKEFPNPNIFDPGHFLDKNGNFKKSDYFMPFSAGKRICAGEGLARMELFLFLTTILQNFNLKSVDDLKNLNTTAVTKGIVSLPPSYQICFIPV

SEQ ID NO: 906482 - protein, 490 aa, Homo sapiens; identical to SEQ ID NO: 906475

SEQ ID NO: 906483 - protein, 293 aa, Homo sapiens; identical to SEQ ID NO: 906479

SEQ ID NO: 906484 - protein, 293 aa, Homo sapiens; identical to SEQ ID NO: 906479

SEQ ID NO: 906485 - protein, 393 aa, Homo sapiens; identical to SEQ ID NO: 906476

SEQ ID NO: 906486 - protein, 214 aa, Homo sapiens
  misc_feature (214)..(214): Xaa can be any naturally occurring amino acid
MEPFVVLVLCLSFMLLFSLWRQSCRRRKLPPGPTPLPIIGNMLQIDVKDICKSFTNFSKVYGPVFTVYFGMNPIVVFHGYEAVKEALIDNGEEFSGRGNSPISQRITKGLGIISSNGKRWKEIRRFSLTTLRNFGMGKRSIEDRVQEEAHCLVEELRKTKASPCDPTFILGCAPCNVICSVVFQKRFDYKDQNFLTLMKRFNVPNDLFPGNSHX

SEQ ID NO: 906487 - protein, 472 aa, Homo sapiens
MEPFVVLVLCLSFMLLFSLWRQSCRRRKLPPGPTPLPIIGNMLQIDVKDICKSFTNFSKVYGPVFTVYFGMNPIVVFHGYEAVKEALIDNGEEFSGRGNSPISQRITKGLGIISSNGKRWKEIRRFSLTTLRNFGMGKRSIEDRVQEEAHCLVEELRKTKASPCDPTFILGCAPCNVICSVVFQKRFDYKDQNFLTLMKRFNENFRILNSPWIQVCNNFPLLIDCFPGTHNKVLKNVALTRSYIREKVKEHQASLDVNNPRDFIDCFLIKMEQEKDNQKSEFNIDTTLRYGLLLLLKHPEVTAKVQEEIDHVIGRHRSPCMQDRSHMPYTDAVVHEIQRYSDLVPTGVPHAVTTDTKFRNYLIPKGTTIMALLTSVLHDDKEFPNPNIFDPGHFLDKNGNFKKSDYFMPFSAGKRICAGEGLARMELFLFLTTILQNFNLKSVDDLKNLNTTAVTKGIVSLPPSYQICFIPV

SEQ ID NO: 906488 - protein, 471 aa, Homo sapiens
MEPFVVLVLCLSFMLLFSLWRQSCRRRKLPPGPTPLPIIGNMLQIDVKDICKSFTNVFHGYEAVKEALIDNGEEFSGRGNSPISQRITKGLGIISSNGKRWKEIRRFSLTTLRNFGMGKRSIEDRVQEEAHCLVEELRKTKASPCDPTFILGCAPCNVICSVVFQKRFDYKDQNFLTLMKRFNENFRILNSPWIQVCNNFPLLIDCFPGTHNKVLKNVALTRSYIREKVKEHQASLDVNNPRDFIDCFLIKMEQEKDNQKSEFNIENLVGTVADLFVAGTETTSTTLRYGLLLLLKHPEVTAKVQEEIDHVIGRHRSPCMQDRSHMPYTDAVVHEIQRYSDLVPTGVPHAVTTDTKFRNYLIPKGTTIMALLTSVLHDDKEFPNPNIFDPGHFLDKNGNFKKSDYFMPFSAGKRICAGEGLARMELFLFLTTILQNFNLKSVDDLKNLNTTAVTKGIVSLPPSYQICFIPV

SEQ ID NO: 906489 - protein, 504 aa, Homo sapiens
MEPFVVLVLCLSFMLLFSLWRQSCRRRKLPPGPTPLPIIGNMLQIDVKDICKSFTNQCKSALCSSSQLQRFSKVYGPVFTVYFGMNPIVVFHGYEAVKEALIDNGEEFSGRGNSPISQRITKGLGIISSNGKRWKEIRRFSLTTLRNFGMGKRSIEDRVQEEAHCLVEELRKTKASPCDPTFILGCAPCNVICSVVFQKRFDYKDQNFLTLMKRFNENFRILNSPWIQVCNNFPLLIDCFPGTHNKVLKNVALTRSYIREKVKEHQASLDVNNPRDFIDCFLIKMEQEKDNQKSEFNIENLVGTVADLFVAGTETTSTTLRYGLLLLLKHPEVTAKVQEEIDHVIGRHRSPCMQDRSHMPYTDAVVHEIQRYSDLVPTGVPHAVTTDTKFRNYLIPKGTTIMALLTSVLHDDKEFPNPNIFDPGHFLDKNGNFKKSDYFMPFSAGKRICAGEGLARMELFLFLTTILQNFNLKSVDDLKNLNTTAVTKGIVSLPPSYQICFIPV

SEQ ID NO: 906490 - protein, 440 aa, Homo sapiens
MERSFLEEAIPQYLKELLKDLVGAHISVSALVTGVRGMENRAPLSSLAVNSPSFCPFFLLGIISSNGKRWKEIRRFSLTTLRNFGMGKRSIEDRVQEEAHCLVEELRKTKASPCDPTFILGCAPCNVICSVVFQKRFDYKDQNFLTLMKRFNENFRILNSPWIQVCNNFPLLIDCFPGTHNKVLKNVALTRSYIREKVKEHQASLDVNNPRDFIDCFLIKMEQEKDNQKSEFNIENLVGTVADLFVAGTETTSTTLRYGLLLLLKHPEVTAKVQEEIDHVIGRHRSPCMQDRSHMPYTDAVVHEIQRYSDLVPTGVPHAVTTDTKFRNYLIPKGTTIMALLTSVLHDDKEFPNPNIFDPGHFLDKNGNFKKSDYFMPFSAGKRICAGEGLARMELFLFLTTILQNFNLKSVDDLKNLNTTAVTKGIVSLPPSYQICFIPV

SEQ ID NO: 906491 - protein, 458 aa, Homo sapiens
MERSFLEEAIPQYLKELLKDLVGAHISVSALVTGVRGMENRALKSFSAELSLSAWLPSVAALSSLAVNSPSFCPFFLLGIISSNGKRWKEIRRFSLTTLRNFGMGKRSIEDRVQEEAHCLVEELRKTKASPCDPTFILGCAPCNVICSVVFQKRFDYKDQNFLTLMKRFNENFRILNSPWIQVCNNFPLLIDCFPGTHNKVLKNVALTRSYIREKVKEHQASLDVNNPRDFIDCFLIKMEQEKDNQKSEFNIENLVGTVADLFVAGTETTSTTLRYGLLLLLKHPEVTAKVQEEIDHVIGRHRSPCMQDRSHMPYTDAVVHEIQRYSDLVPTGVPHAVTTDTKFRNYLIPKGTTIMALLTSVLHDDKEFPNPNIFDPGHFLDKNGNFKKSDYFMPFSAGKRICAGEGLARMELFLFLTTILQNFNLKSVDDLKNLNTTAVTKGIVSLPPSYQICFIPV

SEQ ID NO: 906492 - protein, 293 aa, Homo sapiens; identical to SEQ ID NO: 906479

SEQ ID NO: 906493 - protein, 360 aa, Homo sapiens
MGLLLLVPLLLLPGSYGLPFYNGFYYSNSANDQNLGNGHGKDLLNGVKLVVETPEETLFTYQGASVILPCRYRYEPALVSPRRVRVKWWKLSENGAPEKDVLVAIGLRHRSFGDYQGRVHLRQDKEHDVSLEIQDLRLEDYGRYRCEVIDGLEDESGLVELELRGVVFPYQSPNGRYQFNFHEGQQVCAEQAAVVASFEQLFRAWEEGLDWCNAGWLQDATVQYPIMLPRQPCGGPGLAPGVRSYGPRHRRLHRYDVFCFATALKGRVYYLEHPEKLTLTEAREACQEDDATIAKVGQLFAAWKFHGLDRCDAGWLADGSVRYPVVHPHPNCGPPEPGVRSFGFPDPQSRLYGVYCYRQH

SEQ ID NO: 906494 - protein, 360 aa, Homo sapiens; identical to SEQ ID NO: 906493

SEQ ID NO: 906495 - protein, 422 aa, Homo sapiens
MRKWRHREVNLPEVTQQDAVCPAPIPSPGLSAQTGLQKIWGTIHCQVCPGAPAWPGSPWHEEMGLLLLVPLLLLPGSYGLPFYNGFYYSNSANDQNLGNGHGKDLLNGVKLVVETPEETLFTYQGASVILPCRYRYEPALVSPRRVRVKWWKLSENGAPEKDVLVAIGLRHRSFGDYQGRVHLRQDKEHDVSLEIQDLRLEDYGRYRCEVIDGLEDESGLVELELRGVVFPYQSPNGRYQFNFHEGQQVCAEQAAVVASFEQLFRAWEEGLDWCNAGWLQDATVQYPIMLPRQPCGGPGLAPGVRSYGPRHRRLHRYDVFCFATALKGRVYYLEHPEKLTLTEAREACQEDDATIAKVGQLFAAWKFHGLDRCDAGWLADGSVRYPVVHPHPNCGPPEPGVRSFGFPDPQSRLYGVYCYRQH

SEQ ID NO: 906496 - protein, 385 aa, Homo sapiens
  misc_feature (15)..(15): Xaa can be any naturally occurring amino acid
WGTVIAPWGPPRNHXTPGVSSWHEEMGLLLLVPLLLLPGSYGLPFYNGFYYSNSANDQNLGNGHGKDLLNGVKLVVETPEETLFTYQGASVILPCRYRYEPALVSPRRVRVKWWKLSENGAPEKDVLVAIGLRHRSFGDYQGRVHLRQDKEHDVSLEIQDLRLEDYGRYRCEVIDGLEDESGLVELELRGVVFPYQSPNGRYQFNFHEGQQVCAEQAAVVASFEQLFRAWEEGLDWCNAGWLQDATVQYPIMLPRQPCGGPGLAPGVRSYGPRHRRLHRYDVFCFATALKGRVYYLEHPEKLTLTEAREACQEDDATIAKVGQLFAAWKFHGLDRCDAGWLADGSVRYPVVHPHPNCGPPEPGVRSFGFPDPQSRLYGVYCYRQH

SEQ ID NO: 906497 - protein, 217 aa, Homo sapiens
MFSEYCCEPAESQERGGNWTGGVVFPYQSPNGRYQFNFHEGQQVCAEQAAVVASFEQLFRAWEEGLDWCNAGWLQDATVQYPIMLPRQPCGGPGLAPGVRSYGPRHRRLHRYDVFCFATALKGRVYYLEHPEKLTLTEAREACQEDDATIAKVGQLFAAWKFHGLDRCDAGWLADGSVRYPVVHPHPNCGPPEPGVRSFGFPDPQSRLYGVYCYRQH

SEQ ID NO: 906498 - protein, 147 aa, Homo sapiens
MGLLLLVPLLLLPGSYGLPFYNGFYYSNSANDQNLGNGHGKDLLNGVKLVVETPEETLFTYQGASVILPCRYRYEPALVSPRRVRVKWWKLSENGAPEKDVLVGLGGLRSWALGLSCPPLLLCEAADPSLPTEGLGLEASSRLPGES

SEQ ID NO: 906499 - protein, 360 aa, Homo sapiens; identical to SEQ ID NO: 906493

SEQ ID NO: 906500 - protein, 372 aa, Homo sapiens
MGLLLLVPLLLLPGSYGLPFYNGFYYSNSANDQNLGNGHGKDLLNGVKLVVETPEETLFTYQGASVILPCRYRYEPALVSPRRVRVKWWKLSENGAPEKDVLVAIGLRHRSFGDYQGRVHLRQDKEHDVSLEIQDLRLEDYGRYRCEVIDGLEDESGLVELELRAESQERGGNWTGGVVFPYQSPNGRYQFNFHEGQQVCAEQAAVVASFEQLFRAWEEGLDWCNAGWLQDATVQYPIMLPRQPCGGPGLAPGVRSYGPRHRRLHRYDVFCFATALKGRVYYLEHPEKLTLTEAREACQEDDATIAKVGQLFAAWKFHGLDRCDAGWLADGSVRYPVVHPHPNCGPPEPGVRSFGFPDPQSRLYGVYCYRQH

SEQ ID NO: 906501 - protein, 360 aa, Homo sapiens; identical to SEQ ID NO: 906493

SEQ ID NO: 906502 - protein, 946 aa, Homo sapiens
MAVYCYALNSLVIMNSANEMKSGGGPGPSGSETPPPPRRAVLSPGSVFSPGRGASFLFPPAESLSPEEPRSPGGWRSGRRRLNSSSGSGSGSSGSSVSSPSWAGRLRGDRQQVVAAGTLSPPGPEEAKRKLRILQRELQNVQVNQKVGMFEAHIQAQSSAIQAPRSPRLGRARSPSPCPFRSSSQPPGRVLVQGARSEERRTKSWGEQCPETSGTDSGRKGGPSLCSSQVKKGMPPLPGRAAPTGSEAQGPSAFVRMEKGIPASPRCGSPTAMEIDKRGSPTPGTRSCLAPSLGLFGASLTMATEVAARVTSTGPHRPQDLALTEPSGRARELEDLQPPEALVERQGQFLGSETSPAPERGGPRDGEPPGKMGKGYLPCGMPGSGEPEVGKRPEETTVSVQSAESSDSLSWSRLPRALASVGPEEARSGAPVGGGRWQLSDRVEGGSPTLGLLGGSPSAQPGTGNVEAGIPSGRMLEPLPCWDAAKDLKEPQCPPGDRVGVQPGNSRVWQGTMEKAGLAWTRGTGVQSEGTWESQRQDSDALPSPELLPQDQDKPFLRKACSPSNIPAVIITDMGTQEDGALEETQGSPRGNLPLRKLSSSSASSTGFSSSYEDSEEDISSDPERTLDPNSAFLHTLDQQKPRVSKSWRKIKNMVHWSPFVMSFKKKYPWIQLAGHAGSFKAAANGRILKKHCESEQRCLDRLMVDVLRPFVPAYHGDVVKDGERYNQMDDLLADFDSPCVMDCKMGIRTYLEEELTKARKKPSLRKDMYQKMIEVDPEAPTEEEKAQRAVTKPRYMQWRETISSTATLGFRIEGIKKEDGTVNRDFKKTKTREQVTEAFREFTKGNHNILIAYRDRLKAIRTTLEVSPFFKCHEVIGSSLLFIHDKKEQAKVWMIDFGKTTPLPEGQTLQHDVPWQEGNREDGYLSGLNNLVDILTEMSQDAPLA

SEQ ID NO: 906503 - protein, 205 aa, Homo sapiens [sequence omitted]

SEQ ID NO: 906504 - protein, 879 aa, Homo sapiens
MAVYCYALNSLVIMNSANEMKSGGGPGPSGSETPPPPRRAVLSPGSVFSPGRGASFLFPPAESLSPEEPRSPGGWRSGRRRLNSSSGSGSGSSGSSVSSPSWAGRLRGDRQQVVAAGTLSPPGPEEAKRKLRILQRELQNVQVNQKVGMFEAHIQAQSSAIQAPRSPRLGRARSPSPCPFRSSSQPPGRVLVQGARSEERRTKSWGEQCPETSGTDSGRKGGPSLCSSQVKKGMPPLPGRAAPTGSEAQGPSAFVRMEKGIPASPRCGSPTAMEIDKRGSPTPGTRSCLAPSLGLFGASLTMATEVAARVTSTGPHRPQDLALTEPSGRARELEDLQPPEALVERQGQFLGSETSPAPERGGPRDGEPPGKMGKGYLPCGMPGSGEPEVGKRPEETTVSVQSAESSDSLSWSRLPRALASVGPEEARSGAPVGGGRWQLSDRVEGGSPTLGLLGGSPSAQPGTGNVEAGIPSGRMLEPLPCWDAAKDLKEPQCPPGDRVGVQPGNSRVWQGTMEKAGLAWTRGTGVQSEGTWESQRQDSDALPSPELLPQDQDKPFLRKACSPSNIPAVIITDMGTQEDGALEETQGSPRGNLPLRKLSSSSASSTGFSSSYEDSEEDISSDPERTLDPNSAFLHTLDQQKPRVSKSWRKIKNMVHWSPFVMSFKKKYPWIQLAGHAGSFKAAANGRILKKHCESEQRCLDRLMVDVLRPFVPAYHGDVVKDGERYNQMDDLLADFDSPCVMDCKMGIRTYLEEELTKARKKPSLRKDMYQKMIEVDPEAPTEEEKAQRAVTKPRYMQWRETISSTATLGFRIEGIKKEDGTVNRDFKKTKTREQVTEAFREFTKGNHNILIAYRDRLKAIRTTLEVSPFFKCHEAIKL

SEQ ID NO: 906505 - protein, 713 aa, Homo sapiens
MAVYCYALNSLVIMNSANEMKSGGGPGPSGSETPPPPRRAVLSPGSVFSPGRGASFLFPPAESLSPEEPRSPGGWRSGRRRLNSSSGSGSGSSGSSVSSPSWAGRLRGDRQQVVAAGTLSPPGPEEAKRKLRILQRELQNVQVNQKVGMFEAHIQAQSSAIQAPRSPRLGRARSPSPCPFRSSSQPPGRVLVQGARSEERRTKSWGEQCPETSGTDSGRKGGPSLCSSQVKKGMPPLPGRAAPTGSEAQGPSAFVRMEKGIPASPRCGSPTAMEIDKRGSPTPGTRSCLAPSLGLFGASLTMATEVAARVTSTGPHRPQDLALTEPSGRARELEDLQPPEALVERQGQFLGSETSPAPERGGPRDGEPPGKMGKGYLPCGMPGSGEPEVGKRPEETTVSVQSAESSDSLSWSRLPRALASVGPEEARSGAPVGGGRWQLSDRVEGGSPTLGLLGGSPSAQPGTGNVEAGIPSGRMLEPLPCWDAAKDLKEPQCPPGDRVGVQPGNSRVWQGTMEKAGLAWTRGTGVQSEGTWESQRQDSDALPSPELLPQDQDKPFLRKACSPSNIPAVIITDMGTQEDGALEETQGSPRGNLPLRKLSSSSASSTGFSSSYEDSEEDISSDPERTLDPNSAFLHTLDQQKPRVSKSWRKIKNMVHWSPFVMSFKKKYPWIQLAGHAGEFIKGKLANRARDPLNERHLVKSRRQEALPLEPGP

SEQ ID NO: 906506 - protein, 644 aa, Homo sapiens [sequence omitted]

SEQ ID NO: 906507 - protein, 946 aa, Homo sapiens; identical to SEQ ID NO: 906502

SEQ ID NO: 906508 - protein, 221 aa, Homo sapiens
MPFTPPGLSYHCSLAWGCQRHPLRSPVSGHRAGSPLLCTPPPCAIRGHLGASTGPAPGSDGARLLCGVGWVRTVSARGSLLTPSWVGCSLSQKEDGTVNRDFKKTKTREQVTEAFREFTKGNHNILIAYRDRLKAIRTTLEVSPFFKCHEVIGSSLLFIHDKKEQAKVWMIDFGKTTPLPEGQTLQHDVPWQEGNREDGYLSGLNNLVDILTEMSQDAPLA

SEQ ID NO: 906509 - protein, 761 aa, Homo sapiens
MASERGKVKHNWSSTSEGCPRKRSCLREPCDVAPSSRPAQRSASRSGGPSSPKRLKAQKEDDVACSRRLSWGSSRRRNNSSSSFSPHFLGPGVGGAASKGCLIRNTRGFLSSGGSPLRPANASLEEMASLEEEACSLKVDSKDSSHNSTNSEFAAEAEGQNDTIEEPNKVQKRKRDRLRDQGSTMIYLKAIQGILGKSMPKRKGEAATRAKPSAAEHPSHGEGPARSEGPAKTAEGAARSVTVTAAQKEKDATPEVSMEEDKTVPERSSFYDRRVVIDPQEKPSEEPLGDRRTVIDKCSPPLEFLDDSDSHLEIQKHKDREVVMEHPSSGSDWSDVEEISTVRFSQEEPVSLKPSAVPEPSSFTTDYVMYPPHLYSSPWCDYASYWTSSPKPSSYPSTGSSSNDAAQVGKSSRSRMSDYSPNSTGSVQNTSRDMEASEEGWSQNSRSFRFSRSSEEREVKEKRTFQEEMPPRPCGGHASSSLPKSHLEPSLEEGFIDTHCHLDMLYSKLSFQGTFTKFRKIYSSSFPKEFQGCISDFCDPRTLTDCLWEELLKEDLVWGAFGCHPHFARYYSESQERNLLQALRHPKAVAFGEMGLDYSYKCTTPVPEQHKVFERQLQLAVSLKKPLVIHCREADEDLLEIMKKFVPPDYKIHRHCFTGSYPVIEPLLKYFPNMSVGFTAVLTYSSAWEAREALRQIPLERIIVETDAPYFLPRQVPKSLCQYAHPGLALHTVREIARVKDQPLSLTLAALRENTSRLYSL

SEQ ID NO: 906510 - protein, 761 aa, Homo sapiens; identical to SEQ ID NO: 906509

SEQ ID NO: 906511 - protein, 761 aa, Homo sapiens; identical to SEQ ID NO: 906509

SEQ ID NO: 906512 - protein, 761 aa, Homo sapiens; identical to SEQ ID NO: 906509

SEQ ID NO: 906513 - protein, 761 aa, Homo sapiens; identical to SEQ ID NO: 906509

SEQ ID NO: 906514 - protein, 773 aa, Homo sapiens
MGSGKKRERQVPMASERGKVKHNWSSTSEGCPRKRSCLREPCDVAPSSRPAQRSASRSGGPSSPKRLKAQKEDDVACSRRLSWGSSRRRNNSSSSFSPHFLGPGVGGAASKGCLIRNTRGFLSSGGSPLRPANASLEEMASLEEEACSLKVDSKDSSHNSTNSEFAAEAEGQNDTIEEPNKVQKRKRDRLRDQGSTMIYLKAIQGILGKSMPKRKGEAATRAKPSAAEHPSHGEGPARSEGPAKTAEGAARSVTVTAAQKEKDATPEVSMEEDKTVPERSSFYDRRVVIDPQEKPSEEPLGDRRTVIDKCSPPLEFLDDSDSHLEIQKHKDREVVMEHPSSGSDWSDVEEISTVRFSQEEPVSLKPSAVPEPSSFTTDYVMYPPHLYSSPWCDYASYWTSSPKPSSYPSTGSSSNDAAQVGKSSRSRMSDYSPNSTGSVQNTSRDMEASEEGWSQNSRSFRFSRSSEEREVKEKRTFQEEMPPRPCGGHASSSLPKSHLEPSLEEGFIDTHCHLDMLYSKLSFQGTFTKFRKIYSSSFPKEFQGCISDFCDPRTLTDCLWEELLKEDLVWGAFGCHPHFARYYSESQERNLLQALRHPKAVAFGEMGLDYSYKCTTPVPEQHKVFERQLQLAVSLKKPLVIHCREADEDLLEIMKKFVPPDYKIHRHCFTGSYPVIEPLLKYFPNMSVGFTAVLTYSSAWEAREALRQIPLERIIVETDAPYFLPRQVPKSLCQYAHPGLALHTVREIARVKDQPLSLTLAALRENTSRLYSL

SEQ ID NO: 906515 - protein, 655 aa, Homo sapiens
MASERGKVKHNWSSTSEGCPRKRSCLREPCDVAPSSRPAQRSASRSGGPSSPKRLKAQKEDDVACSRRLSWGSSRRRNNSSSSFSPHFLGPGVGGAASKGCLIRNTRGFLSSGGSPLRPANASLEEMASLEEEACSLKVDSKDSSHNSTNSEFAAEAEGQNDTIEEPNKVQKKEEKPSEEPLGDRRTVIDKCSPPLEFLDDSDSHLEIQKHKDREVVMEHPSSGSDWSDVEEISTVRFSQEEPVSLKPSAVPEPSSFTTDYVMYPPHLYSSPWCDYASYWTSSPKPSSYPSTGSSSNDAAQVGKSSRSRMSDYSPNSTGSVQNTSRDMEASEEGWSQNSRSFRFSRSSEEREVKEKRTFQEEMPPRPCGGHASSSLPKSHLEPSLEEGFIDTHCHLDMLYSKLSFQGTFTKFRKIYSSSFPKEFQGCISDFCDPRTLTDCLWEELLKEDLVWGAFGCHPHFARYYSESQERNLLQALRHPKAVAFGEMGLDYSYKCTTPVPEQHKVFERQLQLAVSLKKPLVIHCREADEDLLEIMKKFVPPDYKIHRHCFTGSYPVIEPLLKYFPNMSVGFTAVLTYSSAWEAREALRQIPLERIIVETDAPYFLPRQVPKSLCQYAHPGLALHTVREIARVKDQPLSLTLAALRENTSRLYSL

SEQ ID NO: 906516 - protein, 773 aa, Homo sapiens; identical to SEQ ID NO: 906514

SEQ ID NO: 906517 - protein, 572 aa, Homo sapiens
MASERGKVKHNWSSTSEGCPRKRSCLREPCDVAPSSRPAQRSASRSGGPSSPKRLKAQKEDDVACSRRLSWGSSRRRNNSSSSFSPHFLGPGVGGAASKGCLIRNTRGFLSSGGSPLRPANASLEEMASLEEEACSLKVDSKDSSHNSTNSEFAAEAEGQNDTIEEPNKVQKRKRDRLRDQGSTMIYLKAIQGILGKSMPKRKGEAATRAKPSAAEHPSHGEGPARSEGPAKTAEGAARSVTVTAAQKEKDATPEVSMEEDKTVPERSSFYDRRVVIDPQEKPSEEPLGDRRTVIDKCSPPLEFLDDSDSHLEIQKHKDREVVMEHPSSGSDWSDVEEISTVRFSQEEPVSLKPSAVPEPSSFTTDYVMYPPHLYSSPWCDYASYWTSSPKPSSYPSTGSSSNDAAQVGKSSRSRMSDYSPNSTGSVQNTSRDMEASEEGWSQNSRSFRFSRSSEEREVKEKRTFQEEMPPRPCGGHASSSLPKSHLEPSLEEGFIDTHCHLDMLYSKLSFQGTFTKFRKIYSSSFPKEFQGCISDFCVRGGKAEMTWKSPSLCHPPAKEKHKVLSTFLSRI

SEQ ID NO: 906518 - protein, 722 aa, Homo sapiens
MASERGKVKHNWSSTSEGCPRKRSCLREPCDVAPSSRPAQRSASRSGGPSSPKRLKAQKEDDVACSRRLSWGSSRRRNNSSSSFSPHFLGPGVGGAASKGCLIRNTRGFLSSGGSPLRPANASLEEMASLEEEACSLKVDSKDSSHNSTNSEFAAEAEGQNDTIEEPNKVQKRKRDRLRDQGSTMIYLKAIQGILGKSMPKRKGEAATRAKPSAAEHPSHGEGPARSEGPAKTAEGAARSVTVTAAQKEKDATPEVSMEEDKTVPERSSFYDRRVVIDPQEKPSEEPLGDRRTVIDKCSPPLEFLDDSDSHLEIQKHKDREVVMEHPSSGSDWSDVEEISTVRFSQEEPVSLKPSAVPEPSSFTTDYVMYPPHLYSSPWCDYASYWTSSPKPSSYPSTGSSSNDAAQVGKSSRSRMSDYSPNSTGSVQNTSRDMEASEEGWSQNSRSFRFSRSSEEREVKEKRTFQEEMPPRPCGGHASSSLPKSHLEPSLEEGFIDTHCHLDMLYSKLSFQGTFTKFRKIYSSSFPKEFQGCISDFCDPRTLTDCLWEELLKEDLVWGAFGCHPHFARYYSESQERNLLQALRHPKAVAFGEMGLDYSYKCTTPVPEQHKVFERQLQLAVSLKKPLVIHCREADEDLLEIMKKFVPPDYKIHRHCFTGSYPVIEPLLKYFPNMSVGFTAVLTYSSAWEAREALRQIPLERIIVETDAPYFLPRQAVQSPTL

SEQ ID NO: 906519 - protein, 133 aa, Homo sapiens
FYSSEHEYSGLNIVRPSTGKIVNELFKEAREHGAVPLNEATRASGDDKSKSFTGGGYRLGSSFCKRSEYIYGENQLQDVQILLKLWSNGFSLDDGELRPYNEPTNAQFLESVKRGVTLIACMPEIQQLMLEIF

SEQ ID NO: 906520 - protein, 1701 aa, Homo sapiens
MKIFQRKMRYWLLPPFLAIVYFCTIVQGQVAPPTRLRYNVISHDSIQISWKAPRGKFGGYKLLVTPTSGGKTNQLNLQNTATKAIIQGLMPDQNYTVQIIAYNKDKESKPAQGQFRIKDLEKRKDPKPRVKVVDRGNGSRPSSPEEVKFVCQTPAIADIVILVDGSWSIGRFNFRLVRHFLENLVTAFDVGSEKTRIGVKNADVNELQEIASEPDSTHVYNVAEFDLMHTVVESLTRTLCSRVEEQDREIKASAHAITGPPTELITSEVTARSFMVNWTHAPGNVEKYRVVYYPTRGGKPDEVVVDGTVSSTVLKNLMSLTEYQIAVFAIYAHTASEGLRGTETTLALPMASDLLLYDVTENSMRVKWDAVPGASGYLILYAPLTEGLAGDEKEMKIGETHTDIELSGLLPNTEYTVTVYAMFGEEASDPVTGQETTLALSPPRNLRISNVGSNSARLTWDPTSRQINGYRIVYNNADGTEINEVEVDPITTFPLKGLTPLTEYTIAIFSIYDEGQSEPLTGVFTTEEVPAQQYLEIDEVTTDSFRVTWHPLSADEGLHKLMWIPVYGGKTEEVVLKEEQDSHVIEGLEPGTEYEVSLLAVLDDGSESEVVTAVGTTLDSFWTEPATTIVPTTSVTSVFQTGIRNLVVGDETTSSLRVKWDISDSDVQQFRVTYMTAQGDPEEEVIGTVMVPGSQNNLLLKPLLPDTEYKVTVTPIYTDGEGVSVSAPGKTLPSSGPQNLRVSEEWYNRLRITWDPPSSPVKGYRIVYKPVSVPGPTLETFVGADINTILITNLLSGMDYNVKIFASQASGFSDALTGMVKTLFLGVTNLQAKHVEMTSLCAHWQVHRHATAYRVVIESLQDRQKQESTVGGGTTRHCFYGLQPDSEYKISVYTKLQEIEGPSVSIMEKTQSLPTRPPTFPPTIPPAKEVCKAAKADLVFMVDGSWSIGDENFNKIISFLYSTVGALNKIGTDGTQVAMVQFTDDPRTEFKLNAYKTKETLLDAIKHISYKGGNTKTGKAIKYVRDTLFTAESGTRRGIPKVIVVITDGRSQDDVNKISREMQLDGYSIFAIGVADADYSELVSIGSKPSARHVFFVDDFDAFKKIEDELITFVCETASATCPVVHKDGIDLAGFKMMEMFGLVEKDFSSVEGVSMEPGTFNVFPCYQLHKDALVSQPTRYLHPEGLPSDYTISFLFRILPDTPQEPFALWEILNKNSDPLVGVILDNGGKTLTYFNYDQSGDFQTVTFEGPEIRKIFYGSFHKLHIVVSETLVKVVIDCKQVGEKAMNASANITSDGVEVLGKMVRSRGPGGNSAPFQLQMFDIVCSTSWANTDKCCELPGLRDDESCPDLPHSCSCSETNEVALGPAGPPGGPGLRGPKGQQGEPGPKGPDGPRGEIGLPGPQGPPGPQGPSGLSIQGMPGMPGEKGEKGDTGLPGPQGIPGGVGSPGRDGSPGQRGLPGKDGSSGPPGPPGPIGIPGTPGVPGITGSMGPQGALGPPGVPGAKGERGERGDLQSQAMVRSVARQVCEQLIQSHMARYTAILNQIPSHSSSIRTVQGPPGEPGRPGSPGAPGEQGPPGTPGFPGNAGVPGTPGERGLTGIKGEKGNPGVGTQGPRGPPGPAGPSGESRPGSPGPPGSPGPRGPPGHLGVPGPQGPSGQPGYCDPSSCSAYGVRAPHPDQPEFTPVQDELEAMELWGPGV

SEQ ID NO: 906521 - protein, 1685 aa, Homo sapiens
MKIFQRKMRYWLLPPFLAIVYFCTIVQGQVAPPTRLRYNVISHDSIQISWKAPRGKFGGYKLLVTPTSGGKTNQLNLQNTATKAIIQGLMPDQNYTVQIIAYNKDKESKPAQGQFRIKDLEKRKDPKPRVKVVDRGNGSRPSSPEEVKFVCQTPAIADIVILVDGSWSIGRFNFRLVRHFLENLVTAFDVGSEKTRIGVKNADVNELQEIASEPDSTHVYNVAEFDLMHTVVESLTRTLCSRVEEQDREIKASAHAITGPPTELITSEVTARSFMVNWTHAPGNVEKYRVVYYPTRGGKPDEVVVDGTVSSTVLKNLMSLTEYQIAVFAIYAHTASEGLRGTETTLALPMASDLLLYDVTENSMRVKWDAVPGASGYLILYAPLTEGLAGDEKEMKIGETHTDIELSGLLPNTEYTVTVYAMFGEEASDPVTGQETTLALSPPRNLRISNVGSNSARLTWDPTSRQINGYRIVYNNADGTEINEVEVDPITTFPLKGLTPLTEYTIAIFSIYDEGQSEPLTGVFTTEEVPAQQYLEIDEVTTDSFRVTWHPLSADEGLHKLMWIPVYGGKTEEVVLKEEQDSHVIEGLEPGTEYEVSLLAVLDDGSESEVVTAVGTTLDSFWTEPATTIVPTTSVTSVFQTGIRNLVVGDETTSSLRVKWDISDSDVQQFRVTYMTAQGDPEEEVIGTVMVPGSQNNLLLKPLLPDTEYKVTVTPIYTDGEGVSVSAPGKTLPSSGPQNLRVSEEWYNRLRITWDPPSSPVKGYRIVYKPVSVPGPTLETFVGADINTILITNLLSGMDYNVKIFASQASGFSDALTGMVKTLFLGVTNLQAKHVEMTSLCAHWQVHRHATAYRVVIESLQDRQKQESTVGGGTTRHCFYGLQPDSEYKISVYTKLQEIEGPSVSIMEKTQSLPTRPPTFPPTIPPAKEVCKAAKADLVFMVDGSWSIGDENFNKIISFLYSTVGALNKIGTDGTQVAMVQFTDDPRTEFKLNAYKTKETLLDAIKHISYKGGNTKTGKAIKYVRDTLFTAESGTRRGIPKVIVVITDGRSQDDVNKISREMQLDGYSIFAIGVADADYSELVSIGSKPSARHVFFVDDFDAFKKIEDELITFVCETASATCPVVHKDGIDLAGFKMMEMFGLVEKDFSSVEGVSMEPGTFNVFPCYQLHKDALVSQPTRYLHPEGLPSDYTISFLFRILPDTPQEPFALWEILNKNSDPLVGVILDNGGKTLTYFNYDQSGDFQTVTFEGPEIRKIFYGSFHKLHIVVSETLVKVVIDCKQVGEKAMNASANITSDGVEVLGKMVRSRGPGGNSAPFQLQMFDIVCSTSWANTDKCCELPGLRDDESCPDLPHSCSCSETNEVALGPAGPPGGPGLRGPKGQQGEPGPKGPDGPRGEIGLPGPQGPPGPQGPSGLSIQGMPGMPGEKGEKGDTGLPGPQGIPGGVGSPGRDGSPGQRGLPGKDGSSGPPGPPGPIGIPGTPGVPGITGSMGPQGALGPPGVPGAKGERGERGDLQSQAMVRSVARQVCEQLIQSHMARYTAILNQIPSHSSSIRTVQGPPGEPGRPGSPGAPGEQGPPGTPGFPGNAGVPGTPGERGLTGIKGEKGNPGVGTQGPRGPPGPAGPSGESRPGSPGPPGSPGPRGPPGHLGVPGPQGPSGQPGYCDPSSCSAYGVRDLIPYNDYQH

SEQ ID NO: 906522 - protein, 1030 aa, Homo sapiens
MKIFQRKMRYWLLPPFLAIVYFCTIVQGQVAPPTRLRYNVISHDSIQISWKAPRGKFGGYKLLVTPTSGGKTNQLNLQNTATKAIIQGLMPDQNYTVQIIAYNKDKESKPAQGQFRIKDLEKRKDPKPRVKVVDRGNGSRPSSPEEVKFVCQTPAIADIVILVDGSWSIGRFNFRLVRHFLENLVTAFDVGSEKTRIGLAQYSGDPRIEWHLNAFSTKDEVIEAVRNLPYKGGNTLTGLALNYIFENSFKPEAGSRTGVSKIGILITDGKSQDDIIPPSRNLRESGVELFAIGVKNADVNELQEIASEPDSTHVYNVAEFDLMHTVVESLTRTLCSRVEEQDREIKASAHAITGPPTELITSEVTARSFMVNWTHAPGNVEKYRVVYYPTRGGKPDEVVVDGTVSSTVLKNLMSLTEYQIAVFAIYAHTASEGLRGTETTLALPMASDLLLYDVTENSMRVKWDAVPGASGYLILYAPLTEGLAGDEKEMKIGETHTDIELSGLLPNTEYTVTVYAMFGEEASDPVTGQETTLALSPPRNLRISNVGSNSARLTWDPTSRQINGYRIVYNNADGTEINEVEVDPITTFPLKGLTPLTEYTIAIFSIYDEGQSEPLTGVFTTEEVPAQQYLEIDEVTTDSFRVTWHPLSADEGLHKLMWIPVYGGKTEEVVLKEEQDSHVIEGLEPGTEYEVSLLAVLDDGSESEVVTAVGTTLDSFWTEPATTIVPTTSVTSVFQTGIRNLVVGDETTSSLRVKWDISDSDVQQFRVTYMTAQGDPEEEVIGTVMVPGSQNNLLLKPLLPDTEYKVTVTPIYTDGEGVSVSAPGKTLPSSGPQNLRVSEEWYNRLRITWDPPSSPVKGYRIVYKPVSVPGPTLETFVGADINTILITNLLSGMDYNVKIFASQASGFSDALTGMVKTLFLGVTNLQAKHVEMTSLCAHWQVHRHATAYRVVIESLQDRQKQESTVGGGTTRHCFYGLQPDSEYKISVYTKLQEIEGPSVSIMEKTQSLPTRPPTFPPTIPPAKEGKRIIE

SEQ ID NO: 906523 - protein, 1654 aa, Homo sapiens
  misc_feature (1604)..(1604): Xaa can be any naturally occurring amino acid
MKIFQRKMRYWLLPPFLAIVYFCTIVQGQVAPPTRLRYNVISHDSIQISWKAPRGKFGGYKLLVTPTSGGKTNQLNLQNTATKAIIQGLMPDQNYTVQIIAYNKDKESKPAQGQFRIKDLEKRKDPKPRVKVVDRGNGSRPSSPEEVKFVCQTPAIADIVILVDGSWSIGRFNFRLVRHFLENLVTAFDVGSEKTRIGVKNADVNELQEIASEPDSTHVYNVAEFDLMHTVVESLTRTLCSRVEEQDREIKASAHAITGPPTELITSEVTARSFMVNWTHAPGNVEKYRVVYYPTRGGKPDEVVVDGTVSSTVLKNLMSLTEYQIAVFAIYAHTASEGLRGTETTLALPMASDLLLYDVTENSMRVKWDAVPGASGYLILYAPLTEGLAGDEKEMKIGETHTDIELSGLLPNTEYTVTVYAMFGEEASDPVTGQETTLALSPPRNLRISNVGSNSARLTWDPTSRQINGYRIVYNNADGTEINEVEVDPITTFPLKGLTPLTEYTIAIFSIYDEGQSEPLTGVFTTEEVPAQQYLEIDEVTTDSFRVTWHPLSADEGLHKLMWIPVYGGKTEEVVLKEEQDSHVIEGLEPGTEYEVSLLAVLDDGSESEVVTAVGTTLDSFWTEPATTIVPTTSVTSVFQTGIRNLVVGDETTSSLRVKWDISDSDVQQFRVTYMTAQGDPEEEVIGTVMVPGSQNNLLLKPLLPDTEYKVTVTPIYTDGEGVSVSAPGKTLPSSGPQNLRVSEEWYNRLRITWDPPSSPVKGYRIVYKPVSVPGPTLETFVGADINTILITNLLSGMDYNVKIFASQASGFSDALTGMVKTLFLGVTNLQAKHVEMTSLCAHWQVHRHATAYRVVIESLQDRQKQESTVGGGTTRHCFYGLQPDSEYKISVYTKLQEIEGPSVSIMEKTQSLPTRPPTFPPTIPPAKEVCKAAKADLVFMVDGSWSIGDENFNKIISFLYSTVGALNKIGTDGTQVAMVQFTDDPRTEFKLNAYKTKETLLDAIKHISYKGGNTKTGKAIKYVRDTLFTAESGTRRGIPKVIVVITDGRSQDDVNKISREMQLDGYSIFAIGVADADYSELVSIGSKPSARHVFFVDDFDAFKKIEDELITFVCETASATCPVVHKDGIDLAGFKMMEMFGLVEKDFSSVEGVSMEPGTFNVFPCYQLHKDALVSQPTRYLHPEGLPSDYTISFLFRILPDTPQEPFALWEILNKNSDPLVGVILDNGGKTLTYFNYDQSGDFQTVTFEGPEIRKIFYGSFHKLHIVVSETLVKVVIDCKQVGEKAMNASANITSDGVEVLGKMVRSRGPGGNSAPFQLQMFDIVCSTSWANTDKCCELPGLRDDESCPDLPHSCSCSETNEVALGPAGPPGGPGLRGPKGQQGEPGPKGPDGPRGEIGLPGPQGPPGPQGPSGLSIQGMPGMPGEKGEKGDTGLPGPQGIPGGVGSPGRDGSPGQRGLPGKDGSSGPPGPPGPIGIPGTPGVPGITGSMGPQGALGPPGVPGAKGERGERGDLQSQAMVRSVARQVCEQLIQSHMARYTAILNQIPSHSSSIRTVQGPPGEPGRPGSPGAPGEQGPPGTPGFPGNAGVPGTPGERGLTGIEXDLQGRVGLAALGPLALLDQEAHQVIWGFLDPKVLLASLDIVTPHHVLPMV

SEQ ID NO: 906524 - protein, 602 aa, Homo sapiens
MKIFQRKMRYWLLPPFLAIVYFCTIVQGQVAPPTRLRYNVISHDSIQISWKAPRGKFGGYKLLVTPTSGGKTNQLNLQNTATKAIIQGLMPDQNYTVQIIAYNKDKESKPAQGQFRIKDLEKRKDPKPRVKVVDRGNGSRPSSPEEVKFVCQTPAIADIVILVDGSWSIGRFNFRLVRHFLENLVTAFDVGSEKTRIGVKNADVNELQEIASEPDSTHVYNVAEFDLMHTVVESLTRTLCSRVEEQDREIKASAHAITGPPTELITSEVTARSFMVNWTHAPGNVEKYRVVYYPTRGGKPDEVVVDGTVSSTVLKNLMSLTEYQIAVFAIYAHTASEGLRGTETTLALPMASDLLLYDVTENSMRVKWDAVPGASGYLILYAPLTEGLAGDEKEMKIGETHTDIELSGLLPNTEYTVTVYAMFGEEASDPVTGQETTLALSPPRNLRISNVGSNSARLTWDPTSRQINGYRIVYNNADGTEINEVQILLKLWSNGFSLDDGELRPYNEPTNAQFLESVKRGLTPEIVSTPSSPEEEDKSILNAVVLIDDSVPTTKIQIRLADGSRLIQRFNSTHRILDVRNFIVQSRPEFAALDYYSCDFIS

SEQ ID NO: 906525 - protein, 628 aa, Homo sapiens
MKIFQRKMRYWLLPPFLAIVYFCTIVQGQVAPPTRLRYNVISHDSIQISWKAPRGKFGGYKLLVTPTSGGKTNQLNLQNTATKAIIQGLMPDQNYTVQIIAYNKDKESKPAQGQFRIKDLEKRKDPKPRVKVVDRGNGSRPSSPEEVKFVCQTPAIADIVILVDGSWSIGRFNFRLVRHFLENLVTAFDVGSEKTRIGVKNADVNELQEIASEPDSTHVYNVAEFDLMHTVVESLTRTLCSRVEEQDREIKASAHAITGPPTELITSEVTARSFMVNWTHAPGNVEKYRVVYYPTRGGKPDEVVVDGTVSSTVLKNLMSLTEYQIAVFAIYAHTASEGLRGTETTLALPMASDLLLYDVTENSMRVKWDAVPGASGYLILYAPLTEGLAGDEKEMKIGETHTDIELSGLLPNTEYTVTVYAMFGEEASDPVTGQETTLALSPPRNLRISNVGSNSARLTWDPTSRQINGYRIVYNNADGTEINEVQILLKLWSNGFSLDDGELRPYNEPTNAQFLESVKRGLTPEIVSTPSSPEEEDKSILNAVVLIDDSVPTTKIQIRLADGSRLIQRFNSTHRILDVRNFIVQSRPEFAALDFILVTSFPNKELTDESLTLLEADILNTVLLQQLK

SEQ ID NO: 906526 - protein, 133 aa, Homo sapiens; identical to SEQ ID NO: 906519

SEQ ID NO: 906527 - protein, 77 aa, Homo sapiens
RKMAEGGGPEPGEQERRSSGPRPPSARDLQLALAELYEDEVKCKSSKSNRPKATVFKKPTDTTSTVSFILFCCKKKL

SEQ ID NO: 906528 - protein, 250 aa, Homo sapiens
MKLLEKYSIYHSNFLPLSLNTASLHLFPRAEFGTRITGSMGPQGALGPPGVPGAKGERGERGDLQSQAMVRSVARQVCEQLIQSHMARYTAILNQIPSHSSSIRTVQGPPGEPGRPGSPGAPGEQGPPGTPGFPGNAGVPGTPGERGLTGIKGEKGNPGVGTQGPRGPPGPAGPSGESRPGSPGPPGSPGPRGPPGHLGVPGPQGPSGQPGYCDPSSCSAYGVRAPHPDQPEFTPVQDELEAMELWGPGV

SEQ ID NO: 906529 - protein, 1701 aa, Homo sapiens; identical to SEQ ID NO: 906520

SEQ ID NO: 906530 - protein, 881 aa, Homo sapiens
RLGRGWGEIGRGTAMVKTLFLGVTNLQAKHVEMTSLCAHWQVHRHATAYRVVIESLQDRQKQESTVGGGTTRHCFYGLQPDSEYKISVYTKLQEIEGPSVSIMEKTQSLPTRPPTFPPTIPPAKEVCKAAKADLVFMVDGSWSIGDENFNKIISFLYSTVGALNKIGTDGTQVAMVQFTDDPRTEFKLNAYKTKETLLDAIKHISYKGGNTKTGKAIKYVRDTLFTAESGTRRGIPKVIVVITDGRSQDDVNKISREMQLDGYSIFAIGVADADYSELVSIGSKPSARHVFFVDDFDAFKKIEDELITFVCETASATCPVVHKDGIDLAGFKMMEMFGLVEKDFSSVEGVSMEPGTFNVFPCYQLHKDALVSQPTRYLHPEGLPSDYTISFLFRILPDTPQEPFALWEILNKNSDPLVGVILDNGGKTLTYFNYDQSGDFQTVTFEGPEIRKIFYGSFHKLHIVVSETLVKVVIDCKQVGEKAMNASANITSDGVEVLGKMVRSRGPGGNSAPFQLQMFDIVCSTSWANTDKCCELPGLRDDESCPDLPHSCSCSETNEVALGPAGPPGGPGLRGPKGQQGEPGPKGPDGPRGEIGLPGPQGPPGPQGPSGLSIQGMPGMPGEKGEKGDTGLPGPQGIPGGVGSPGRDGSPGQRGLPGKDGSSGPPGPPGPIGIPGTPGVPGITGSMGPQGALGPPGVPGAKGERGERGDLQSQAMVRSVARQVCEQLIQSHMARYTAILNQIPSHSSSIRTVQGPPGEPGRPGSPGAPGEQGPPGTPGFPGNAGVPGTPGERGLTGIKGEKGNPGVGTQGPRGPPGPAGPSGESRPGSPGPPGSPGPRGPPGHLGVPGPQGPSGQPGYCDPSSCSAYGVRDLIPYNDYQH

SEQ ID NO: 906531 - protein, 1706 aa, Homo sapiens
MKIFQRKMRYWLLPPFLAIVYFCTIVQGQVAPPTRLRYNVISHDSIQISWKAPRGKFGGYKLLVTPTSGGKTNQLNLQNTATKAIIQGLMPDQNYTVQIIAYNKDKESKPAQGQFRIKDLEKRKDPKPRVKVVDRGNGSRPSSPEEVKFVCQTPAIADIVILVDGSWSIGRFNFRLVRHFLENLVTAFDVGSEKTRIGVKNADVNELQEIASEPDSTHVYNVAEFDLMHTVVESLTRTLCSRVEEQDREIKASAHAITGPPTELITSEVTARSFMVNWTHAPGNVEKYRVVYYPTRGGKPDEVVVDGTVSSTVLKNLMSLTEYQIAVFAIYAHTASEGLRGTETTLALPMASDLLLYDVTENSMRVKWDAVPGASGYLILYAPLTEGLAGDEKEMKIGETHTDIELSGLLPNTEYTVTVYAMFGEEASDPVTGQETTLALSPPRNLRISNVGSNSARLTWDPTSRQINGYRIVYNNADGTEINEVEVDPITTFPLKGLTPLTEYTIAIFSIYDEGQSEPLTGVFTTEEVPAQQYLEIDEVTTDSFRVTWHPLSADEGLHKLMWIPVYGGKTEEVVLKEEQDSHVIEGLEPGTEYEVSLLAVLDDGSESEVVTAVGTTLDSFWTEPATTIVPTTSVTSVFQTGIRNLVVGDETTSSLRVKWDISDSDVQQFRVTYMTAQGDPEEEVIGTVMVPGSQNNLLLKPLLPDTEYKVTVTPIYTDGEGVSVSAPGKTLPSSGPQNLRVSEEWYNRLRITWDPPSSPVKGYRIVYKPVSVPGPTLETFVGADINTILITNLLSGMDYNVKIFASQASGFSDALTGMVKTLFLGVTNLQAKHVEMTSLCAHWQVHRHATAYRVVIESLQDRQKQESTVGGGTTRHCFYGLQPDSEYKISVYTKLQEIEGPSVSIMEKTQSLPTRPPTFPPTIPPAKEVCKAAKADLVFMVDGSWSIGDENFNKIISFLYSTVGALNKIGTDGTQVAMVQFTDDPRTEFKLNAYKTKETLLDAIKHISYKGGNTKTGKAIKYVRDTLFTAESGTRRGIPKVIVVITDGRSQDDVNKISREMQLDGYSIFAIGVADADYSELVSIGSKPSARHVFFVDDFDAFKKIEDELITFVCETASATCPVVHKDGIDLAGFKMMEMFGLVEKDFSSVEGVSMEPGTFNVFPCYQLHKDALVSQPTRYLHPEGLPSDYTISFLFRILPDTPQEPFALWEILNKNSDPLVGVILDNGGKTLTYFNYDQSGDFQTVTFEGPEIRKIFYGSFHKLHIVVSETLVKVVIDCKQVGEKAMNASANITSDGVEVLGKMVRSRGPGGNSAPFQLQMFDIVCSTSWANTDKCCELPGLRDDESCPDLPHSCSCSETNEVALGPAGPPGGPGLRGPKGQQGEPGPKGPDGPRGEIGLPGPQGPPGPQGPSGLSIQGMPGMPGEKGEKGDTGLPGPQGIPGGVGSPGRDGSPGQRGLPGKDGSSGPPGPPGPIGIPGTPGVPGITGSMGPQGALGPPGVPGAKGERGERGDLQSQAMVRSVARQVCEQLIQSHMARYTAILNQIPSHSSSIRTVQGPPGEPGRPGSPGAPGEQGPPGTPGFPGNAGVPGTPGERGLTGIKGEKGNPGVGTQGPRGPPGPAGPSGESRPGSPGPPGSPGPRGPPGHLGVPGPQGPSGQPGYCDPSSCSAYGVREDGWASFSLTTLLSLPPLITSPPCSPLVMDF

SEQ ID NO: 906532 - protein, 698 aa, Homo sapiens
MGGSEIKLLPFFVSGKAIKYVRDTLFTAESGTRRGIPKVIVVITDGRSQDDVNKISREMQLDGYSIFAIGVADADYSELVSIGSKPSARHVFFVDDFDAFKKIEDELITFVCETASATCPVVHKDGIDLAGFKMMEMFGLVEKDFSSVEGVSMEPGTFNVFPCYQLHKDALVSQPTRYLHPEGLPSDYTISFLFRILPDTPQEPFALWEILNKNSDPLVGVILDNGGKTLTYFNYDQSGDFQTVTFEGPEIRKIFYGSFHKLHIVVSETLVKVVIDCKQVGEKAMNASANITSDGVEVLGKMVRSRGPGGNSAPFQLQMFDIVCSTSWANTDKCCELPGLRDDESCPDLPHSCSCSETNEVALGPAGPPGGPGLRGPKGQQGEPGPKGPDGPRGEIGLPGPQGPPGPQGPSGLSIQGMPGMPGEKGEKGDTGLPGPQGIPGGVGSPGRDGSPGQRGLPGKDGSSGPPGPPGPIGIPGTPGVPGITGSMGPQGALGPPGVPGAKGERGERGDLQSQAMVRSVARQVCEQLIQSHMARYTAILNQIPSHSSSIRTVQGPPGEPGRPGSPGAPGEQGPPGTPGFPGNAGVPGTPGERGLTGIKGEKGNPGVGTQGPRGPPGPAGPSGESRPGSPGPPGSPGPRGPPGHLGVPGPQGPSGQPGYCDPSSCSAYGVRAPHPDQPEFTPVQDELEAMELWGPGV

SEQ ID NO: 906533 - protein, 539 aa, Homo sapiens
MKIFQRKMRYWLLPPFLAIVYFCTIVQGQVAPPTRLRYNVISHDSIQISWKAPRGKFGGYKLLVTPTSGGKTNQLNLQNTATKAIIQGLMPDQNYTVQIIAYNKDKESKPAQGQFRIKDLEKRKDPKPRVKVVDRGNGSRPSSPEEVKFVCQTPAIADIVILVDGSWSIGRFNFRLVRHFLENLVTAFDVGSEKTRIGVKNADVNELQEIASEPDSTHVYNVAEFDLMHTVVESLTRTLCSRVEEQDREIKASAHAITGPPTELITSEVTARSFMVNWTHAPGNVEKYRVVYYPTRGGKPDEVVVDGTVSSTVLKNLMSLTEYQIAVFAIYAHTASEGLRGTETTLALPMASDLLLYDVTENSMRVKWDAVPGASGYLILYAPLTEGLAGDEKEMKIGETHTDIELSGLLPNTEYTVTVYAMFGEEASDPVTGQETTLALSPPRNLRISNVGSNSARLTWDPTSRQINGYRIVYNNADGTEINEVQILLKLWSNGFSLDDGELRPYNEPTNAQFLESVKRGVTLIACMPEIQQLMLEIF

SEQ ID NO: 906534 - protein, 283 aa, Homo sapiens
RKMAEGGGPEPGEQERRSSGPRPPSARDLQLALAELYEDEVKCKSSKSNRPKATVFKKPTDTTSTSFTGGGYRLGSSFCKRSEYIYGENQLQDVQILLKLWSNGFSLDDGELRPYNEPTNAQFLESVKRGEIPLELQRLVHGGQVNLDMEDHQDQEYIKPRLRFKAFSGEGQKLGSLTPEIVSTPSSPEEEDKSILNAVVLIDDSVPTTKIQIRLADGSRLIQRFNSTHRILDVRNFIVQSRPEFAALDFILVTSFPNKELTDESLTLLEADILNTVLLQQLK

SEQ ID NO: 906535 - protein, 886 aa, Homo sapiens
MEPPTVPSERSLSLSLPGPREGQATLKPPPQHLWRQPRTPIRIQQRGYSDSAERAERERQPHRPIERADAMDTSDRPGLRTTRMSWPSSFHGTGTGSGGAGGGSSRRFEAENGPTPSPGRSPLDSQASPGLVLHAGAATSQRRESFLYRSDSDYDMSPKTMSRNSSVTSEAHAEDLIVTPFAQVLASLRSVRSNFSLLTNVPVPSNKRSPLGGPTPVCKATLSEETCQQLARETLEELDWCLEQLETMQTYRSVSEMASHKFKRMLNRELTHLSEMSRSGNQVSEYISTTFLDKQNEVEIPSPTMKEREKQQAPRPRPSQPPPPPVPHLQPMSQITGLKKLMHSNSLNNSNIPRFGVKTDQEELLAQELENLNKWGLNIFCVSDYAGGRSLTCIMYMIFQERDLLKKFRIPVDTMVTYMLTLEDHYHADVAYHNSLHAADVLQSTHVLLATPALDAVFTDLEILAALFAAAIHDVDHPGVSNQFLINTNSELALMYNDESVLENHHLAVGFKLLQEDNCDIFQNLSKRQRQSLRKMVIDMVLATDMSKHMTLLADLKTMVETKKVTSSGVLLLDNYSDRIQVLRNMVHCADLSNPTKPLELYRQWTDRIMAEFFQQGDRERERGMEISPMCDKHTASVEKSQVGFIDYIVHPLWETWADLVHPDAQEILDTLEDNRDWYYSAIRQSPSPPPEEESRGPGHPPLPDKFQFELTLEEEEEEEISMAQIPCTAQEALTAQGLSGVEEALDATIAWEASPAQESLEVMAQEASLEAELEAVYLTQQAQSTGSAPVAPDEFSSREEFVVAVSHSSPSALALQSPLLPAWRTLSVSEHAPGLPGLPSTAAEVEAQREHQAAKRACSACAGTFGEDTSALPAPGGGGSGGDPT

SEQ ID NO: 906536 - protein, 80 aa, Homo sapiens
ARPRGLGRIPELQLVAFPVAVAAEDEAFLPEPLAPRAPRRPRSPPSSPVFFASPSPTFRRRLRLLRSCQDLGRQAWAGAG

SEQ ID NO: 906537 - protein, 825 aa, Homo sapiens
MRSGAAPRARPRPPALALPPTGPESLTHFPFSDEDTRRHPPGRSVSFEAENGPTPSPGRSPLDSQASPGLVLHAGAATSQRRESFLYRSDSDYDMSPKTMSRNSSVTSEAHAEDLIVTPFAQVLASLRSVRSNFSLLTNVPVPSNKRSPLGGPTPVCKATLSEETCQQLARETLEELDWCLEQLETMQTYRSVSEMASHKFKRMLNRELTHLSEMSRSGNQVSEYISTTFLDKQNEVEIPSPTMKEREKQQAPRPRPSQPPPPPVPHLQPMSQITGLKKLMHSNSLNNSNIPRFGVKTDQEELLAQELENLNKWGLNIFCVSDYAGGRSLTCIMYMIFQERDLLKKFRIPVDTMVTYMLTLEDHYHADVAYHNSLHAADVLQSTHVLLATPALDAVFTDLEILAALFAAAIHDVDHPGVSNQFLINTNSELALMYNDESVLENHHLAVGFKLLQEDNCDIFQNLSKRQRQSLRKMVIDMVLATDMSKHMTLLADLKTMVETKKVTSSGVLLLDNYSDRIQVLRNMVHCADLSNPTKPLELYRQWTDRIMAEFFQQGDRERERGMEISPMCDKHTASVEKSQVGFIDYIVHPLWETWADLVHPDAQEILDTLEDNRDWYYSAIRQSPSPPPEEESRGPGHPPLPDKFQFELTLEEEEEEEISMAQIPCTAQEALTAQGLSGVEEALDATIAWEASPAQESLEVMAQEASLEAELEAVYLTQQAQSTGSAPVAPDEFSSREEFVVAVSHSSPSALALQSPLLPAWRTLSVSEHAPGLPGLPSTAAEVEAQREHQAAKRACSACAGTFGEDTSALPAPGGGGSGGDPT

SEQ ID NO: 906538 - protein, 563 aa, Homo sapiens
MVLPSDQGFKLLGNVLQGPEPYRLLTSGLRLHQELENLNKWGLNIFCVSDYAGGRSLTCIMYMIFQERDLLKKFRIPVDTMVTYMLTLEDHYHADVAYHNSLHAADVLQSTHVLLATPALDAVFTDLEILAALFAAAIHDVDHPGVSNQFLINTNSELALMYNDESVLENHHLAVGFKLLQEDNCDIFQNLSKRQRQSLRKMVIDMVLATDMSKHMTLLADLKTMVETKKVTSSGVLLLDNYSDRIQVLRNMVHCADLSNPTKPLELYRQWTDRIMAEFFQQGDRERERGMEISPMCDKHTASVEKSQVQARGIVDGHRVGFIDYIVHPLWETWADLVHPDAQEILDTLEDNRDWYYSAIRQSPSPPPEEESRGPGHPPLPDKFQFELTLEEEEEEEISMAQIPCTAQEALTAQGLSGVEEALDATIAWEASPAQESLEVMAQEASLEAELEAVYLTQQAQSTGSAPVAPDEFSSREEFVVAVSHSSPSALALQSPLLPAWRTLSVSEHAPGLPGLPSTAAEVEAQREHQAAKRACSACAGTFGEDTSALPAPGGGGSGGDPT

SEQ ID NO: 906539 - protein, 804 aa, Homo sapiens
ARPRGLGRIPELQLVAFPVAVAAEDEAFLPEPLAPRAPRRPRSPPSSPVFFASPSPTFRRRLRLLRSCQDLGRQAWAGAGFEAENGPTPSPGRSPLDSQASPGLVLHAGAATSQRRESFLYRSDSDYDMSPKTMSRNSSVTSEAHAEDLIVTPFAQVLASLRSVRSNFSLLTNVPVPSNKRSPLGGPTPVCKATLSEETCQQLARETLEELDWCLEQLETMQTYRSVSEMASHKFKRMLNRELTHLSEMSRSGNQVSEYISTTFLDKQNEVEIPSPTMKEREKQQAPRPRPSQPPPPPVPHLQPMSQITGLKKLMHSNSLNNSNIPRFGVKTDQEELLAQELENLNKWGLNIFCVSDYAGGRSLTCIMYMIFQAVFTDLEILAALFAAAIHDVDHPGVSNQFLINTNSELALMYNDESVLENHHLAVGFKLLQEDNCDIFQNLSKRQRQSLRKMVIDMVLATDMSKHMTLLADLKTMVETKKVTSSGVLLLDNYSDRIQVLRNMVHCADLSNPTKPLELYRQWTDRIMAEFFQQGDRERERGMEISPMCDKHTASVEKSQVGFIDYIVHPLWETWADLVHPDAQEILDTLEDNRDWYYSAIRQSPSPPPEEESRGPGHPPLPDKFQFELTLEEEEEEEISMAQIPCTAQEALTAQGLSGVEEALDATIAWEASPAQESLEVMAQEASLEAELEAVYLTQQAQSTGSAPVAPDEFSSREEFVVAVSHSSPSALALQSPLLPAWRTLSVSEHAPGLPGLPSTAAEVEAQREHQAAKRACSACAGTFGEDTSALPAPGGGGSGGDPT

SEQ ID NO: 906540 - protein, 457 aa, Homo sapiens
MYNDESVLENHHLAVGFKLLQEDNCDIFQNLSKRQRQSLRKMVIDMVGGAGAGRSGKGSLGVEGFGEEWAESQRNPQPGQSGRLLPGENFRGPGQSGGRVSAAPVTPPCPQVLATDMSKHMTLLADLKTMVETKKVTSSGVLLLDNYSDRIQVLRNMVHCADLSNPTKPLELYRQWTDRIMAEFFQQGDRERERGMEISPMCDKHTASVEKSQVGFIDYIVHPLWETWADLVHPDAQEILDTLEDNRDWYYSAIRQSPSPPPEEESRGPGHPPLPDKFQFELTLEEEEEEEISMAQIPCTAQEALTAQGLSGVEEALDATIAWEASPAQESLEVMAQEASLEAELEAVYLTQQAQSTGSAPVAPDEFSSREEFVVAVSHSSPSALALQSPLLPAWRTLSVSEHAPGLPGLPSTAAEVEAQREHQAAKRACSACAGTFGEDTSALPAPGGGGSGGDPT

SEQ ID NO: 906541 - protein, 647 aa, Homo sapiens
MPLVDFFCETCSKPWLVGWWDQFKRMLNRELTHLSEMSRSGNQVSEYISTTFLDKQNEVEIPSPTMKEREKQQAPRPRPSQPPPPPVPHLQPMSQITGLKKLMHSNSLNNSNIPRFGVKTDQEELLAQELENLNKWGLNIFCVSDYAGGRSLTCIMYMIFQERDLLKKFRIPVDTMVTYMLTLEDHYHADVAYHNSLHAADVLQSTHVLLATPALDAVFTDLEILAALFAAAIHDVDHPGVSNQFLINTNSELALMYNDESVLENHHLAVGFKLLQEDNCDIFQNLSKRQRQSLRKMVIDMVLATDMSKHMTLLADLKTMVETKKVTSSGVLLLDNYSDRIQVLRNMVHCADLSNPTKPLELYRQWTDRIMAEFFQQGDRERERGMEISPMCDKHTASVEKSQVGFIDYIVHPLWETWADLVHPDAQEILDTLEDNRDWYYSAIRQSPSPPPEEESRGPGHPPLPDKFQFELTLEEEEEEEISMAQIPCTAQEALTAQGLSGVEEALDATIAWEASPAQESLEVMAQEASLEAELEAVYLTQQAQSTGSAPVAPDEFSSREEFVVAVSHSSPSALALQSPLLPAWRTLSVSEHAPGLPGLPSTAAEVEAQREHQAAKRACSACAGTFGEDTSALPAPGGGGSGGDPT

SEQ ID NO: 906542 - protein, 859 aa, Homo sapiens
ARPRGLGRIPELQLVAFPVAVAAEDEAFLPEPLAPRAPRRPRSPPSSPVFFASPSPTFRRRLRLLRSCQDLGRQAWAGAGFEAENGPTPSPGRSPLDSQASPGLVLHAGAATSQRRESFLYRSDSDYDMSPKTMSRNSSVTSEAHAEDLIVTPFAQVLASLRSVRSNFSLLTNVPVPSNKRSPLGGPTPVCKATLSEETCQQLARETLEELDWCLEQLETMQTYRSVSEMASHKFKRMLNRELTHLSEMSRSGNQVSEYISTTFLDKQNEVEIPSPTMKEREKQQAPRPRPSQPPPPPVPHLQPMSQITGLKKLMHSNSLNNSNIPRFGVKTDQEELLAQELENLNKWGLNIFCVSDYAGGRSLTCIMYMIFQERDLLKKFRIPVDTMVTYMLTLEDHYHADVAYHNSLHAADVLQSTHVLLATPALDAVFTDLEILAALFAAAIHDVDHPGVSNQFLINTNSELALMYNDESVLENHHLAVGFKLLQEDNCDIFQNLSKRQRQSLRKMVIDMVLATDMSKHMTLLADLKTMVETKKVTSSGVLLLDNYSDRIQVLRNMVHCADLSNPTKPLELYRQWTDRIMAEFFQQGDRERERGMEISPMCDKHTASVEKSQVGFIDYIVHPLWETWADLVHPDAQEILDTLEDNRDWYYSAIRQSPSPPPEEESRGPGHPPLPDKFQFELTLEEEEEEEISMAQIPCTAQEALTAQGLSGVEEALDATIAWEASPAQESLEVMAQEASLEAELEAVYLTQQAQSTGSAPVAPDEFSSREEFVVAVSHSSPSALALQSPLLPAWRTLSVSEHAPGLPGLPSTAAEVEAQREHQAAKRACSACAGTFGEDTSALPAPGGGGSGGDPT

SEQ ID NO: 906543 - protein, 924 aa, Homo sapiens
ARPRGLGRIPELQLVAFPVAVAAEDEAFLPEPLAPRAPRRPRSPPSSPVFFASPSPTFRRRLRLLRSCQDLGRQAWAGAGFEAENGPTPSPGRSPLDSQASPGLVLHAGAATSQRRESFLYRSDSDYDMSPKTMSRNSSVTSEAHAEDLIVTPFAQVLASLRSVRSNFSLLTNVPVPSNKRSPLGGPTPVCKATLSEETCQQLARETLEELDWCLEQLETMQTYRSVSEMASHKFKRMLNRELTHLSEMSRSGNQVSEYISTTFLDKQNEVEIPSPTMKEREKQQAPRPRPSQPPPPPVPHLQPMSQITGLKKLMHSNSLNNSNIPRFGVKTDQEELLAQELENLNKWGLNIFCVSDYAGGRSLTCIMYMIFQERDLLKKFRIPVDTMVTYMLTLEDHYHADVAYHNSLHAADVLQSTHVLLATPALDAVFTDLEILAALFAAAIHDVDHPGVSNQFLINTNSELALMYNDESVLENHHLAVGFKLLQEDNCDIFQNLSKRQRQSLRKMVIDMVGGAGAGRSGKGSLGVEGFGEEWAESQRNPQPGQSGRLLPGENFRGPGQSGGRVSAAPVTPPCPQVLATDMSKHMTLLADLKTMVETKKVTSSGVLLLDNYSDRIQVLRNMVHCADLSNPTKPLELYRQWTDRIMAEFFQQGDRERERGMEISPMCDKHTASVEKSQVGFIDYIVHPLWETWADLVHPDAQEILDTLEDNRDWYYSAIRQSPSPPPEEESRGPGHPPLPDKFQFELTLEEEEEEEISMAQIPCTAQEALTAQGLSGVEEALDATIAWEASPAQESLEVMAQEASLEAELEAVYLTQQAQSTGSAPVAPDEFSSREEFVVAVSHSSPSALALQSPLLPAWRTLSVSEHAPGLPGLPSTAAEVEAQREHQAAKRACSACAGTFGEDTSALPAPGGGGSGGDPT

SEQ ID NO: 906544 - protein, 679 aa, Homo sapiens
MPLVDFFCETCSKPWLVGWWDQFKRMLNRELTHLSEMSRSGNQVSEYISTTFLDKQNEVEIPSPTMKEREKQQAPRPRPSQPPPPPVPHLQPMSQITGLKKLMHSNSLNNSNIPRFGVKTDQEELLAQELENLNKWGLNIFCVSDYAGGRSLTCIMYMIFQVMGTAGSGPGRGAHSGALEAGGGHHPAPACSQERDLLKKFRIPVDTMVTYMLTLEDHYHADVAYHNSLHAADVLQSTHVLLATPALDAVFTDLEILAALFAAAIHDVDHPGVSNQFLINTNSELALMYNDESVLENHHLAVGFKLLQEDNCDIFQNLSKRQRQSLRKMVIDMVLATDMSKHMTLLADLKTMVETKKVTSSGVLLLDNYSDRIQVLRNMVHCADLSNPTKPLELYRQWTDRIMAEFFQQGDRERERGMEISPMCDKHTASVEKSQVGFIDYIVHPLWETWADLVHPDAQEILDTLEDNRDWYYSAIRQSPSPPPEEESRGPGHPPLPDKFQFELTLEEEEEEEISMAQIPCTAQEALTAQGLSGVEEALDATIAWEASPAQESLEVMAQEASLEAELEAVYLTQQAQSTGSAPVAPDEFSSREEFVVAVSHSSPSALALQSPLLPAWRTLSVSEHAPGLPGLPSTAAEVEAQREHQAAKRACSACAGTFGEDTSALPAPGGGGSGGDPT

SEQ ID NO: 906545 - protein, 266 aa, Homo sapiens
MSDPSQLTQNVCLTQEMELSKAFSGQRTLLSAILSMLSLSFSTTSLLSNYWFVGTQKVPKPLCEKGLAAKCFDMPVSLDGDTNTSTQEVVQYNWETGDDRFSFRSFRSGMWLSCEETVEEPALLHPQSWKQFRALRSSGTAAAKGERCRSFIELTPPAKREILWLSLGTQITYIGLQFISFLLLLTDLLLTGNPACGLKLSAFAAVSSVLSGLLGMVAHMMYSQVFQATVNLGPEDWRPHVWNYGWAFYLACSLPRPLGVAVPLPY

SEQ ID NO: 906546 - protein, 165 aa, Homo sapiens
MSDPSQLTQNVCLTQEMELSKAFSGQRTLLSAILSMLSLSFSTTSLLSNYWFVGTQKVPKPLCEKGLAAKCFDMPVSLDGDTNTSTQEVVQYNWETGDDRFSFRSFRSGMWLSCEETVEEPALLHPQSWKQFRALRSSGTAAAKGRGAQVSLNLHHHTRGGEEDL

SEQ ID NO: 906547 - protein, 321 aa, Homo sapiens
MSDPSQLTQNVCLTQEMELSKAFSGQRTLLSAILSMLSLSFSTTSLLSNYWFVGTQKVPKPLCEKGLAAKCFDMPVSLDGDTNTSTQEVVQYNWETGDDRFSFRSFRSGMWLSCEETVEEPALLHPQSWKQFRALRSSGTAAAKGERCRSFIELTPPAKRGEKGLLEFATLQGPCHPTLRFGGKRLMEKASLPSPPLGLCGKNPMVIPGNADHLHRTSIHQLPPATNRLATHWEPCLWAQTERLCCCFLCPVRSPGDGGPHDVFTSLPSDCQLGSRRLETTCLELWLGLLHGLALLHLLHGVGCHHLQHVHQDGAGVQVQA

SEQ ID NO: 906548 - protein, 362 aa, Homo sapiens
MSDPSQLTQNVCLTQEMELSKAFSGQRTLLSAILSMLSLSFSTTSLLSNYWFVGTQKVPKPLCEKGLAAKCFDMPVSLDGDTNTSTQEVVQYNWETGDDRFSFRSFRSGMWLSCEETVEEPALLHPQSWKQFRALRSSGTAAAKGERCRSFIELTPPAKREILWLSLGTQITYIGLQFISFLLLLTDLLLTGNPACGLKLSAFAAVSSVLSGLLGMVAHMMYSQVFQATVNLGPEDWRPHVWNYGWAFYMAWLSFTCCMASAVTTFNTYTRMVLEFKCKHSKSFKENPNCLPHHHQCFPRRLSSAAPTVGPLTSYHQYHNQPIHSVSEGVDFYSELRNKGFQRGASQELKEAVRSSVEEEQC

SEQ ID NO: 906549 - protein, 345 aa, Homo sapiens
MSDPSQLTQNVCLTQEMELSKAFSGQRTLLSAILSMLSLSFSTTSLLSNYWFVGTQKVPKPLCEKGLAAKCFDMPVSLDGDTNTSTQEVVQYNWETGDDRFSFRSFRSGMWLSCEETVEEPAKSEMEEELKKCVYLHLYLLLCHLALLHPQSWKQFRALRSSGTAAAKGERCRSFIELTPPAKRGEKGLLEFATLQGPCHPTLRFGGKRLMEKASLPSPPLGLCGKNPMVIPGNADHLHRTSIHQLPPATNRLATHWEPCLWAQTERLCCCFLCPVRSPGDGGPHDVFTSLPSDCQLGSRRLETTCLELWLGLLHGLALLHLLHGVGCHHLQHVHQDGAGVQVQA

SEQ ID NO: 906550 - protein, 339 aa, Homo sapiens
MSDPSQLTQNVCLTQEMELSKAFSGQRTLLSAILSMLSLSFSTTSLLSNYWFVGTQKVPKPLCEKGLAAKCFDMPVSLDGDTNTSTQEVVQYNWETGDDRFSFRSFRSGMWLSCEETVEEPGERCRSFIELTPPAKREILWLSLGTQITYIGLQFISFLLLLTDLLLTGNPACGLKLSAFAAVSSVLSGLLGMVAHMMYSQVFQATVNLGPEDWRPHVWNYGWAFYMAWLSFTCCMASAVTTFNTYTRMVLEFKCKHSKSFKENPNCLPHHHQCFPRRLSSAAPTVGPLTSYHQYHNQPIHSVSEGVDFYSELRNKGFQRGASQELKEAVRSSVEEEQC

SEQ ID NO: 906551 - protein, 386 aa, Homo sapiens
MSDPSQLTQNVCLTQEMELSKAFSGQRTLLSAILSMLSLSFSTTSLLSNYWFVGTQKVPKPLCEKGLAAKCFDMPVSLDGDTNTSTQEVVQYNWETGDDRFSFRSFRSGMWLSCEETVEEPAKSEMEEELKKCVYLHLYLLLCHLALLHPQSWKQFRALRSSGTAAAKGERCRSFIELTPPAKREILWLSLGTQITYIGLQFISFLLLLTDLLLTGNPACGLKLSAFAAVSSVLSGLLGMVAHMMYSQVFQATVNLGPEDWRPHVWNYGWAFYMAWLSFTCCMASAVTTFNTYTRMVLEFKCKHSKSFKENPNCLPHHHQCFPRRLSSAAPTVGPLTSYHQYHNQPIHSVSEGVDFYSELRNKGFQRGASQELKEAVRSSVEEEQC

SEQ ID NO: 906552 - protein, 275 aa, Homo sapiens
MAKMELSKAFSGQRTLLSAILSMLSLSFSTTSLLSNYWFVGTQKVPKPLCEKGLAAKCFDMPVSLDGDTNTSTQEVVQYNWETGDDRFSFRSFRSGMWLSCEETVEEPGERCRSFIELTPPAKRGLLGMVAHMMYSQVFQATVNLGPEDWRPHVWNYGWAFYMAWLSFTCCMASAVTTFNTYTRMVLEFKCKHSKSFKENPNCLPHHHQCFPRRLSSAAPTVGPLTSYHQYHNQPIHSVSEGVDFYSELRNKGFQRGASQELKEAVRSSVEEEQC

SEQ ID NO: 906553 - protein, 237 aa, Homo sapiens
MAKMELSKAFSGQRTLLSAILSMLSLSFSTTSLLSNYWFVGTQKVPKPLCEKGLAAKCFDMPVSLDGDTNTSTQEVVQYNWETGDDRFSFRSFRSGMWLSCEETVEEPGERCRSFIELTPPAKRGEKGLLEFATLQGPCHPTLRFGGKRLMEKASLPSPPLGLCGKTDLLLTGNPACGLKLSAFAAVSSVLSGLLGMVAHMMYSQVFQATVNLGPEDWRPHVWNYGWAFYMAGLLQL

SEQ ID NO: 906554 - protein, 285 aa, Homo sapiens
MAKMELSKAFSGQRTLLSAILSMLSLSFSTTSLLSNYWFVGTQKVPKPLCEKGLAAKCFDMPVSLDGDTNTSTQEVVQYNWETGDDRFSFRSFRSGMWLSCEETVEEPGERCRSFIELTPPAKRGEKGLLEFATLQGPCHPTLRFGGKRLMEKASLPSPPLGLCGKNPMVIPGNADHLHRTSIHQLPPATNRLATHWEPCLWAQTERLCCCFLCPVRSPGDGGPHDVFTSLPSDCQLGSRRLETTCLELWLGLLHGLALLHLLHGVGCHHLQHVHQDGAGVQVQA

SEQ ID NO: 906555 - protein, 298 aa, Homo sapiens
MSDPSQLTQNVCLTQEMELSKAFSGQRTLLSAILSMLSLSFSTTSLLSNYWFVGTQKVPKPLCEKGLAAKCFDMPVSLDGDTNTSTQEVVQYNWETGDDRFSFRSFRSGMWLSCEETVEEPGERCRSFIELTPPAKRGEKGLLEFATLQGPCHPTLRFGGKRLMEKASLPSPPLGLCGKNPMVIPGNADHLHRTSIHQLPPATNRLATHWEPCLWAQTERLCCCFLCPVRSPGDGGPHDVFTSLPSDCQLGSRRLETTCLELWLGLLHGLALLHLLHGVGCHHLQHVHQDGAGVQVQA

SEQ ID NO: 906556 - protein, 326 aa, Homo sapiens
MAKMELSKAFSGQRTLLSAILSMLSLSFSTTSLLSNYWFVGTQKVPKPLCEKGLAAKCFDMPVSLDGDTNTSTQEVVQYNWETGDDRFSFRSFRSGMWLSCEETVEEPGERCRSFIELTPPAKREILWLSLGTQITYIGLQFISFLLLLTDLLLTGNPACGLKLSAFAAVSSVLSGLLGMVAHMMYSQVFQATVNLGPEDWRPHVWNYGWAFYMAWLSFTCCMASAVTTFNTYTRMVLEFKCKHSKSFKENPNCLPHHHQCFPRRLSSAAPTVGPLTSYHQYHNQPIHSVSEGVDFYSELRNKGFQRGASQELKEAVRSSVEEEQC

SEQ ID NO: 906557 - protein, 308 aa, Homo sapiens
MAKMELSKAFSGQRTLLSAILSMLSLSFSTTSLLSNYWFVGTQKVPKPLCEKGLAAKCFDMPVSLDGDTNTSTQEVVQYNWETGDDRFSFRSFRSGMWLSCEETVEEPALLHPQSWKQFRALRSSGTAAAKGERCRSFIELTPPAKRGEKGLLEFATLQGPCHPTLRFGGKRLMEKASLPSPPLGLCGKNPMVIPGNADHLHRTSIHQLPPATNRLATHWEPCLWAQTERLCCCFLCPVRSPGDGGPHDVFTSLPSDCQLGSRRLETTCLELWLGLLHGLALLHLLHGVGCHHLQHVHQDGAGVQVQA

SEQ ID NO: 906558 - protein, 349 aa, Homo sapiens
MAKMELSKAFSGQRTLLSAILSMLSLSFSTTSLLSNYWFVGTQKVPKPLCEKGLAAKCFDMPVSLDGDTNTSTQEVVQYNWETGDDRFSFRSFRSGMWLSCEETVEEPALLHPQSWKQFRALRSSGTAAAKGERCRSFIELTPPAKREILWLSLGTQITYIGLQFISFLLLLTDLLLTGNPACGLKLSAFAAVSSVLSGLLGMVAHMMYSQVFQATVNLGPEDWRPHVWNYGWAFYMAWLSFTCCMASAVTTFNTYTRMVLEFKCKHSKSFKENPNCLPHHHQCFPRRLSSAAPTVGPLTSYHQYHNQPIHSVSEGVDFYSELRNKGFQRGASQELKEAVRSSVEEEQC

SEQ ID NO: 906559 - protein, 396 aa, Homo sapiens
MSHGWSKPKVEIDFLLDCYCFGGSHMINFLNNEMKEEIAGDYPVKRQQTEMELSKAFSGQRTLLSAILSMLSLSFSTTSLLSNYWFVGTQKVPKPLCEKGLAAKCFDMPVSLDGDTNTSTQEVVQYNWETGDDRFSFRSFRSGMWLSCEETVEEPALLHPQSWKQFRALRSSGTAAAKGERCRSFIELTPPAKREILWLSLGTQITYIGLQFISFLLLLTDLLLTGNPACGLKLSAFAAVSSVLSGLLGMVAHMMYSQVFQATVNLGPEDWRPHVWNYGWAFYMAWLSFTCCMASAVTTFNTYTRMVLEFKCKHSKSFKENPNCLPHHHQCFPRRLSSAAPTVGPLTSYHQYHNQPIHSVSEGVDFYSELRNKGFQRGASQELKEAVRSSVEEEQC

SEQ ID NO: 906560 - protein, 213 aa, Homo sapiens
MSDPSQLTQNVCLTQEMELSKAFSGQRTLLSAILSMLSLSFSTTSLLSNYWFVGTQKVPKPLCEKGLAAKCFDMPVSLDGDTNTSTQEVVQYNWETGDDRFSFRSFRSGMWLSCEETVEEPALLHPQSWKQFRSFKENPNCLPHHHQCFPRRLSSAAPTVGPLTSYHQYHNQPIHSVSEGVDFYSELRNKGFQRGASQELKEAVRSSVEEEQC

SEQ ID NO: 906561 - protein, 597 aa, Homo sapiens
KTSDSSHRPSRHGFLFLRLVGLSPFSYLCVPPSRPVPGSPRSLSAMRLLPLAPGRLRRGSPRHLPSCSPALLLLVLGGCLGVFGVAAGTRRPNVVLLLTDDQDEVLGGMTPLKKTKALIGEMGMTFSSAYVPSALCCPSRASILTGKYPHNHHVVNNTLEGNCSSKSWQKIQEPNTFPAILRSMCGYQTFFAGKYLNEYGAPDAGGLEHVPLGWSYWYALEKNSKYYNYTLSINGKARKHGENYSVDYLTDVLANVSLDFLDYKSNFEPFFMMIATPAPHSPWTAAPQYQKAFQNVFAPRNKNFNIHGTNKHWLIRQAKTPMTNSSIQFLDNAFRKRWQTLLSVDDLVEKLVKRLEFTGELNNTYIFYTSDNGYHTGQFSLPIDKRQLYEFDIKVPLLVRGPGIKPNQTSKMLVANIDLGPTILDIAGYDLNKTQMDGMSLLPILRGASNLTWRSDVLVEYQGEGRNVTDPTCPSLSPGVSQCFPDCVCEDAYNNTYACVRTMSALWNLQYCEFDDQEVFVEVYNLTADPDQITNIAKTIDPELLGKMNYRLMMLQSCSGPTCRTPGVFDPGYRFDPRLMFSNRGSVRTRRFSKHLL

SEQ ID NO: 906562 - protein, 597 aa, Homo sapiens; identical to SEQ ID NO: 906561

SEQ ID NO: 906563 - protein, 186 aa, Homo sapiens [sequence omitted]

SEQ ID NO: 906564 - protein, 597 aa, Homo sapiens; identical to SEQ ID NO: 906561

SEQ ID NO: 906565 - protein, 597 aa, Homo sapiens; identical to SEQ ID NO: 906561

SEQ ID NO: 906566 - protein, 577 aa, Homo sapiens
KTSDSSHRPSRHGFLFLRLVGLSPFSYLCVPPSRPVPGSPRSLSAMRLLPLAPGRLRRGSPRHLPSCSPALLLLVLGGCLGVFGVAAGTRRPNVVLLLTDDQDEVLGGMYVPSALCCPSRASILTGKYPHNHHVVNNTLEGNCSSKSWQKIQEPNTFPAILRSMCGYQTFFAGKYLNEYGAPDAGGLEHVPLGWSYWYALEKNSKYYNYTLSINGKARKHGENYSVDYLTDVLANVSLDFLDYKSNFEPFFMMIATPAPHSPWTAAPQYQKAFQNVFAPRNKNFNIHGTNKHWLIRQAKTPMTNSSIQFLDNAFRKRWQTLLSVDDLVEKLVKRLEFTGELNNTYIFYTSDNGYHTGQFSLPIDKRQLYEFDIKVPLLVRGPGIKPNQTSKMLVANIDLGPTILDIAGYDLNKTQMDGMSLLPILRGASNLTWRSDVLVEYQGEGRNVTDPTCPSLSPGVSQCFPDCVCEDAYNNTYACVRTMSALWNLQYCEFDDQEVFVEVYNLTADPDQITNIAKTIDPELLGKMNYRLMMLQSCSGPTCRTPGVFDPGYRFDPRLMFSNRGSVRTRRFSKHLL

SEQ ID NO: 906567 - protein, 597 aa, Homo sapiens; identical to SEQ ID NO: 906561

SEQ ID NO: 906568 - protein, 597 aa, Homo sapiens; identical to SEQ ID NO: 906561

SEQ ID NO: 906569 - protein, 622 aa, Homo sapiens
MEESEPERKRARTDEVPAGGSRSEAEDEDDEDYVPYVPLRQRRQLLLQKLLQRRRKGAAEEEQQDSGSEPRGDEDDIPLGPQSNVSLLDQHQHLKEKAEARKESAKEKQLKEEEKILESVAEGRALMSVKEMAKGITYDDPIKTSWTPPRYVLSMSEERHERVRKKYHILVEGDGIPPPIKSFKEMKFPAAILRGLKKKGIHHPTPIQIQGIPTILSGRDMIGIAFTGSGKTLVFTLPVIMFCLEQEKRLPFSKREGPYGLIICPSRELARQTHGILEYYCRLLQEDSSPLLRCALCIGGMSVKEQMETIRHGVHMMVATPGRLMDLLQKKMVSLDICRYLALDEADRMIDMGFEGDIRTIFSYFKGQRQTLLFSATMPKKIQNFAKSALVKPVTINVGRAGAASLDVIQEVEYVKEEAKMVYLLECLQKTPPPVLIFAEKKADVDAIHEYLLLKGVEAVAIHGGKDQEERTKAIEAFREGKKDVLVATDVASKGLDFPAIQHVINYDMPEEIENYVHRIGRTGRSGNTGIATTFINKACDESVLMDLKALLLEAKQKVPPVLQVLHCGDESMLDIGGERGCAFCGGLGHRITDCPKLEAMQTKQVSNIGRKDYLAHSSMDF

SEQ ID NO: 906570 - protein, 42 aa, Homo sapiens
MPKKIQNFAKSALVKPVTINVGRAGAASLDVIQVGSAPDGRS

SEQ ID NO: 906571 - protein, 683 aa, Homo sapiens
GRLLLNSRPPGRMEESEPERKRARTDEVPAGGSRSEAEDEDDEDYVPYVPLRQRRQLLLQKLLQRRRKGAAEEEQQDSGSEPRGDEDDIPLGPQSNVSLLDQHQHLKEKAEARKESAKEKQLKEEEKILESVAEGRALMSVKEMAKGITYDDPIKTSWTPPRYVLSMSEERHERVRKKYHILVEGDGIPPPIKSFKEMKFPAAILRGLKKKGIHHPTPIQIQGIPTILSGRDMIGIAFTGSGKTLVFTLPVIMFCLEQEKRLPFSKREGPYGLIICPSRELARQTHGILEYYCRLLQEDSSPLLRCALCIGGMSVKEQMETIRQWVLALPAPHLCHLRVCGKAKGPFTLATPQIFTEGCCECDPQGAPSLMGSGVHMMVATPGRLMDLLQKKMVSLDICRYLALDEADRMIDMGFEGDIRTIFSYFKGQRQTLLFSATMPKKIQNFAKSALVKPVTINVGRAGAASLDVIQEVEYVKEEAKMVYLLECLQKTPPPVLIFAEKKADVDAIHEYLLLKGVEAVAIHGGKDQEERTKAIEAFREGKKDVLVATDVASKGLDFPAIQHVINYDMPEEIENYVHRIGRTGRSGNTGIATTFINKACDESVLMDLKALLLEAKQKVPPVLQVLHCGDESMLDIGGERGCAFCGGLGHRITDCPKLEAMQTKQVSNIGRKDYLAHSSMDF

SEQ ID NO: 906572 - protein, 678 aa, Homo sapiens
GRLLLNSRPPGRMEESEPERKRARTDEVPAGGSRSEAEDEDDEDYVPYVPLRQRRQLLLQKLLQRRRKGAAEEEQQDSGSEPRGDEDDIPLGPQSNVSLLDQHQHLKEKAEARKESAKEKQLKEEEKILESVAEGRALMSVKEMAKGITYDDPIKTSWTPPRYVLSMSEERHERVRKKYHILVEGDGIPPPIKSFKEMKFPAAILRGLKKKGIHHPTPIQIQGIPTILSGRDMIGIAFTGSGKTLVFTLPVIMFCLEQEKRLPFSKREGPYGLIICPSRELARQTHGILEYYCRLLQEDSSPLLRCALCIGGMSVKEQMETIRHGVHMMVATPGRLMDLLQKKMVSLDICRYLALDEADRMIDMGFEGDIRTIFSYFKGQRQTLLFSATMPKKIQNFAKSALVKPVTINVGRAGAASLDVIQEVEYVKEEAKMVYLLECLQKTPPPVLIFAEKKADVDAIHEYLLLKGVEAVAIHGGKGQGGASTGLDPAAVAALYLMPSPAGWPATPLSHGGSDSVCLTLPNQEERTKAIEAFREGKKDVLVATDVASKGLDFPAIQHVINYDMPEEIENYVHRIGRTGRSGNTGIATTFINKACDESVLMDLKALLLEAKQKVPPVLQVLHCGDESMLDIGGERGCAFCGGLGHRITDCPKLEAMQTKQVSNIGRKDYLAHSSMDF

SEQ ID NO: 906573 - protein, 664 aa, Homo sapiens
MRRGFAVARMRAAKNGGVGTRTEGRREARPRACGSGREEGSRPCLTGVCLQRARTDEVPAGGSRSEAEDEDDEDYVPYVPLRQRRQLLLQKLLQRRRKGAAEEEQQDSGSEPRGDEDDIPLGPQSNVSLLDQHQHLKEKAEARKESAKEKQLKEEEKILESVAEGRALMSVKEMAKGITYDDPIKTSWTPPRYVLSMSEERHERVRKKYHILVEGDGIPPPIKSFKEMKFPAAILRGLKKKGIHHPTPIQIQGIPTILSGRDMIGIAFTGSGKTLVFTLPVIMFCLEQEKRLPFSKREGPYGLIICPSRELARQTHGILEYYCRLLQEDSSPLLRCALCIGGMSVKEQMETIRHGVHMMVATPGRLMDLLQKKMVSLDICRYLALDEADRMIDMGFEGDIRTIFSYFKGQRQTLLFSATMPKKIQNFAKSALVKPVTINVGRAGAASLDVIQEVEYVKEEAKMVYLLECLQKTPPPVLIFAEKKADVDAIHEYLLLKGVEAVAIHGGKDQEERTKAIEAFREGKKDVLVATDVASKGLDFPAIQHVINYDMPEEIENYVHRIGRTGRSGNTGIATTFINKACDESVLMDLKALLLEAKQKVPPVLQVLHCGDESMLDIGGERGCAFCGGLGHRITDCPKLEAMQTKQVSNIGRKDYLAHSSMDF

SEQ ID NO: 906574 - protein, 757 aa, Homo sapiens
MRRGFAVARMRAAKNGGVGTRTEGRREARPRACGSGREEGSRPCLTGVCLQRARTDEVPAGGSRSEAEDEDDEDYVPYVPLRQRRQLLVRGTRPGRDGAVTAGSQGAGVASASVEEEGSLRSELQYTRARPPDKRGTDGLICGVGQLCASGTGSSPQSQDPDADLVDSTAHPICGSRVEPQLQKLLQRRRKGAAEEEQQDSGSEPRGDEDDIPLGPQSNVSLLDQHQHLKEKAEARKESAKEKQLKEEEKILESVAEGRALMSVKEMAKGITYDDPIKTSWTPPRYVLSMSEERHERVRKKYHILVEGDGIPPPIKSFKEMKFPAAILRGLKKKGIHHPTPIQIQGIPTILSGRDMIGIAFTGSGKTLVFTLPVIMFCLEQEKRLPFSKREGPYGLIICPSRELARQTHGILEYYCRLLQEDSSPLLRCALCIGGMSVKEQMETIRHGVHMMVATPGRLMDLLQKKMVSLDICRYLALDEADRMIDMGFEGDIRTIFSYFKGQRQTLLFSATMPKKIQNFAKSALVKPVTINVGRAGAASLDVIQEVEYVKEEAKMVYLLECLQKTPPPVLIFAEKKADVDAIHEYLLLKGVEAVAIHGGKDQEERTKAIEAFREGKKDVLVATDVASKGLDFPAIQHVINYDMPEEIENYVHRIGRTGRSGNTGIATTFINKACDESVLMDLKALLLEAKQKVPPVLQVLHCGDESMLDIGGERGCAFCGGLGHRITDCPKLEAMQTKQVSNIGRKDYLAHSSMDF

SEQ ID NO: 906575 - protein, 447 aa, Homo sapiens
GRLLLNSRPPGRMEESEPERKRARTDEVPAGGSRSEAEDEDDEDYVPYVPLRQRRQLLLQKLLQRRRKGAAEEEQQDSGSEPRGDEDDIPLGPQSNVSLLDQHQHLKEKAEARKESAKEKQLKEEEKILESVAEGRALMSVKEMAKGITYDDPIKTSWTPPRYVLSMSEERHERVRKKYHILVEGDGIPPPIKSFKEMKFPAAILRGLKKKGIHHPTPIQIQGIPTILSGRDMIGIAFTGSGKTLVFTLPVIMFCLEQEKRLPFSKREGPYGLIICPSRELARQTHGILEYYCRLLQEDSSPLLRCALCIGGMSVKEQMETIRHGVHMMVATPGRLMDLLQKKMVSLDICRYLALDEADRMIDMGFEGDIRTIFSYFKGQRQTLLFSATMPKKIQNFAKSALVKPVTINVGRAGDNIMLSPNTRYESINTDIQLTSCYRAILVSLKG

SEQ ID NO: 906576 - protein, 274 aa, Homo sapiens
MIDMGFEGDIRTIFSYFKGQRQTLLFSATMPKKIQNFAKSALVKPVTINVGRAGAASLDVIQEVEYVKEEAKMVYLLECLQKTPPPVLIFAEKKADVDAIHEYLLLKGVEAVAIHGGKDQEERTKAIEAFREGKKDVLVATDVASKGLDFPAIQHVINYDMPEEIENYVHRIGRTGRSGNTGIATTFINKACDESVLMDLKALLLEAKQKVPPVLQVLHCGDESMLDIGGERGCAFCGGLGHRITDCPKLEAMQTKQVSNIGRKDYLAHSSMDF

SEQ ID NO: 906577 - protein, 114 aa, Homo sapiens
MPEEIENYVHRIGRTGRSGNTGIATTFINKACDESVLMDLKALLLEAKQKVPPVLQVLHCGDESMLDIGGERGCAFCGGLGHRITDCPKLEAMQTKQVSNIGRKDYLAHSSMDF

SEQ ID NO: 906578 - protein, 90 aa, Homo sapiens
MKTMSVGFHSHPERPEEERHSPPNTHSDPGHPHHVSVDCGPGVLEEGWNREEQWLGVLHLLLKLALGSSSPNSLSGRDMIGIAFTGSGKT

SEQ ID NO: 906579 - protein, 159 aa, Homo sapiens
ADVTVEGCTGALHILARDPMNRMEIFRLNTIPLFVQLLYSSVENIQRVAAGVLCELAQDKEAADAIDAEGASAPLMELLHSRNEGTATYAAAVLFRISEDKNPDYRKRVSVELTNSLFKHDPGCLGHRITDCPKLEAMQTKQVSNIGRKDYLAHSSMDF

SEQ ID NO: 906580 - protein, 634 aa, Homo sapiens
GRLLLNSRPPGRMEESEPERKRARTDEVPAGGSRSEAEDEDDEDYVPYVPLRQRRQLLLQKLLQRRRKGAAEEEQQDSGSEPRGDEDDIPLGPQSNVSLLDQHQHLKEKAEARKESAKEKQLKEEEKILESVAEGRALMSVKEMAKGITYDDPIKTSWTPPRYVLSMSEERHERVRKKYHILVEGDGIPPPIKSFKEMKFPAAILRGLKKKGIHHPTPIQIQGIPTILSGRDMIGIAFTGSGKTLVFTLPVIMFCLEQEKRLPFSKREGPYGLIICPSRELARQTHGILEYYCRLLQEDSSPLLRCALCIGGMSVKEQMETIRHGVHMMVATPGRLMDLLQKKMVSLDICRYLALDEADRMIDMGFEGDIRTIFSYFKGQRQTLLFSATMPKKIQNFAKSALVKPVTINVGRAGAASLDVIQEVEYVKEEAKMVYLLECLQKTPPPVLIFAEKKADVDAIHEYLLLKGVEAVAIHGGKDQEERTKAIEAFREGKKDVLVATDVASKGLDFPAIQHVINYDMPEEIENYVHRIGRTGRSGNTGIATTFINKACDESVLMDLKALLLEAKQKVPPVLQVLHCGDESMLDIGGERGCAFCGGLGHRITDCPKLEAMQTKQVSNIGRKDYLAHSSMDF

SEQ ID NO: 906581 - protein, 673 aa, Homo sapiens
GRLLLNSRPPGRMEESEPERKRARTDEVPAGGSRSEAEDEDDEDYVPYVPLRQRRQLLLQKLLQRRRKGAAEEEQQDSGSEPRGDEDDIPLGPQSNVSLLDQHQHLKEKAEARKESAKEKQLKEEEKILESVAEGRALMSVKEMAKGITYDDPIKTSWTPPRYVLSMSEERHERVRKKYHILVEGDGIPPPIKSFKEMKFPAAILRGLKKKGIHHPTPIQIQGIPTILSGRDMIGIAFTGSGKTLVFTLPVIMFCLEQEKRLPFSKREGPYGLIICPSRELARQTHGILEYYCRLLQEDSSPLLRCALCIGGMSVKEQMETIRHAVQSSADHQRPWTRPSVHRWARPHPGGLPPRTSEYVGRCGVHMMVATPGRLMDLLQKKMVSLDICRYLALDEADRMIDMGFEGDIRTIFSYFKGQRQTLLFSATMPKKIQNFAKSALVKPVTINVGRAGAASLDVIQEVEYVKEEAKMVYLLECLQKTPPPVLIFAEKKADVDAIHEYLLLKGVEAVAIHGGKDQEERTKAIEAFREGKKDVLVATDVASKGLDFPAIQHVINYDMPEEIENYVHRIGRTGRSGNTGIATTFINKACDESVLMDLKALLLEAKQKVPPVLQVLHCGDESMLDIGGERGCAFCGGLGHRITDCPKLEAMQTKQVSNIGRKDYLAHSSMDF

SEQ ID NO: 906582 - protein, 634 aa, Homo sapiens; identical to SEQ ID NO: 906580

SEQ ID NO: 906583 - protein, 402 aa, Homo sapiens
MIGIAFTGSGKTLVFTLPVIMFCLEQEKRLPFSKREGPYGLIICPSRELARQTHGILEYYCRLLQEDSSPLLRCALCIGGMSVKEQMETIRHGVHMMVATPGRLMDLLQKKMVSLDICRYLALDEADRMIDMGFEGDIRTIFSYFKGQRQTLLFSATMPKKIQNFAKSALVKPVTINVGRAGAASLDVIQEVEYVKEEAKMVYLLECLQKTPPPVLIFAEKKADVDAIHEYLLLKGVEAVAIHGGKDQEERTKAIEAFREGKKDVLVATDVASKGLDFPAIQHVINYDMPEEIENYVHRIGRTGRSGNTGIATTFINKACDESVLMDLKALLLEAKQKVPPVLQVLHCGDESMLDIGGERGCAFCGGLGHRITDCPKLEAMQTKQVSNIGRKDYLAHSSMDF

SEQ ID NO: 906584 - protein, 382 aa, Homo sapiens
MFCLEQEKRLPFSKREGPYGLIICPSRELARQTHGILEYYCRLLQEDSSPLLRCALCIGGMSVKEQMETIRHGVHMMVATPGRLMDLLQKKMVSLDICRYLALDEADRMIDMGFEGDIRTIFSYFKGQRQTLLFSATMPKKIQNFAKSALVKPVTINVGRAGAASLDVIQEVEYVKEEAKMVYLLECLQKTPPPVLIFAEKKADVDAIHEYLLLKGVEAVAIHGGKDQEERTKAIEAFREGKKDVLVATDVASKGLDFPAIQHVINYDMPEEIENYVHRIGRTGRSGNTGIATTFINKACDESVLMDLKALLLEAKQKVPPVLQVLHCGDESMLDIGGERGCAFCGGLGHRITDCPKLEAMQTKQVSNIGRKDYLAHSSMDF

SEQ ID NO: 906585 - protein, 200 aa, Homo sapiens
GRLLLNSRPPGRMEESEPERKRARTDEVPAGGSRSEAEDEDDEDYVPYVPLRQRRQLLLQKLLQRRRKGAAEEEQQDSGSEPRGDEDDIPLGPQSNVSLLDQHQHLKEKAEARKESAKEKQLKEEEKILESVAEGRALMSVKEMAKGITYDDPIKTRYVCTVCSCPCLGWYMQGCSQASYSQGSLDPCYPSTAGLHPVMF

SEQ ID NO: 906586 - protein, 368 aa, Homo sapiens
RSAGFFPARVAANAPPPASHPRRPPRPGTNGWSRRGSCRASWSRDCSGVRSRRVALGMAMDQVNALCEQLVKAVTVMMDPNSTQRYRLEALKFCEEFKEKCPICVPCGLRLAEKTQVAIVRHFGLQILEHVVKFRWNGMSRLEKVYLKNSVMELIANGTLNILEEENHIKDALSRIVVEMIKREWPQHWPDMLIELDTLSKQGETQTELVMFILLRLAEDVVTFQTLPPQRRRDIQQTLTQNMERIFSFLLNTLQENVNKYQQVKTDTSQESKAQANCRVGVAALNTLAGYIDWVSMSHITAENCKLLEILCLLLNEQELQLGAAECLLIAVSRKGKLEDRKPLMVLFGDVAMHYILSAAQTADGGGW

SEQ ID NO: 906587 - protein, 1123 aa, Homo sapiens [sequence omitted]

SEQ ID NO: 906588 - protein, 484 aa, Homo sapiens [sequence omitted]

SEQ ID NO: 906589 - protein, 1307 aa, Homo sapiens
RSAGFFPARVAANAPPPASHPRRPPRPGTNGWSRRGSCRASWSRDCSGVRSRRVALGMAMDQVNALCEQLVKAVTVMMDPNSTQRYRLEALKFCEEFKEKCPICVPCGLRLAEKTQVAIVRHFGLQILEHVVKFRWNGMSRLEKVYLKNSVMELIANGTLNILEEENHIKDALSRIVVEMIKREWPQHWPDMLIELDTLSKQGETQTELVMFILLRLAEDVVTFQTLPPQRRRDIQQTLTQNMERIFSFLLNTLQENVNKYQQVKTDTSQESKAQANCRVGVAALNTLAGYIDWVSMSHITAENCKLLEILCLLLNEQELQLGAAECLLIAVSRKGKLEDRKPLMVLFGDVAMHYILSAAQTADGGGLVEKHYVFLKRLCQVLCALGNQLCALLGADSDVETPSNFGKYLESFLAFTTHPSQFLRSSTQMTWGALFRHEILSRDPLLLAIIPKYLRASMTNLVKMGFPSKTDSPSCEYSRFDFDSDEDFNAFFNSSRAQQGEVMRLACRLDPKTSFQMAGEWLKYQLSTFLDAGSVNSCSAVGTGEGSLCSVFSPSFVQWEAMTLFLESVITQMFRTLNREEIPVNDGIELLQMVLNFDTKDPLILSCVLTNVSALFPFVTYRPEFLPQVFSKLFSSVTFETVEESKAPRTRAVRNVRRHACSSIIKMCRDYPQLVLPNFDMLYNHVKQLLSNELLLTQMEKCALMEALVLISNQFKNYERQKVFLEELMAPVASIWLSQDMHRVLSDVDAFIAYVGTDQKSCDPGLEDPCGLNRARMSFCVYSILGVVKRTCWPTDLEEAKAGGFVVGYTSSGNPIFRNPCTEQILKLLDNLLALIRTHNTLYAPEMLAKMAEPFTKALDMLDAEKSAILGLPQPLLELNDSPVFKTVLERMQRFFSTLYENCFHILGKAGPSMQQDFYTVEDLATQLLSSAFVNLNNIPDYRLRPMLRVFVKPLVLFCPPEHYEALVSPILGPLFTYLHMRLSQKWQVINQRSLLCGEDEAADENPESQEMLEEQLVRMLTREVMDLITVCCVSKKGADHSSAPPADGDDEEMMATEVTPSAMAELTDLGKCLMKHEDVCTALLITAFNSLAWKDTLSCQRTTSQLCWPLLKQVWLFTPFPCPSWKVWVMQTDYIIQKNWGAEALREAPCGPKAQLSPQVLSGTLLADAVTWLFTSVLKGLQMHGQHDGCMASLVHLAFQIYEALRPRYLEIRAVMEQIPEIQKDSLDQFDCKLLNPSLQKVADKRRKDQFKRLIAGCIGKPLGEQFRKEVHIKNLPSLFKKTKPMLETEVLDNDGGGLATIFEP

SEQ ID NO: 906590 - protein, 1261 aa, Homo sapiens
RSAGFFPARVAANAPPPASHPRRPPRPGTNGWSRRGSCRASWSRDCSGVRSRRVALGMAMDQVNALCEQLVKAVTVMMDPNSTQRYRLEALKFCEEFKEKCPICVPCGLRLAEKTQVAIVRHFGLQILEHVVKFRWNGMSRLEKVYLKNSVMELIANGTLNILEEENHIKDALSRIVVEMIKREWPQHWPDMLIELDTLSKQGETQTELVMFILLRLAEDVVTFQTLPPQRRRDIQQTLTQNMERIFSFLLNTLQENVNKYQQVKTDTSQESKAQANCRVGVAALNTLAGYIDWVSMSHITAENCKLLEILCLLLNEQELQLGAAECLLIAVSRKGKLEDRKPLMVLFGDVAMHYILSAAQTADGGGLVEKHYVFLKRLCQVLCALGNQLCALLGADSDVETPSNFGKYLESFLAFTTHPSQFLRSSTQMTWGALFRHEILSRDPLLLAIIPKYLRASMTNLVKMGFPSKTDSPSCEYSRFDFDSDEDFNAFFNSSRAQQGEVMRLACRLDPKTSFQMAGEWLKYQLSTFLDAGSVNSCSAVGTGEGSLCSVFSPSFVQWEAMTLFLESVITQMFRTLNREEIPVNDGIELLQMVLNFDTKDPLILSCVLTNVSALFPFVTYRPEFLPQVFSKLFSSVTFETVEESKAPRTRAVRNVRRHACSSIIKMCRDYPQLVLPNFDMLYNHVKQLLSNELLLTQMEKCALMEALVLISNQFKNYERQKVFLEELMAPVASIWLSQDMHRVLSDVDAFIAYVGTDQKSCDPGLEDPCGLNRARMSFCVYSILGVVKRTCWPTDLEEAKAGGFVVGYTSSGNPIFRNPCTEQILKLLDNLLALIRTHNTLYAPEMLAKMAEPFTKALDMLDAEKSAILGLPQPLLELNDSPVFKTVLERMQRFFSTLYENCFHILGKAGPSMQQDFYTVEDLATQLLSSAFVNLNNIPDYRLRPMLRVFVKPLVLFCPPEHYEALVSPILGPLFTYLHMRLSQKWQVINQRSLLCGEDEAADENPESQEMLEEQLVRMLTREVMDLITVCCVSKKGADHSSAPPADGDDEEMMATEVTPSAMAELTDLGKCLMKHEDVCTALLITAFNSLAWKDTLSCQRTTSQLCWPLLKQVLSGTLLADAVTWLFTSVLKGLQMHGQHDGCMASLVHLAFQIYEALRPRYLEIRAVMEQIPEIQKDSLDQFDCKLLNPSLQKVADKRRKDQFKRLIAGCIGKPLGEQFRKEVHIKNLPSLFKKTKPMLETEVLDNDGGGLATIFEP

SEQ ID NO: 906591 - protein, 205 aa, Homo sapiens
MCNNHQRKLCFFFHCNSSSFPVQDVCTALLITAFNSLAWKDTLSCQRTTSQLCWPLLKQVLSGTLLADAVTWLFTSVLKGLQMHGQHDGCMASLVHLAFQIYEALRPRYLEIRAVMEQIPEIQKDSLDQFDCKLLNPSLQKVADKRRKDQFKRLIAGCIGKPLGEQFRKEVHIKNLPSLFKKTKPMLETEVLDNDGGGLATIFEP

SEQ ID NO: 906592 - protein, 1238 aa, Homo sapiens
RSAGFFPARVAANAPPPASHPRRPPRPGTNGWSRRGSCRASWSRDCSGVRSRRVALGMAMDQVNALCEQLVKAVTVMMDPNSTQRYRLEALKFCEEFKEKCPICVPCGLRLAEKTQVAIVRHFGLQILEHVVKFRWNGMSRLEKVYLKNSVMELIANGTLNILEEENHIKDALSRIVVEMIKREWPQHWPDMLIELDTLSKQGETQTELVMFILLRLAEDVVTFQTLPPQRRRDIQQTLTQNMERIFSFLLNTLQENVNKYQQVKTDTSQESKAQANCRVGVAALNTLAGYIDWVSMSHITAENCKLLEILCLLLNEQELQLGAAECLLIAVSRKGKLEDRKPLMVLFGDVAMHYILSAAQTADGGGLVEKHYVFLKRLCQVLCALGNQLCALLGADSDVETPSNFGKYLESFLAFTTHPSQFLRSSTQMTWGALFRHEILSRDPLLLAIIPKYLRASMTNLVKMGFPSKTDSPSCEYSRFDFDSDEDFNAFFNSSRAQQGEVMRLACRLDPKTSFQMAGEWLKYQLSTFLDAGSVNSCSAVGTGEGSLCSVFSPSFVQWEAMTLFLESVITQMFRTLNREEIPVNDGIELLQMVLNFDTKDPLILSCVLTNVSALFPFVTYRPEFLPQVFSKLFSSVTFETVEESKAPRTRAVRNVRRHACSSIIKMCRDYPQLVLPNFDMLYNHVKQLLSNELLLTQMEKCALMEALVLISNQFKNYERQKVFLEELMAPVASIWLSQDMHRVLSDVDAFIAYVGTDQKSCDPGLEDPCGLNRARMSFCVYSILGVVKRTCWPTDLEEAKAGGFVVGYTSSGNPIFRNPCTEQILKLLDNLLALIRTHNTLYAPEMLAKMAEPFTKALDMLDAEKSAILGLPQPLLELNDSPVFKTVLERMQRFFSTLYENCFHILGKAGPSMQQDFYTVEDLATQLLSSAFVNLNNIPDYRLRPMLRVFVKPLVLFCPPEHYEALVSPILGPLFTYLHMRLSQKWQVINQRSLLCGEDEAADENPESQEMLEEQLVRMLTREVMDLITVCCVSKKGADHSSAPPADGDDEEMMATEVTPSAMAELTDLGKCLMKHEDVCTALLITAFNSLAWKDTLSCQRTTSQLCWPLLKQVLSGTLLADAVTWLFTSVLKGLQMHGQHDGCMASLVHLAFQIYEALRPRYLEIRAVMEQIPEIQKDSLDQFDCKLLNPSLQKVADKRRKDQFKRLIAGCIGKPLGEQFRKEVHIKNLPFVADL

SEQ ID NO: 906593 - protein, 74 aa, Homo sapiens
VYHGLHEYSTSILGPLFTYLHMRLSQKWQVINQRSLLCGEDEAADGEVMDLITVCCVSKKGADHSSAPPADGDE

SEQ ID NO: 906594 - protein, 177 aa, Homo sapiens
  misc_feature (13)..(13): Xaa can be any naturally occurring amino acid
MLMLSLRMWVQIXKSCDPGPGGSVQWEAMTLFLESVITQMFRTLNREEIPVNDGIELLQMVLNFDTKDPLILSCVLTNVSALFPFVTYRPEFLPQVFSKLFSSVTFETVEESKCHLTFHHCQPGKRSRSGAGENRPCAGPEVIILKYQERELGLKLFCLDVPDSSHSTWRFGFSKKS

SEQ ID NO: 906595 - protein, 1052 aa, Homo sapiens
RSAGFFPARVAANAPPPASHPRRPPRPGTNGWSRRGSCRASWSRDCSGVRSRRVALGMAMDQVNALCEQLVKAVTVMMDPNSTQRYRLEALKFCEEFKEKCPICVPCGLRLAEKTQVAIVRHFGLQILEHVVKFRWNGMSRLEKVYLKNSVMELIANGTLNILEEENHIKDALSRIVVEMIKREWPQHWPDMLIELDTLSKQGETQTELVMFILLRLAEDVVTFQTLPPQRRRDIQQTLTQNMERIFSFLLNTLQENVNKYQQVKTDTSQESKAQANCRVGVAALNTLAGYIDWVSMSHITAENCKLLEILCLLLNEQELQLGAAECLLIAVSRKGKLEDRKPLMVLFGDVAMHYILSAAQTADGGGLVEKHYVFLKRLCQVLCALGNQLCALLGADSDVETPSNFGKYLESFLAFTTHPSQFLRSSTQMTWGALFRHEILSRDPLLLAIIPKYLRASMTNLVKMGFPSKTDSPSCEYSRFDFDSDEDFNAFFNSSRAQQGEVMRLACRLDPKTSFQMAGEWLKYQLSTFLDAGSVNSCSAVGTGEGSLCSVFSPSFVQWEAMTLFLESVITQMFRTLNREEIPVNDGIELLQMVLNFDTKDPLILSCVLTNVSALFPFVTYRPEFLPQVFSKLFSSVTFETVEESKAPRTRAVRNVRRHACSSIIKMCRDYPQLVLPNFDMLYNHVKQLLSNELLLTQMEKCALMEALVLISNQFKNYERQKVFLEELMAPVASIWLSQDMHRVLSDVDAFIAYVGTDQKSCDPGLEDPCGLNRARMSFCVYSILGVVKRTCWPTDLEEAKAGGFVVGYTSSGNPIFRNPCTEQILKLLDNLLALIRTHNTLYAPEMLAKMAEPFTKALDMLDAEKSAILGLPQPLLELNDSPVFKTVLERMQRFFSTLYENCFHILGKAGPSMQQDFYTVEDLATQLLSSAFVNLNNIPDYRLRPMLRVFVKPLVLFCPPEHYEALVSPILGPLFTYLHMRLSQKWQVINQRSLLCGEDEAADENPESQEMLEEQLVRMLTREVMDLITVCCVSKKGADHSSAPPADGDE

SEQ ID NO: 906596 - protein, 757 aa, Homo sapiens
RSAGFFPARVAANAPPPASHPRRPPRPGTNGWSRRGSCRASWSRDCSGVRSRRVALGMAMDQVNALCEQLVKAVTVMMDPNSTQRYRLEALKFCEEFKEKCPICVPCGLRLAEKTQVAIVRHFGLQILEHVVKFRWNGMSRLEKVYLKNSVMELIANGTLNILEEENHIKDALSRIVVEMIKREWPQHWPDMLIELDTLSKQGETQTELVMFILLRLAEDVVTFQTLPPQRRRDIQQTLTQNMERIFSFLLNTLQENVNKYQQVKTDTSQESKAQANCRVGVAALNTLAGYIDWVSMSHITAENCKLLEILCLLLNEQELQLGAAECLLIAVSRKGKLEDRKPLMVLFGDVAMHYILSAAQTADGGGLVEKHYVFLKRLCQVLCALGNQLCALLGADSDVETPSNFGKYLESFLAFTTHPSQFLRSSTQMTWGALFRHEILSRDPLLLAIIPKYLRASMTNLVKMGFPSKTDSPSCEYSRFDFDSDEDFNAFFNSSRAQQGEVMRLACRLDPKTSFQMAGEWLKYQLSTFLDAGSVNSCSAVGTGEGSLCSVFSPSFVQWEAMTLFLESVITQMFRTLNREEIPVNDGIELLQMVLNFDTKDPLILSCVLTNVSALFPFVTYRPEFLPQVFSKLFSSVTFETVEESKAPRTRAVRNVRRHACSSIIKMCRDYPQLVLPNFDMLYNHVKQLLSNELLLTQMEKCALMEALVLISNQFKNYERQKVFLEELMAPVASIWLSQDMHRVLSDVDAGRRGTE

SEQ ID NO: 906597 - protein, 1261 aa, Homo sapiens; identical to SEQ ID NO: 906590

SEQ ID NO: 906598 - protein, 76 aa, Homo sapiens
MLYNHVKQLLSNELLLTQMEKCALMEALVLISNQFKNYERQKVFLEELMAPVASIWLSQDMHRVLSDVDAGRRGTE

SEQ ID NO: 906599 - protein, 1042 aa, Homo sapiens
RSAGFFPARVAANAPPPASHPRRPPRPGTNGWSRRGSCRASWSRDCSGVRSRRVALGMAMDQVNALCEQLVKAVTVMMDPNSTQRYRLEALKFCEEFKEKCPICVPCGLRLAEKTQVAIVRHFGLQILEHVVKFRWNGMSRLEKVYLKNSVMELIANGTLNILEEENHIKDALSRIVVEMIKREWPQHWPDMLIELDTLSKQGETQTELVMFILLRLAEDVVTFQTLPPQRRRDIQQTLTQNMERIFSFLLNTLQENVNKYQQVKTDTSQESKAQANCRVGVAALNTLAGYIDWVSMSHITAENCKLLEILCLLLNEQELQLGAAECLLIAVSRKGKLEDRKPLMVLFGDVAMHYILSAAQTADGGGLVEKHYVFLKRLCQVLCALGNQLCALLGADSDVETPSNFGKYLESFLAFTTHPSQFLRSSTQMTWGALFRHEILSRDPLLLAIIPKYLRASMTNLVKMGFPSKTDSPSCEYSRFDFDSDEDFNAFFNSSRAQQGEVMRLACRLDPKTSFQMAGEWLKYQLSTFLDAGSVNSCSAVGTGEGSLCSVFSPSFVQWEAMTLFLESVITQMFRTLNREEIPVNDGIELLQMVLNFDTKDPLILSCVLTNVSALFPFVTYRPEFLPQVFSKLFSSVTFETVEESKAPRTRAVRNVRRHACSSIIKMCRDYPQLVLPNFDMLYNHVKQLLSNELLLTQMEKCALMEALVLISNQFKNYERQKVFLEELMAPVASIWLSQDMHRVLSDVDAFIAYVGTDQKSCDPGLEDPCGLNRARMSFCVYSILGVVKRTCWPTDLEEAKAGGFVVGYTSSGNPIFRNPCTEQILKLLDNLLALIRTHNTLYAPEMLAKMAEPFTKALDMLDAEKSAILGLPQPLLELNDSPVFKTVLERMQRFFSTLYENCFHILGKAGPSMQQDFYTVEDLATQLLSSAFVNLNNIPDYRLRPMLRVFVKPLVLFCPPEHYEALVSPILGPLFTYLHMRLSQKWQVINQRSLLCGEDEAADENPESQEMLEEQLRFAVFQRRVLTTVVLPQQMETMKK

SEQ ID NO: 906600 - protein, 1261 aa, Homo sapiens; identical to SEQ ID NO: 906590

SEQ ID NO: 906601 - protein, 364 aa, Homo sapiens
TPATLYSSALFFFIAVVTTQHYVFIYVFLSYLSPMLECKLPSGKGPIVLYLLSPVTKSVSGAQIFVQQQSNFSICSILCFCLEAPISLMYSLSASLEDQPWAWALCGGGRAPSTTEPPLSLEHSALLCFLRFCQYKIFFSVLKGWSLTFYSLITDEEMMATEVTPSAMAELTDLGKCLMKHEDVCTALLITAFNSLAWKDTLSCQRTTSQLCWPLLKQVLSGTLLADAVTWLFTSVLKGLQMHGQHDGCMASLVHLAFQIYEALRPRYLEIRAVMEQIPEIQKDSLDQFDCKLLNPSLQKVADKRRKDQFKRLIAGCIGKPLGEQFRKEVHIKNLPSLFKKTKPMLETEVLDNDGGGLATIFEP

SEQ ID NO: 906602 - protein, 123 aa, Homo sapiens [sequence omitted]

SEQ ID NO: 906603 - protein, 1088 aa, Homo sapiens
RSAGFFPARVAANAPPPASHPRRPPRPGTNGWSRRGSCRASWSRDCSGVRSRRVALGMAMDQVNALCEQLVKAVTVMMDPNSTQRYRLEALKFCEEFKEKCPICVPCGLRLAEKTQVAIVRHFGLQILEHVVKFRWNGMSRLEKVYLKNSVMELIANGTLNILEEENHIKDALSRIVVEMIKREWPQHWPDMLIELDTLSKQGETQTELVMFILLRLAEDVVTFQTLPPQRRRDIQQTLTQNMERIFSFLLNTLQENVNKYQQVKTDTSQESKAQANCRVGVAALNTLAGYIDWVSMSHITAENCKLLEILCLLLNEQELQLGAAECLLIAVSRKGKLEDRKPLMVLFGDVAMHYILSAAQTADGGGLVEKHYVFLKRLCQVLCALGNQLCALLGADSDVETPSNFGKYLESFLAFTTHPSQFLRSSTQMTWGALFRHEILSRDPLLLAIIPKYLRASMTNLVKMGFPSKTDSPSCEYSRFDFDSDEDFNAFFNSSRAQQGEVMRLACRLDPKTSFQMAGEWLKYQLSTFLDAGSVNSCSAVGTGEGSLCSVFSPSFVQWEAMTLFLESVITQMFRTLNREEIPVNDGIELLQMVLNFDTKDPLILSCVLTNVSALFPFVTYRPEFLPQVFSKLFSSVTFETVEESKAPRTRAVRNVRRHACSSIIKMCRDYPQLVLPNFDMLYNHVKQLLSNELLLTQMEKCALMEALVLISNQFKNYERQKVFLEELMAPVASIWLSQDMHRVLSDVDAFIAYVGTDQKSCDPGLEDPCGLNRARMSFCVYSILGVVKRTCWPTDLEEAKAGGFVVGYTSSGNPIFRNPCTEQILKLLDNLLALIRTHNTLYAPEMLAKMAEPFTKALDMLDAEKSAILGLPQPLLELNDSPVFKTVLERMQRFFSTLYENCFHILGKAGPSMQQDFYTVEDLATQLLSSAFVNLNNIPDYRLRPMLRVFVKPLVLFCPPEHYEALVSPILGPLFTYLHMRLSQKWQVINQRSLLCGEDEAADENPESQEMLEEQLVRMLTREVMDLITVCCVSKKGADHSSAPPADGDDEEMMATEVTPSAMAELTDLLSIQSTDKRVSPRAEVD

SEQ ID NO: 906604 - protein, 1088 aa, Homo sapiens; identical to SEQ ID NO: 906603

SEQ ID NO: 906605 - protein, 838 aa, Homo sapiens
RSAGFFPARVAANAPPPASHPRRPPRPGTNGWSRRGSCRASWSRDCSGVRSRRVALGMAMDQVNALCEQLVKAVTVMMDPNSTQRYRLEALKFCEEFKEKCPICVPCGLRLAEKTQVAIVRHFGLQILEHVVKFRWNGMSRLEKVYLKNSVMELIANGTLNILEEENHIKDALSRIVVEMIKREWPQHWPDMLIELDTLSKQGETQTELVMFILLRLAEDVVTFQTLPPQRRRDIQQTLTQNMERIFSFLLNTLQENVNKYQQVKTDTSQESKAQANCRVGVAALNTLAGYIDWVSMSHITAENCKLLEILCLLLNEQELQLGAAECLLIAVSRKGKLEDRKPLMVLFGDVAMHYILSAAQTADGGGLVEKHYVFLKRLCQVLCALGNQLCALLGADSDVETPSNFGKYLESFLAFTTHPSQFLRSSTQMTWGALFRHEILSRDPLLLAIIPKYLRASMTNLVKMGFPSKTDSPSCEYSRFDFDSDEDFNAFFNSSRAQQGEVMRLACRLDPKTSFQMAGEWLKYQLSTFLDAGSVNSCSAVGTGEGSLCSVFSPSFVQWEAMTLFLESVITQMFRTLNREEIPVNDGIELLQMVLNFDTKDPLILSCVLTNVSALFPFVTYRPEFLPQVFSKLFSSVTFETVEESKAPRTRAVRNVRRHACSSIIKMCRDYPQLVLPNFDMLYNHVKQLLSNELLLTQMEKCALMEALVLISNQFKNYERQKVFLEELMAPVASIWLSQDMHRVLSDVDAFIAYVGTDQKSCDPGLEDPCGLNRARMSFCVYSILGVVKRTCWPTDLEEAKAGGFVVGYTSSGNPIFRNPCTEQILKLLDNLLALIR

SEQ ID NO: 906606 - protein, 94 aa, Homo sapiens
  misc_feature (1)..(1): Xaa can be any naturally occurring amino acid
  misc_feature (7)..(7): Xaa can be any naturally occurring amino acid
  misc_feature (10)..(10): Xaa can be any naturally occurring amino acid
  misc_feature (15)..(15): Xaa can be any naturally occurring amino acid
XKNPWGXGVXDTFVXEEIWGEVAIDLKSGSGKVYQGPAKGAADTTIILSDEDFMEVVLGKLDPQKAFFSGRLKARGNIMLSQKLQMILKDYAKL

SEQ ID NO: 906607 - protein, 762 aa, Homo sapiens
FPASSCPAVGVQRLCLFVCVSLQALFMGSPLRFDGRVVLVTGAGAGLGRAYALAFAERGALVVVNDLGGDFKGVGKGSLAADKVVEEIRRRGGKAVANYDSVEEGEKVVKTALDAFGRIDVVVNNAGILRDRSFARISDEDWDIIHRVHLRGSFQVTRAAWEHMKKQKYGRIIMTSSASGIYGNFGQANYSAAKLGLLGLANSLAIEGRKSNIHCNTIAPNAGSRMTQTVMPEDLVEALKPEYVAPLVLWLCHESCEENGGLFEVGAGWIGKLRWERTLGAIVRQKNHPMTPEAVKANWKKICDFENASKPQSIQESTGSIIEVLSKIDSEGGVSANHTSRATSTATSGFAGAIGQKLPPFSYAYTELEAIMYALGVGASIKDPKDLKFIYEGSSDFSCLPTFGVIIGQKSMMGGGLAEIPGLSINFAKVLHGEQYLELYKPLPRAGKLKCEAVVADVLDKGSGVVIIMDVYSYSEKELICHNQFSLFLVGSGGFGGKRTSDKVKVAVAIPNRPPDAVLTDTTSLNQAALYRLSGDWNPLHIDPNFASLAGFDKPILHGLCTFGFSARRVLQQFADNDVSRFKAIKARFAKPVYPGQTLQTEMWKEGNRIHFQTKVQETGDIVISNAYVDLAPTSGTSAKTPSEGGKLQSTFVFEEIGRRLKDIGPEVVKKVNAVFEWHITKGGNIGAKWTIDLKSGSGKVYQGPAKGAADTTIILSDEDFMEVVLGKLDPQKAFFSGRLKARGNIMLSQKLQMILKDYAKL

SEQ ID NO: 906608 - protein, 732 aa, Homo sapiens
SLEEEKSRKHLVSQAGLGRAYALAFAERGALVVVNDLGGDFKGVGKGSLAADKVVEEIRRRGGKAVANYDSVEEGEKVVKTALDAFGRIDVVVNNAGILRDRSFARISDEDWDIIHRVHLRGSFQVTRAAWEHMKKQKYGRIIMTSSASGIYGNFGQANYSAAKLGLLGLANSLAIEGRKSNIHCNTIAPNAGSRMTQTVMPEDLVEALKPEYVAPLVLWLCHESCEENGGLFEVGAGWIGKLRWERTLGAIVRQKNHPMTPEAVKANWKKICDFENASKPQSIQESTGSIIEVLSKIDSEGGVSANHTSRATSTATSGFAGAIGQKLPPFSYAYTELEAIMYALGVGASIKDPKDLKFIYEGSSDFSCLPTFGVIIGQKSMMGGGLAEIPGLSINFAKVLHGEQYLELYKPLPRAGKLKCEAVVADVLDKGSGVVIIMDVYSYSEKELICHNQFSLFLVGSGGFGGKRTSDKVKVAVAIPNRPPDAVLTDTTSLNQAALYRLSGDWNPLHIDPNFASLAGFDKPILHGLCTFGFSARRVLQQFADNDVSRFKAIKARFAKPVYPGQTLQTEMWKEGNRIHFQTKVQETGDIVISNAYVDLAPTSGTSAKTPSEGGKLQSTFVFEEIGRRLKDIGPEVVKKVNAVFEWHITKGGNIGAKWTIDLKSGSGKVYQGPAKGAADTTIILSDEDFMEVVLGKLDPQKAFFSGRLKARGNIMLSQKLQMILKDYAKL

SEQ ID NO: 906609 - protein, 599 aa, Homo sapiens
MKKQKYGRIIMTSSASGIYGNFGQANYSAAKLGLLGLANSLAIEGRKSNIHCNTIAPNAGSRMTQTVMPEDLVEALKPEYVAPLVLWLCHESCEENGGLFEVGAGWIGKLRWERTLGAIVRQKNHPMTPEAVKANWKKICDFENASKPQSIQESTGSIIEVLSKIDSEGGVSANHTSRATSTATSGFAGAIGQKLPPFSYAYTELEAIMYALGVGASIKDPKDLKFIYEGSSDFSCLPTFGVIIGQKSMMGGGLAEIPGLSINFAKVLHGEQYLELYKPLPRAGKLKCEAVVADVLDKGSGVVIIMDVYSYSEKELICHNQFSLFLVGSGGFGGKRTSDKVKVAVAIPNRPPDAVLTDTTSLNQAALYRLSGDWNPLHIDPNFASLAGFDKPILHGLCTFGFSARRVLQQFADNDVSRFKAIKARFAKPVYPGQTLQTEMWKEGNRIHFQTKVQETGDIVISNAYVDLAPTSGTSAKTPSEGGKLQSTFVFEEIGRRLKDIGPEVVKKVNAVFEWHITKGGNIGAKWTIDLKSGSGKVYQGPAKGAADTTIILSDEDFMEVVLGKLDPQKAFFSGRLKARGNIMLSQKLQMILKDYAKL

SEQ ID NO: 906610 - protein, 566 aa, Homo sapiens
MGSPLRFDGRVVLVTGAGAGLGRAYALAFAERGALVVDLVEALKPEYVAPLVLWLCHESCEENGGLFEVGAGWIGKLRWERTLGAIVRQKNHPMTPEAVKANWKKICDFENASKPQSIQESTGSIIEVLSKIDSEGGVSANHTSRATSTATSGFAGAIGQKLPPFSYAYTELEAIMYALGVGASIKDPKDLKFIYEGSSDFSCLPTFGVIIGQKSMMGGGLAEIPGLSINFAKVLHGEQYLELYKPLPRAGKLKCEAVVADVLDKGSGVVIIMDVYSYSEKELICHNQFSLFLVGSGGFGGKRTSDKVKVAVAIPNRPPDAVLTDTTSLNQAALYRLSGDWNPLHIDPNFASLAGFDKPILHGLCTFGFSARRVLQQFADNDVSRFKAIKARFAKPVYPGQTLQTEMWKEGNRIHFQTKVQETGDIVISNAYVDLAPTSGTSAKTPSEGGKLQSTFVFEEIGRRLKDIGPEVVKKVNAVFEWHITKGGNIGAKWTIDLKSGSGKVYQGPAKGAADTTIILSDEDFMEVVLGKLDPQKAFFSGRLKARGNIMLSQKLQMILKDYAKL

SEQ ID NO: 906611 - protein, 391 aa, Homo sapiens [sequence omitted]

SEQ ID NO: 906612 - protein, 294 aa, Homo sapiens
MDVYSYSEKELICHNQFSLFLVGSGGFGGKRTSDKVKVAVAIPNRPPDAVLTDTTSLNQAALYRLSGDWNPLHIDPNFASLAGFDKPILHGLCTFGFSARRVLQQFADNDVSRFKAIKARFAKPVYPGQTLQTEMWKEGNRIHFQTKVQETGDIVISNAYVDLAPTSGTSAKTPSEGGKLQSTFVFEEIGRRLKDIGPEVVKKVNAVFEWHITKGGNIGAKWTIDLKSGSGKVYQGPAKGAADTTIILSDEDFMEVVLGKLDPQKAFFSGRLKARGNIMLSQKLQMILKDYAKL

SEQ ID NO: 906613 - protein, 762 aa, Homo sapiens; identical to SEQ ID NO: 906607

SEQ ID NO: 906614 - protein, 719 aa, Homo sapiens
FPASSCPAVGVQRLCLFVCVSLQALFMGSPLRFDGRVVLVTGAGAGLGRAYALAFAERGALVVVNDLGGDFKGVGKGSLAADKVVEEIRRRGGKAVANYDSVEEGEKVVKTALDAFGRIDVVVNNAGILRDRSFARISDEDWDIIHRVHLRGSFQVTRAAWEHMKKQKYGRIIMTSSASGIYGNFGQANYSAAKLGLLGLANSLAIEGRKSNIHCNTIAPNAGSRMTQTVMPEDLVEALKPEYVAPLVLWLCHESCEENGGLFEVGAGWIGKLRWERTLGAIVRQKNHPMTPEAVKANWKKICDFENASKPQSIQESTGSIIEVLSKIDSEGGVSANHTSRATSTATSGFAGAIGQKLPPFSYAYTELEAIMYALGVGASIKDPKDLKFIYEGSSDFSCLPTFGVIIGQKSMMGGGLAEIPGLSINFAKVLHGEQYLELYKPLPRAGKLKCEAVVADVLDKGSGVVIIMDVYSYSEKELICHNQFSLFLVGSGGFGGKRTSDKVKVAVAIPNRPPDAVLTDTTSLNQAALYRLSGDWNPLHIDPNFASLAGFDKPILHGLCTFGFSARRVLQQFADNDVSRFKAIKARFAKPVYPGQTLQTEMWKEGNRIHFQTKVQETGDIVISNAYVDLAPTSGTSAKTPSEGGKLQSTFVFEEIGRRLKDIGPEVVKKVNAVFEWHITKGGNIGAKWTIDLKSGSGKVYQWSWASLTLRRHSLVAG

SEQ ID NO: 906615 - protein, 763 aa, Homo sapiens
  misc_feature (686)..(686): Xaa can be any naturally occurring amino acid
  misc_feature (690)..(690): Xaa can be any naturally occurring amino acid
  misc_feature (696)..(696): Xaa can be any naturally occurring amino acid
  misc_feature (702)..(702): Xaa can be any naturally occurring amino acid
  misc_feature (707)..(707): Xaa can be any naturally occurring amino acid
  misc_feature (714)..(715): Xaa can be any naturally occurring amino acid
  misc_feature (717)..(717): Xaa can be any naturally occurring amino acid
  misc_feature (729)..(729): Xaa can be any naturally occurring amino acid
  misc_feature (733)..(734): Xaa can be any naturally occurring amino acid
FPASSCPAVGVQRLCLFVCVSLQALFMGSPLRFDGRVVLVTGAGAGLGRAYALAFAERGALVVVNDLGGDFKGVGKGSLAADKVVEEIRRRGGKAVANYDSVEEGEKVVKTALDAFGRIDVVVNNAGILRDRSFARISDEDWDIIHRVHLRGSFQVTRAAWEHMKKQKYGRIIMTSSASGIYGNFGQANYSAAKLGLLGLANSLAIEGRKSNIHCNTIAPNAGSRMTQTVMPEDLVEALKPEYVAPLVLWLCHESCEENGGLFEVGAGWIGKLRWERTLGAIVRQKNHPMTPEAVKANWKKICDFENASKPQSIQESTGSIIEVLSKIDSEGGVSANHTSRATSTATSGFAGAIGQKLPPFSYAYTELEAIMYALGVGASIKDPKDLKFIYEGSSDFSCLPTFGVIIGQKSMMGGGLAEIPGLSINFAKVLHGEQYLELYKPLPRAGKLKCEAVVADVLDKGSGVVIIMDVYSYSEKELICHNQFSLFLVGSGGFGGKRTSDKVKVAVAIPNRPPDAVLTDTTSLNQAALYRLSGDWNPLHIDPNFASLAGFDKPILHGLCTFGFSARRVLQQFADNDVSRFKAIKARFAKPVYPGQTLQTEMWKEGNRIHFQTKVQETGDIVISNAYVDLAPTSGTSAKTPSEGGKLQSTFVFEEIGRRLKDIGPEVVGEVGAGGGGRGSRGRGXGAGXAVGLEXGAGRGXQGPAXGAAGAAXXLXGGDGHGGGLLGXLGPXXAFFSGRLKARGNIMLSQKLQMILKDYAKL

SEQ ID NO: 906616 - protein, 762 aa, Homo sapiens; identical to SEQ ID NO: 906607

SEQ ID NO: 906617 - protein, 641 aa, Homo sapiens
FPASSCPAVGVQRLCLFVCVSLQALFMGSPLRFDGRVVLVTGAGAGLGRAYALAFAERGALVVVNDLGGDFKGVGKGSLAADKVVEEIRRRGGKAVANYDSVEEGEKVVKTALDAFGRIDVVVNNAGILRDRSFARISDEDWDIIHRVHLRGSFQVTRAAWEHMKKQKYGRIIMTSSASGIYGNFGQANYSAAKLGLLGLANSLAIEGRKSNIHCNTIAPNAGSRMTQTVMPEDLVEALKPEYVAPLVLWLCHESCEENGGLFEVGAGWIGKLRWERTLGAIVRQKNHPMTPEAVKANWKKICDFENASKPQSIQESTGSIIEVLSKIDSEGGVSANHTSRATSTATSGFAGAIGQKLPPFSYAYTELEAIMYALGVGASIKDPKDLKFIYEGSSDFSCLPTFGVIIGQKSMMGGGLAEIPGLSINFAKVLHGEQYLELYKPLPRAGKLKCEAVVADVLDKGSGVVIIMDVYSYSEKELICHNQFSLFLVGSGGFGGKRTSDKVKVAVAIPNRPPDAVLTDTTSLNQAALYRLSGDWNPLHIDPNFASLAGFDKPILHGLCTFGFSARRVLQQFADNDVSRFKAIKARFAKPVYPGQTLQTEMWKEGNRIHFQTKVLQLGRCHFKRICASITPVRLDSYSV

SEQ ID NO: 906618 - protein, 443 aa, Homo sapiens
FPASSCPAVGVQRLCLFVCVSLQALFMGSPLRFDGRVVLVTGAGAGLGRAYALAFAERGALVVVNDLGGDFKGVGKGSLAADKVVEEIRRRGGKAVANYDSVEEGEKVVKTALDAFGRIDVVVNNAGILRDRSFARISDEDWDIIHRVHLRGSFQVTRAAWEHMKKQKYGRIIMTSSASGIYGNFGQANYSAAKLGLLGLANSLAIEGRKSNIHCNTIAPNAGSRMTQTVMPEDLVEALKPEYVAPLVLWLCHESCEENGGLFEVGAGWIGKLRWERTLGAIVRQKNHPMTPEAVKANWKKICDFENASKPQSIQESTGSIIEVLSKIDSEGGVSANHTSRATSTATSGFAGAIGQKLPPFSYAYTELEAIMYALGVGASIKDPKDLKFIYEGSSDFSCLPTFGVIIGQKSMMGGGLAEIPGLSINFAKVCLIKNLYFAFLFL

SEQ ID NO: 906619 - protein, 115 aa, Homo sapiens
  misc_feature (115)..(115): Xaa can be any naturally occurring amino acid
NRLRLSALVVVLDNFCVDCGAVGVQRLCLFVCVSLQALFMGSPLRFDGRVVLVTGAGADWAEPMPWLLQKIGQACNAGSEKQKVRKKSSVKTVSSSATTVADPVFLMLSILQALX

SEQ ID NO: 906620 - protein, 736 aa, Homo sapiens
MGSPLRFDGRVVLVTGAGAGLGRAYALAFAERGALVVVNDLGGDFKGVGKGSLAADKVVEEIRRRGGKAVANYDSVEEGEKVVKTALDAFGRIDVVVNNAGILRDRSFARISDEDWDIIHRVHLRGSFQVTRAAWEHMKKQKYGRIIMTSSASGIYGNFGQANYSAAKLGLLGLANSLAIEGRKSNIHCNTIAPNAGSRMTQTVMPEDLVEALKPEYVAPLVLWLCHESCEENGGLFEVGAGWIGKLRWERTLGAIVRQKNHPMTPEAVKANWKKICDFENASKPQSIQESTGSIIEVLSKIDSEGGVSANHTSRATSTATSGFAGAIGQKLPPFSYAYTELEAIMYALGVGASIKDPKDLKFIYEGSSDFSCLPTFGVIIGQKSMMGGGLAEIPGLSINFAKVLHGEQYLELYKPLPRAGKLKCEAVVADVLDKGSGVVIIMDVYSYSEKELICHNQFSLFLVGSGGFGGKRTSDKVKVAVAIPNRPPDAVLTDTTSLNQAALYRLSGDWNPLHIDPNFASLAGFDKPILHGLCTFGFSARRVLQQFADNDVSRFKAIKARFAKPVYPGQTLQTEMWKEGNRIHFQTKVQETGDIVISNAYVDLAPTSGTSAKTPSEGGKLQSTFVFEEIGRRLKDIGPEVVKKVNAVFEWHITKGGNIGAKWTIDLKSGSGKVYQGPAKGAADTTIILSDEDFMEVVLGKLDPQKAFFSGRLKARGNIMLSQKLQMILKDYAKL

SEQ ID NO: 906621 - protein, 762 aa, Homo sapiens; identical to SEQ ID NO: 906607

SEQ ID NO: 906622 - protein, 718 aa, Homo sapiens
MGSPLRFDGRVVLVTGAGAGLGRAYALAFAERGALVVVNDLGGDFKGVGKGSLAADKVVEEIRRRGGALDAFGRIDVVVNNAGILRDRSFARISDEDWDIIHRVHLRGSFQVTRAAWEHMKKQKYGRIIMTSSASGIYGNFGQANYSAAKLGLLGLANSLAIEGRKSNIHCNTIAPNAGSRMTQTVMPEDLVEALKPEYVAPLVLWLCHESCEENGGLFEVGAGWIGKLRWERTLGAIVRQKNHPMTPEAVKANWKKICDFENASKPQSIQESTGSIIEVLSKIDSEGGVSANHTSRATSTATSGFAGAIGQKLPPFSYAYTELEAIMYALGVGASIKDPKDLKFIYEGSSDFSCLPTFGVIIGQKSMMGGGLAEIPGLSINFAKVLHGEQYLELYKPLPRAGKLKCEAVVADVLDKGSGVVIIMDVYSYSEKELICHNQFSLFLVGSGGFGGKRTSDKVKVAVAIPNRPPDAVLTDTTSLNQAALYRLSGDWNPLHIDPNFASLAGFDKPILHGLCTFGFSARRVLQQFADNDVSRFKAIKARFAKPVYPGQTLQTEMWKEGNRIHFQTKVQETGDIVISNAYVDLAPTSGTSAKTPSEGGKLQSTFVFEEIGRRLKDIGPEVVKKVNAVFEWHITKGGNIGAKWTIDLKSGSGKVYQGPAKGAADTTIILSDEDFMEVVLGKLDPQKAFFSGRLKARGNIMLSQKLQMILKDYAKL

SEQ ID NO: 906623 - protein, 744 aa, Homo sapiens
FPASSCPAVGVQRLCLFVCVSLQALFMGSPLRFDGRVVLVTGAGAGLGRAYALAFAERGALVVVNDLGGDFKGVGKGSLAADKVVEEIRRRGGKAVANYDSVEEGEKVVKTALDAFGRIDVVVNNAGILRDRSFARISDEDWDIIHRVHLRGSFQVTRAAWEHMKKQKYGRIIMTSSASGIYGNFGQANYSAAKLGLLGLANSLAIEGRKSNIHCNTIAPNAGSRMTQTVMPEDLVEALKPEYVAPLVLWLCHESCEENGGLFEVGAGWIGKLRWERTLGAIVRQKNHPMTPEAVKANWKKICDFENASKPQSIQESTGSIIEVLSKIDSEGGVSANHTSRATSTATSGFAGAIGQKLPPFSYAYTELEAIMYALGVGASIKDPKDLKFIYEGSSDFSCLPTFGVIIGQKSMMGGGLAEIPGLSINFAKVLHGEQYLELYKPLPRAGKLKCEAVVADVLDKGSGVVIIMDVYSYSEKELICHNQFSLFLVGSGGFAPDAVLTDTTSLNQAALYRLSGDWNPLHIDPNFASLAGFDKPILHGLCTFGFSARRVLQQFADNDVSRFKAIKARFAKPVYPGQTLQTEMWKEGNRIHFQTKVQETGDIVISNAYVDLAPTSGTSAKTPSEGGKLQSTFVFEEIGRRLKDIGPEVVKKVNAVFEWHITKGGNIGAKWTIDLKSGSGKVYQGPAKGAADTTIILSDEDFMEVVLGKLDPQKAFFSGRLKARGNIMLSQKLQMILKDYAKL

SEQ ID NO: 906624 - protein, 473 aa, Homo sapiens [sequence omitted]

SEQ ID NO: 906625 - protein, 718 aa, Homo sapiens
FPASSCPAVGVQRLCLFVCVSLQALFMGSPLRFDGRVVLVTGAGAGLGRAYALAFAERGALVVVNDLGGDFKGVGKGSLAADKVVEEIRRRGGKAVANYDSVEEGEKVVKTALDAFGRIDVVVNNAGILRDRSFARISDEDWDIIHRVHLRGSFQVTRAAWEHMKKQKYGRIIMTSSASGIYGNFGQANYSAAKLGLLGLANSLAIEGRKSNIHCNTIAPNAGSRMTQTVMPEDLVEALKPEYVAPLVLWLCHESCEENGGLFEVGAGWIGKLRWERTLGAIVRQKNHPMTPEAVKANWKKICDFENASKPQSIQESTGSIIEVLSKIDSEGGVSANHTSRATSTATSGFAGAIGQKLPPFSYAYTELEAIMYALGVGASIKDPKDLKFIYEGSSDFSCLPTFGVIIGQKSMMGGGLAEIPGLSINFAKVLHGEQYLELYKPLPRAGKLKCEAVVADVLDKGSGVVIIMDVYSYSEKELICHNQFSLFLVGSGGFGGKRTSDKVKVAVAIPNRPPDAVLTDTTSLNQAALYRLSGDWNPLHIDPNFASLAGFDKPILHGLCTFGFSARRVLQQFADNDVSRFKAIKARFAKPVYPGQTLQTEMWKEGNRIHFQTKVQETGDIVISNAYVDLAPTSGTSAKTPSEGGKLQSTFVFEEIGRRLKDIGPEVVKKVNAVFEWHITKALQKVLLIQQSYFQMKISWRWSWASLTLRRHSLVAG

SEQ ID NO: 906626 - protein, 762 aa, Homo sapiens; identical to SEQ ID NO: 906607

SEQ ID NO: 906627 - protein, 184 aa, Homo sapiens
HDVIVHDVIVHDVIVHDVIVLQTEMWKEGNRIHFQTKVQETGDIVISNAYVDLAPTSGTSAKTPSEGGKLQSTFVFEEIGRRLKDIGPEVVKKVNAVFEWHITKGGNIGAKWTIDLKSGSGKVYQGPAKGAADTTIILSDEDFMEVVLGKLDPQKAFFSGRLKARGNIMLSQKLQMILKDYAKL

SEQ ID NO: 906628 - protein, 621 aa, Homo sapiens
FPASSCPAVGVQRLCLFVCVSLQALFMGSPLRFDGRVVLVTGAGAGLGRAYALAFAERGALVVVNDLGGDFKGVGKGSLAADKVVEEIRRRGGKAVANYDSVEEGEKVVKTALDAFGRIDVVVNNAGILRDRSFARISDEDWDIIHRVHLRGSFQVTRAAWEHMKKQKYGRIIMTSSASGIYGNFGQANYSAAKLGLLGLANSLAIEGRKSNIHCNTIAPNAGSRMTQTVMPEDLVEALKPEYVAPLVLWLCHESCEENGGLFEVGAGWIGKLRWERTLGAIVRQKNHPMTPEAVKANWKKICDFENASKPQSIQESTGSIIEVLSKIDSEGGVSANHTSRATSTATSGFAGAIGQKLPPFSYAYTELEAIMYALGVGASIKDPKDLKFIYEGSSDFSCLPTFGVIIGQKSMMGGGLAEIPGLSINFAKVLHGEQYLELYKPLPRAGKLKCEAVVADVLDKGSGVVIIMDVYSYSEKELICHNQFSLFLVGSGGFGGKRTSDKVKVAVAIPNRPPDAVLTDTTSLNQAALYRLSGDWNPLHIDPNFASLAGFDKPILHGLCTFGFSARRVLQQFADNDVSRFKAIKARFAKPVYPGQTLQTEMWKEGNRIHFQTKVQETGD

SEQ ID NO: 906629 - protein, 214 aa, Homo sapiens
  misc_feature (211)..(211): Xaa can be any naturally occurring amino acid
FPASSCPAVGVQRLCLFVCVSLQALFMGSPLRFDGRVVLVTGAGAGLGRAYALAFAERGALVVVNDLGGDFKGVGKGSLAADKVVEEIRRRGGKAVANYDSVEEGEKVVKTALDAFGRIDVVVNNAGILRDRSFARISDEDWDIIHRVHLRGSFQVTRAAWEHMKKQKYGRIIMTSSASGIYGNFGQANYSAAKLGLLGLANSLAIEGRTXRYA

SEQ ID NO: 906630 - protein, 108 aa, Homo sapiens
TRRRASLATLATAGKSVYVVGASSVAGMEASRCRLSPSGDRSDRAVAGLLLSEAEGRSEKAECLSLIRDGLTDLPVGHTPCLCASFSARGRASEKKGSKISACHFLVR

SEQ ID NO: 906631 - protein, 469 aa, Homo sapiens
TRRRASLATLATAGKSVYVVGASSVAGMEASRCRLSPSGDSVFHEEMMKMRQAKLDYQRLLLEKRQRKKRLEPFMVQPNPEARLRRAKPRASDEQTPLVNCHTPHSNVILHGIDGPAAVLKPDEVHAPSVSSSVVEEDAENTVDTASKPGLQERLQKHDISESVNFDEETDGISQSACLERPNSASSQNSTDTGTSGSATAAQPADNLLGDIDDLEDFVYSPAPQGVTVRCRIIRDKRGMDRGLFPTYYMYLEKEENQKIFLLAARKRKKSKTANYLISIDPVDLSREGESYVGKLRSNLMGTKFTVYDRGICPMKGRGLVGAAHTRQELAAISYETNVLGFKGPRKMSVIIPGMTLNHKQIPYQPQNNHDSLLSRWQNRTMENLVELHNKAPVWNSDTQSYVLNFRGRVTQASVKNFQIVHKNDPDYIVMQFGRVADDVFTLDYNYPLCAVQAFGIGLSSFDSKLACE

SEQ ID NO: 906632 - protein, 469 aa, Homo sapiens; identical to SEQ ID NO: 906631

SEQ ID NO: 906633 - protein, 169 aa, Homo sapiens
MGTKFTVYDRGICPMKGRGLVGAAHTRQELAAISYETNVLGFKGPRKMSVIIPGMTLNHKQIPYQPQNNHDSLLSRWQNRTMENLVELHNKAPVWNSDTQSYVLNFRGRVTQASVKNFQIVHKNDPDYIVMQFGRVADDVFTLDYNYPLCAVQAFGIGLSSFDSKLACE

SEQ ID NO: 906634 - protein, 470 aa, Homo sapiens
TRRRASLATLATAGKSVYVVGASSVAGMEASRCRLSPSGDSVFHEEMMKMRQAKLDYQRLLLEKRQRKKRLEPFMVQPNPEARLRRAKPRASDEQTPLVNCHTPHSNVILHGIDGPAAVLKPDEVHAPSVSSSVVEEDAENTVDTASKPGLQERLQKHDISESVNFDEETDGISQSACLERPNSASSQNSTDTGTSGSATAAQPADNLLGDIDDLEDFVYSPAPQGVTVRCRIIRDKRGMDRGLFPTYYMYLEKEENQKIFLLAARKRKKSKTANYLISIDPVDLSREGESYVGKLRSNLMGTKFTVYDRGICPMKGRGLVGAAHTRQELAAISYETNVLGFKGPRKMSVIIPGMTLNHKQIPYQPQNNHDSLLSRWQNRTMENLVELHNKAPVWNSDTQSYVLNFRGRVTQASVKNFQIVHKNDPDYIVMQFGRVADDVFTLDYNYPLCAVQAFGIGLSSFDRVPLTAI

SEQ ID NO: 906635 - protein, 297 aa, Homo sapiens
TRRRASLATLATAGKSVYVVGASSVAGMEASRCRLSPSGDSVFHEEMMKMRQAKLDYQRLLLEKRQRKKRLEPFMVQPNPEARLRRAKPRASDEQTPLVNCHTPHSNVILHGIDGPAAVLKPDEVHAPSVSSSVVEEDAENTVDTASKPGLQERLQKHDISESVNFDEETDGISQSACLERPNSASSQNSTDTGTSGSATAAQPADNLLGDIDDLEDFVYSPAPQGVTVRCRIIRDKRGMDRGLFPTYYMYLEKEENQKIFLLAARKRKKSKTANYLISIDPVDLSREGESYVGKLR

SEQ ID NO: 906636 - protein, 469 aa, Homo sapiens; identical to SEQ ID NO: 906631

SEQ ID NO: 906637 - protein, 230 aa, Homo sapiens [sequence omitted]

SEQ ID NO: 906638 - protein, 469 aa, Homo sapiens; identical to SEQ ID NO: 906631

SEQ ID NO: 906639 - protein, 468 aa, Homo sapiens
TRRRASLATLATAGKSVYVVGASSVAGMEASRCRLSPSGDSVFHEEMMKMRQAKLDYQRLLLEKRQRKKRLEPFMVQPNPEARLRRAKPRASDEQTPLVNCHTPHSNVILHGIDGPAAVLKPDEVHAPSVSSSVVEEDAENTVDTASKPGLQERLQKHDISESVNFDEETDGISQSACLERPNSASSQNSTDTGTSGSATAAQPADNLLGDIDDLEDFVYSPAPQGVTVRCRIIRDKRGMDRGLFPTYYMYLEKEENQKIFLLAARKRKKSKTANYLISIDPVDLSREGESYVGKLRSNLMGTKFTVYDRGICPMKGRGLVGAAHTRQELAAISYETNVLGFKGPRKMSVIIPGMTLNHKQIPYQPQNNHDSLLSRWQNRTMENLVELHNKAPVWNSDTQSYVLNFRGRVTQASVKNFQIVHKNDPDYIVMQFGRVADDVFTLDYNYPLCAVQAFGIGLSSFDNVSKP

SEQ ID NO: 906640 - protein, 652 aa, Homo sapiens
GELSLLSYIRPDVKGLSTLQDIEIGVQHILADMIAKDKDTLDFIRNLCQKRHVCIQSSLAKVSSKKVNEKDVDKFLLYQHFSCNIRNIHHHQILAINRGENLKVLTVKVNISDGVKDEFCRWCIQNRWRPRSFARPELMKILYNSLNDSFKRLIYPLLCREFRAKLTSDAEKESVMMFGRNLRQLLLTSPVPGRTLMGVDPGYKHGCKLAIISPTSQILHTDVVYLHCGQGFREAEKIKTLLLNFNCSTVVIGNGTACRETEAYFADLIMKNYFAPLDVVYCIVSEAGASIYSVSPEANKEMPGLDPNLRSAVSIARRVQDPLAELVKIEPKHIGVGMYQHDVSQTLLKATLDSVVEECVSFVGVDINICSEVLLRHIAGLNANRAKNIIEWREKNGPFINREQLKKVKGLGPKSFQQCAGFIRINQDYIRTFCSQQTETSGQIQGVAVTSSADVEVTNEKQGKKKSKTAVNVLLKPNPLDQTCIHPESYDIAMRFLSSIGGTLYEVGKPEMQQKINSFLEKEGMEKIAERLQTTVHTLQVIIDGLSQPESFDFRTDFDKPDFKRSIVCLEDLQIGTVLTGKVENATLFGIFVDIGVGKSGLIPIRNVTEAKLSKTKKRRSLGLGPGERVEVQVLNIDIPRSRITLDLIRVL

SEQ ID NO: 906641 - protein, 569 aa, Homo sapiens
GSSCVSGFFILAINRGENLKVLTVKVNISDGVKDEFCRWCIQNRWRPRSFARPELMKILYNSLNDSFKRLIYPLLCREFRAKLTSDAEKESVMMFGRNLRQLLLTSPVPGRTLMGVDPGYKHGCKLAIISPTSQILHTDVVYLHCGQGFREAEKIKTLLLNFNCSTVVIGNGTACRETEAYFADLIMKNYFAPLDVVYCIVSEAGASIYSVSPEANKEMPGLDPNLRSAVSIARRVQDPLAELVKIEPKHIGVGMYQHDVSQTLLKATLDSVVEECVSFVGVDINICSEVLLRHIAGLNANRAKNIIEWREKNGPFINREQLKKVKGLGPKSFQQCAGFIRINQDYIRTFCSQQTETSGQIQGVAVTSSADVEVTNEKQGKKKSKTAVNVLLKPNPLDQTCIHPESYDIAMRFLSSIGGTLYEVGKPEMQQKINSFLEKEGMEKIAERLQTTVHTLQVIIDGLSQPESFDFRTDFDKPDFKRSIVCLEDLQIGTVLTGKVENATLFGIFVDIGVGKSGLIPIRNVTEAKLSKTKKRRSLGLGPGERVEVQVLNIDIPRSRITLDLIRVL

SEQ ID NO: 906642 - protein, 200 aa, Homo sapiens
SNQRDSVGVGPSEPCAGYNLVVRRFLSRSEKRNIRVGVTLIFQFLSSIGGTLYEVGKPEMQQKINSFLEKEGMEKIAERLQTTVHTLQVIIDGLSQPESFDFRTDFDKPDFKRSIVCLEDLQIGTVLTGKVENATLFGIFVDIGVGKSGLIPIRNVTEAKLSKTKKRRSLGLGPGERVEVQVLNIDIPRSRITLDLIRVL

SEQ ID NO: 906643 - protein, 652 aa, Homo sapiens; identical to SEQ ID NO: 906640

SEQ ID NO: 906644 - protein, 631 aa, Homo sapiens
GELSLLSYIRPDVKGLSTLQDIEIGVQHILADMIAKDKDTLDFIRNLCQKRHVCIQSSLAKVSSKKVNEKDVDKFLLYQHFSCNIRNIHHHQILAINRGENLKVLTVKVNISDGVKDEFCRWCIQNRWRPRSFARPELMKILYNSLNDSFKRLIYPLLCREFRAKLTSDAEKESVMMFGRNLRQLLLTSPVPGRTLMGVDPGYKHGCKLAIISPTSQILHTDVVYLHCGQGFREAEKIKTLLLNFNCSTVVIGNGTACRETEAYFADLIMKNYFAPLDVVYCIVSEAGASIYSVSPEANKEMPGLDPNLRSAVSIARRVQDPLAELVKMSQSTLELECISFVGVDINICSEVLLRHIAGLNANRAKNIIEWREKNGPFINREQLKKVKGLGPKSFQQCAGFIRINQDYIRTFCSQQTETSGQIQGVAVTSSADVEVTNEKQGKKKSKTAVNVLLKPNPLDQTCIHPESYDIAMRFLSSIGGTLYEVGKPEMQQKINSFLEKEGMEKIAERLQTTVHTLQVIIDGLSQPESFDFRTDFDKPDFKRSIVCLEDLQIGTVLTGKVENATLFGIFVDIGVGKSGLIPIRNVTEAKLSKTKKRRSLGLGPGERVEVQVLNIDIPRSRITLDLIRVL

SEQ ID NO: 906645 - protein, 652 aa, Homo sapiens; identical to SEQ ID NO: 906640

SEQ ID NO: 906646 - protein, 371 aa, Homo sapiens
MSAQAQMRALLDQLMGTARDGDETRQRVKFTDDRVCKSHLLDCCPHDILAGTRMDLGECTKIHDLALRADYEIASKERDLFFELDAMDHLESFIAECDRRTELAKKRLAETQEEISAEVSAKAEKVHELNEEIGKLLAKAEQLGAEGNVDESQKILMEVEKVRAKKKEAEEEYRNSMPASSFQQQKLRVCEVCSAYLGLHDNDRRLADHFGGKLHLGFIQIREKLDQLRKTVAEKQEKRNQDRLRRREEREREERLSRRSGSRTRDRRRSRSRDRRRRRSRSTSRERRKLSRSRSRDRHRRHRSRSRSHSRGHRRASRDRSAKYKFSRERASREESWESGRSERGPPDWRLESSNGKMASRRSEEKEAGEI

SEQ ID NO: 906647 - protein, 371 aa, Homo sapiens; identical to SEQ ID NO: 906646

SEQ ID NO: 906648 - protein, 325 aa, Homo sapiens
MSAQAQMRALLDQLMGTARDGDETRQRVKFTDDRVCKSHLLDCCPHDILAGTRMDLGECTKIHDLALRADYEIASKERDLFFELDAMDHLESFIAECDRRTELAKKRLAETQEEISAEVSAKAEKVHELNEEIGKLLAKAEQLGAEGNVDESQKILMEVEKVRAKKKEAEEEYRNSMPASSFQQQKLRVCEVCSAYLGLHDNDRRLADHFGGKLHLGFIQIREKLDQLRKTVAEKQEKRNQDRLRRREEREREERLSRRSGSRTRDRRRSRSRDRRRRRSRSTSRERRKLSRSRSRDRHRRHRSRSRSHSRGHRRASRDRSAKYK

SEQ ID NO: 906649 - protein, 318 aa, Homo sapiens
MDLGECTKIHDLALRADYEIASKERDLFFELDAMDHLESFIAECDRRTELAKKRLAETQEEISAEVSAKAEKVHELNEEIGKLLAKAEQLGAEGNVDESQKILMEVEKVRAKKKEAEEEYRNSMPASSFQQQKLRVCEVCSAYLGLHDNDRRLADHFGGKLHLGFIQIREKLDQLRKTVAEKQEKRNQDRLRRREEREREERLSRRSGSRTRDRRRSRSRDRRRRRSRSTSRERRKLSRSRSRDRHRRHRSRSRSHSRGHRRASRDRSAKYKFSRERASREESWESGRSERGPPDWRLESSNGKMASRRSEEKEAGEI

SEQ ID NO: 906650 - protein, 318 aa, Homo sapiens; identical to SEQ ID NO: 906649

SEQ ID NO: 906651 - protein, 325 aa, Homo sapiens; identical to SEQ ID NO: 906648

SEQ ID NO: 906652 - protein, 118 aa, Homo sapiens [sequence omitted]

SEQ ID NO: 906653 - protein, 367 aa, Homo sapiens
TPSSMGQPGSGPEYRQSQGARRGVKFTDDRVCKSHLLDCCPHDILAGTRMDLGECTKIHDLALRADYEIASKERDLFFELDAMDHLESFIAECDRRTELAKKRLAETQEEISAEVSAKAEKVHELNEEIGKLLAKAEQLGAEGNVDESQKILMEVEKVRAKKKEAEEEYRNSMPASSFQQQKLRVCEVCSAYLGLHDNDRRLADHFGGKLHLGFIQIREKLDQLRKTVAEKQEKRNQDRLRRREEREREERLSRRSGSRTRDRRRSRSRDRRRRRSRSTSRERRKLSRSRSRDRHRRHRSRSRSHSRGHRRASRDRSAKYKFSRERASREESWESGRSERGPPDWRLESSNGKMASRRSEEKEAGEI

SEQ ID NO: 906654 - protein, 269 aa, Homo sapiens
MSAQAQMRALLDQLMGTARDGDETRQRVKFTDDRVCKSHLLDCCPHDILAGTRMDLGECTKIHDLALRADYEIASKERDLFFELDAMDHLESFIAECDRRTELAKKRLAETQEEISAEVSAKAEKVHELNEEIGKLLAKAEQLGAEGNVDESQKILMEVEKVRAKKKEAEEEYRNSMPASSFQQQKLRVCEVCSAYLGLHDNDRRLADHFGGKLHLGFIQIREKLDQLRKTVAEKQEKRNQDRLRRREEREREERLSRRSGSRTRDRRR

SEQ ID NO: 906655 - protein, 285 aa, Homo sapiens
MDHLESFIAECDRRTELAKKRLAETQEEISAEVSAKAEKVHELNEEIGKLLAKAEQLGAEGNVDESQKILMEVEKVRAKKKEAEEEYRNSMPASSFQQQKLRVCEVCSAYLGLHDNDRRLADHFGGKLHLGFIQIREKLDQLRKTVAEKQEKRNQDRLRRREEREREERLSRRSGSRTRDRRRSRSRDRRRRRSRSTSRERRKLSRSRSRDRHRRHRSRSRSHSRGHRRASRDRSAKYKFSRERASREESWESGRSERGPPDWRLESSNGKMASRRSEEKEAGEI

SEQ ID NO: 906656 - protein, 307 aa, Homo sapiens
GTLSTSHFFTCIERDLFFELDAMDHLESFIAECDRRTELAKKRLAETQEEISAEVSAKAEKVHELNEEIGKLLAKAEQLGAEGNVDESQKILMEVEKVRAKKKEAEEEYRNSMPASSFQQQKLRVCEVCSAYLGLHDNDRRLADHFGGKLHLGFIQIREKLDQLRKTVAEKQEKRNQDRLRRREEREREERLSRRSGSRTRDRRRSRSRDRRRRRSRSTSRERRKLSRSRSRDRHRRHRSRSRSHSRGHRRASRDRSAKYKFSRERASREESWESGRSERGPPDWRLESSNGKMASRRSEEKEAGEI

SEQ ID NO: 906657 - protein, 118 aa, Homo sapiens [sequence omitted]

SEQ ID NO: 906658 - protein, 325 aa, Homo sapiens; identical to SEQ ID NO: 906648

SEQ ID NO: 906659 - protein, 325 aa, Homo sapiens; identical to SEQ ID NO: 906648

SEQ ID NO: 906660 - protein, 325 aa, Homo sapiens; identical to SEQ ID NO: 906648

SEQ ID NO: 906661 - protein, 285 aa, Homo sapiens; identical to SEQ ID NO: 906655

SEQ ID NO: 906662 - protein, 318 aa, Homo sapiens; identical to SEQ ID NO: 906649

SEQ ID NO: 906663 - protein, 269 aa, Homo sapiens; identical to SEQ ID NO: 906654

SEQ ID NO: 906664 - protein, 326 aa, Homo sapiens
MSAQAQMRALLDQLMGTARDGDETRQRVKFTDDRVCKSHLLDCCPHDILAGTRMDLGECTKIHDLALRADYEIASKERDLFFELDAMDHLESFIAECDRRTELAKKRLAETQEEISAEVSAKAEKVHELNEEIGKLLAKAEQLGAEGNVDESQKILMEVEKVRAKKKEAEEEYRNSMPASSFQQQKLRVCEVCSAYLGLHDNDRRLADHFGGKLHLGFIQIREKLDQLRKTVAEKQEKRNQDRLRRREEREREERLSRRSGSRTRDRRRSRSRDRRRRRSRSTSREAGGASEGPRTGGLRAPTGRWLHGGQKRRRPARSEPVSRVL

SEQ ID NO: 906665 - protein, 285 aa, Homo sapiens; identical to SEQ ID NO: 906655

SEQ ID NO: 906666 - protein, 126 aa, Homo sapiens
FTKLAVFQASNMLLQLFRCLTKRRSRSRDRRRRRSRSTSRERRKLSRSRSRDRHRRHRSRSRSHSRGHRRASRDRSAKYKFSRERASREESWESGRSERGPPDWRLESSNGKMASRRSEEKEAGEI

SEQ ID NO: 906667 - protein, 817 aa, Homo sapiens
MMDGPRSDVGRWGGNPLQPPTTPSPEPEPEPDGRSRRGGGRSFWARCCGCCSCRNAADDDWGPEPSDSRGRGSSSGTRRPGSRGSDSRRPVSRGSGVNAAGDGTIREGMLVVNGVDLLSSRSDQNRREHHTDEYEYDELIVRRGQPFHMLLLLSRTYESSDRITLELLIGNNPEVGKGTHVIIPVGKGGSGGWKAQVVKASGQNLNLRVHTSPNAIIGKFQFTVRTQSDAGEFQLPFDPRNEIYILFNPWCPEDIVYVDHEDWRQEYVLNESGRIYYGTEAQIGERTWNYGQFDHGVLDACLYILDRRGMPYGGRGDPVNVSRVISAMVNSLDDNGVLIGNWSGDYSRGTNPSAWVGSVEILLSYLRTGYSVPYGQCWVFAGVTTTVLRCLGLATRTVTNFNSAHDTDTSLTMDIYFDENMKPLEHLNHDSVWNFHVWNDCWMKRPDLPSGFDGWQVVDATPQETSSGIFCCGPCSVESIKNGLVYMKYDTPFIFAEVNSDKVYWQRQDDGSFKIVYVEEKAIGTLIVTKAISSNMREDITYLYKHPEGSDAERKAVETAAAHGSKPNVYANRGSAEDVAMQVEAQDAVMGQDLMVSVMLINHSSSRRTVKLHLYLSVTFYTGVSGTIFKETKKEVELAPGASDRVTMPVAYKEYRPHLVDQGAMLLNVSGHVKESGQVLAKQHTFRLRTPDLSLTLLGAAVVGQECEVQIVFKNPLPVTLTNVVFRLEGSGLQRPKILNVGDIGGNETVTLRQSFVPVRPGPRQLIASLDSPQLSQVHGVIQVDVAPAPGDGGFFSDAGGDSHLGETIPMASRGGA

SEQ ID NO: 906668 - protein, 72 aa, Homo sapiens
IFCCGPCSVESIKNGLVYMKYDTPFIFAEVRAGLQVPSWASVMGSLVPTSPLTDQLCDPGQVTHYTSQFPHL

SEQ ID NO: 906669 - protein, 742 aa, Homo sapiens
MMDGPRSDVGRWGGNPLQPPTTPSPEPEPEPDGRSRRGGGRSFWARCCGCCSCRNAADDDWGPEPSDSRGRGSSSGTRRPGSRGSDSRRPVSRGSGVNAAGDGTIREGMLVVNGVDLLSSRSDQNRREHHTDEYEYDELIVRRGQPFHMLLLLSRTYESSDRITLELLIGNNPEVGKGTHVIIPVGKGGSGGWKAQVVKASGQNLNLRVHTSPNAIIGKFQFTVRTQSDAGEFQLPFDPRNEIYILFNPWCPEDIVYVDHEDWRQEYVLNESGRIYYGTEAQIGERTWNYGQFDHGVLDACLYILDRRGMPYGGRGDPVNVSRVISAMVNSLDDNGVLIGNWSGDYSRGTNPSAWVGSVEILLSYLRTGYSVPYGQCWVFAGVTTTVLRCLGLATRTVTNFNSAHDTDTSLTMDIYFDENMKPLEHLNHDSVWNFHVWNDCWMKRPDLPSGFDGWQVVDATPQETSSGIFCCGPCSVESIKNGLVYMKYDTPFIFAEVNSDKVYWQRQDDGSFKIVYVEEKAIGTLIVTKAISSNMREDITYLYKHPEGSDAERKAVETAAAHGSKPNVYANRGSAEDVAMQVEAQDAVMGQDLMVSVMLINHSSSRRTVKLHLYLSVTFYTGVSGTIFKETKKEVELAPGASDRVTMPVAYKEYRPHLVDQGAMLLNVSGHVKESGQVLAKQHTFRLRTPDLSLTLLGAAVVGQECEVQIVFKNPLPVTLTNVVFRLEGSGLQRPKILNVG

SEQ ID NO: 906670 - protein, 102 aa, Homo sapiens
MRSMASGGGVPTDEEQATGLEREIMLAAKKGLDPYNVLAPKGASGTREDPNLVPSISNKRIVGCICEEDNTSVVWFWLHKGEAQRCPRCGAHYKLVPQQLAH

SEQ ID NO: 906671 - protein, 129 aa, Homo sapiens
MASRLLRGAGTLAAQALRARGPSGAAAMRSMASGGGVPTDEEQATGLEREIMLAAKKGLDPYNVLAPKGASGTREDPNLVPSISNKRIVGCICEEDNTSVVWFWLHKGEAQRCPRCGAHYKLVPQQLAH

SEQ ID NO: 906672 - protein, 102 aa, Homo sapiens; identical to SEQ ID NO: 906670

SEQ ID NO: 906673 - protein, 182 aa, Homo sapiens
MRNFRPRHSLGSGRARGLGGSRKLTERRKKPAPGSPSCLCSLFPEVLLLVADAMASRLLRGAGTLAAQALRARGPSGAAAMRSMASGGGVPTDEEQATGLEREIMLAAKKGLDPYNVLAPKGASGTREDPNLVPSISNKRIVGCICEEDNTSVVWFWLHKGEAQRCPRCGAHYKLVPQQLAH

SEQ ID NO: 906674 - protein, 114 aa, Homo sapiens
RDQSVALPGWSQGGKAARLVQLLEVPVAALRSPVPQALQASPCNSGPLLLPLPELTPLRKQMSTNLPRWLEKEKLIGRARWLTTVIPALWEAEADRSPEVRSSRPAWPTWWCSH

SEQ ID NO: 906675 - protein, 182 aa, Homo sapiens; identical to SEQ ID NO: 906673

SEQ ID NO: 906676 - protein, 117 aa, Homo sapiens
RDQSVALPGWSQGGKAARLVQLLEVPVAALRSPVPQALQASPCNSGPLLLPLPELTPLRKYPKRRCRVTLGGTGAATGMGRGPASLQTCAHLKQSGFYMLLDKCRQICLGGWRKKSS

SEQ ID NO: 906677 - protein, 157 aa, Homo sapiens
MRNFRPRHSLGSGRARGLGGSRKLTERRKKPAPGSPSCLCSLFPEVLLLVADAMASRLLRGAGTLAAQALRARGPSGAAAMRSMASGGGVPTDEEQATGLEREIMLAAKKGLDPYNVLAPKGASGTREDPNLVPSISNKRIVGCICKYLTSIFYPLA

SEQ ID NO: 906678 - protein, 182 aa, Homo sapiens; identical to SEQ ID NO: 906673

SEQ ID NO: 906679 - protein, 129 aa, Homo sapiens; identical to SEQ ID NO: 906671

SEQ ID NO: 906680 - protein, 182 aa, Homo sapiens; identical to SEQ ID NO: 906673

SEQ ID NO: 906681 - protein, 117 aa, Homo sapiens; identical to SEQ ID NO: 906676

SEQ ID NO: 906682 - protein, 182 aa, Homo sapiens; identical to SEQ ID NO: 906673

SEQ ID NO: 906683 - protein, 102 aa, Homo sapiens
MVGQWRDGHGLGVSTDKSRDWLRGDHVAERRADPYNVLAPKGASGTREDPNLVPSISNKRIVGCICEEDNTSVVWFWLHKGEAQRCPRCGAHYKLVPQQLAH

SEQ ID NO: 906684 - protein, 117 aa, Homo sapiens; identical to SEQ ID NO: 906676

SEQ ID NO: 906685 - protein, 1127 aa, Homo sapiens
MSLTSAYQHKLAEKLTILNDRGQGVLIRMYNIKKTCSDPKSKPPFLLEKSMEPSLKYINKKFPNIDVRNSTQHLGPVHREKAEIIRFLTNYYQSFVDVMEFRDHVYELLNTIDACQCHFDINLNFDFTRSYLDLIVTYTSVILLLSRIEDRRILIGMYNCAHEMLHGHGDPSFARLGQMVLEYDHPLKKLTEEFGPHTKAVSGALLSLHFLFVRRNQGAEQWRSAQLLSLISNPPAMINPANSDTMACEYLSVEVMERWIIIGFLLCHGCLNSNSQCQKLWKLCLQGSLYITLIREDVLQVHKVTEDLFSSLKGYGKRVADIKESKEHVIANSGQFHCQRRQFLRMAVKELETVLADEPGLLGPKALFAFMALSFIRDEVTWLVRHTENVTKTKTPEDYADSSIAELLFLLEGIRSLVRRHIKVIQQYHLQYLARFDALVLSDIIQNLSVCPEEESIIMSSFVSILSSLNLKQVDNGEKFEFSGLRLDWFRLQAYTSVAKAPLHLHENPDLAKVMNLIVFHSRMLDSVEKLLVETSDLSTFCFHLRIFEKMFAMTLEESAMLRYAIAFPLICAHFVHCTHEMCPEEYPHLKNHGLHHCNSFLEELAKQTSNCVLEICAEQRNLSEQLLPKHCATTISKAKNKKTRKQRQTPRKGEPERDKPGAESHRKNRSIVTNMDKLHLNLTELALTMNHVYSFSVFEHTIFPSEYLSSHLEARLNRAIVWLAGYNATTQEIVRPSELLAGVKAYIGFIQSLAQFLGADASRVIRNALLQQTQPLDSCGEQTITTLYTNWYLESLLRQASSGTIILSPAMQAFVSLPREGEQNFSAEEFSDISEMRALAELLGPYGMKFLSENLMWHVTSQIVELKKLVVENMDILVQIRSNFSKPDLMASLLPQLTGAENVLKRMTIIGVILSFRAMAQEGLREVFSSHCPFLMGPIECLKEFVTPDTDIKVTLSIFELASAAGVGCDIDPALVAAIANLKADTSSPEEEYKVACLLLIFLAVSLPLLATDPSSFYSIEKDGYNNNIHCLTKAIIQVSAALFTLYNKNIETHLKEFLVVASVSLLQLGQETDKLKTRNRESISLLMRLVVEESSFLTLDMLESCFPYVLLRNAYREVSRAFHLN

SEQ ID NO: 906686 - protein, 264 aa, Homo sapiens
PRKQATYTARYEAWVVAVEVMERWIIIGFLLCHGCLNSNSQCQKLWKLCLQGSLYITLIREDVLQVHKVTEDLFSSLKGYGKRVADIKESKEHVIANSGQFHCQRRQFLRMAVKELETVLADEPGLLGPKALFAFMALSFIRDEVTWLVRHTENVTKTKTPEDYADSSIAELLFLLEGIRSLVRRHIKVIQQYHLQYLARFDALVLSDIIQNLSVCPEEESIIMSSFVSILSSLNLKQVIMGKFEFSGLAGAGPPTATYGVGPR

SEQ ID NO: 906687 - protein, 1127 aa, Homo sapiens; identical to SEQ ID NO: 906685

SEQ ID NO: 906688 - protein, 1042 aa, Homo sapiens
MSLTSAYQHKLAEKLTILNDRGQGVLIRMYNIKKTCSDPKSKPPFLLEKSMEPSLKYINKKFPNIDVRNSTQHLGPVHREKAEIIRFLTNYYQSFVDVMEFRDHVYELLNTIDACQCHFDINLNFDFTRSYLDLIVTYTSVILLLSRIEDRRILIGMYNCAHEMLHGHGDPSFARLGQMVLEYDHPLKKLTEEFGPHTKAVSGALLSLHFLFVRRNQGAEQWRSAQLLSLISNPPAMINPANSDTMACEYLSVEVMERWIIIGFLLCHGCLNSNSQCQKLWKLCLQGSLYITLIREDVLQVHKVTEDLFSSLKGYGKRVADIKESKEHVIANSGQFHCQRRQFLRMAVKELETVLADEPGLLGPKALFAFMALSFIRDEVTWLVRHTENVTKTKTPEDYADSSIAELLFLLEGIRSLVRRHIKVIQQYHLQYLARFDALVLSDIIQNLSVCPEEESIIMSSFVSILSSLNLKQVDNGEKFEFSGLRLDWFRLQAYTSVAKAPLHLHENPDLAKVMNLIVFHSRMLDSVEKLLVETSDLSTFCFHLRIFEKMFAMTLEESAMLRYAIAFPLICAHFVHCTHEMCPEEYPHLKNHGLHHCNSFLEELAKQTSNCVLEICAEQRNLSEQLLPKHCATTISKAKNKKTRKQRQTPRKGEPERDKPGAESHRKNRSIVTNMDKLHLNLTELALTMNHVYSFSVFEHTIFPSEYLSSHLEARLNRAIVWLAGYNATTQEIVRPSELLAGVKAYIGFIQSLAQFLGADASRVIRNALLQQTQPLDSCGEQTITTLYTNWYLESLLRQASSGTIILSPAMQAFVSLPREGEQNFSAEEFSDISEMRALAELLGPYGMKFLSENLMWHVTSQIVELKKLVVENMDILVQIRSNFSKPDLMASLLPQLTGAENVLKRMTIIGVILSFRAMAQEGLREVFSSHCPFLMGPIECLKEFVTPDTDIKVTLSIFELASAAGVGCDIDPALVAAIANLKAGWEHGGQLMEKVRAWGHMCEFYNEKRSNVQVYFLSSGDLSLSSDRHGPLRPSSLFLG

SEQ ID NO: 906689 - protein, 575 aa, Homo sapiens
MSLTSAYQHKLAEKLTILICAHFVHCTHEMCPEEYPHLKNHGLHHCNSFLEELAKQTSNCVLEICAEQRNLSEQLLPKHCATTISKAKNKKTRKQRQTPRKGEPERDKPGAESHRKNRSIVTNMDKLHLNLTELALTMNHVYSFSVFEHTIFPSEYLSSHLEARLNRAIVWLAGYNATTQEIVRPSELLAGVKAYIGFIQSLAQFLGADASRVIRNALLQQTQPLDSCGEQTITTLYTNWYLESLLRQASSGTIILSPAMQAFVSLPREGEQNFSAEEFSDISEMRALAELLGPYGMKFLSENLMWHVTSQIVELKKLVVENMDILVQIRSNFSKPDLMASLLPQLTGAENVLKRMTIIGVILSFRAMAQEGLREVFSSHCPFLMGPIECLKEFVTPDTDIKVTLSIFELASAAGVGCDIDPALVAAIANLKADTSSPEEEYKVACLLLIFLAVSLPLLATDPSSFYSIEKDGYNNNIHCLTKAIIQVSAALFTLYNKNIETHLKEFLVVASVSLLQLGQETDKLKTRNRESISLLMRLVVEESSFLTLDMLESCFPYVLLRNAYREVSRAFHLN

SEQ ID NO: 906690 - protein, 344 aa, Homo sapiens
MPVGARQERYLESLLRQASSGTIILSPAMQAFVSLPREGEQNFSAEEFSDISEMRALAELLGPYGMKFLSENLMWHVTSQIVELKKLVVENMDILVQIRSNFSKPDLMASLLPQLTGAENVLKRMTIIGVILSFRAMAQEGLREVFSSHCPFLMGPIECLKEFVTPDTDIKVTLSIFELASAAGVGCDIDPALVAAIANLKADTSSPEEEYKVACLLLIFLAVSLPLLATDPSSFYSIEKDGYNNNIHCLTKAIIQVSAALFTLYNKNIETHLKEFLVVASVSLLQLGQETDKLKTRNRESISLLMRLVVEESSFLTLDMLESCFPYVLLRNAYREVSRAFHLN

SEQ ID NO: 906691 - protein, 1127 aa, Homo sapiens; identical to SEQ ID NO: 906685

SEQ ID NO: 906692 - protein, 838 aa, Homo sapiens
MSLTSAYQHKLAEKLTILNDRGQGVLIRMYNIKKTCSDPKSKPPFLLEKSMEPSLKYINKKFPNIDVRNSTQHLGPVHREKAEIIRFLTNYYQSFVDVMEFRDHVYELLNTIDACQCHFDINLNFDFTRSYLDLIVTYTSVILLLSRIEDRRILIGMYNCAHEMLHGHGDPSFARLGQMVLEYDHPLKKLTEEFGPHTKAVSGALLSLHFLFVRRNQGAEQWRSAQLLSLISNPPAMINPANSDTMACEYLSVEVMERWIIIGFLLCHGCLNSNSQCQKLWKLCLQGSLYITLIREDVLQVHKVTEDLFSSLKGYGKRVADIKESKEHVIANSGQFHCQRRQFLRMAVKELETVLADEPGLLGPKALFAFMALSFIRDEVTWLVRHTENVTKTKTPEDYADSSIAELLFLLEGIRSLVRRHIKVIQQYHLQYLARFDALVLSDIIQNLSVCPEEESIIMSSFVSILSSLNLKQVDNGEKFEFSGLRLDWFRLQAYTSVAKAPLHLHENPDLAKVMNLIVFHSRMLDSVEKLLVETSDLSTFCFHLRIFEKMFAMTLEESAMLRYAIAFPLICAHFVHCTHEMCPEEYPHLKNHGLHHCNSFLEELAKQTSNCVLEICAEQRNLSEQLLPKHCATTISKAKNKKTRKQRQTPRKGEPERDKPGAESHRKNRSIVTNMDKLHLNLTELALTMNHVYSFSVFEHTIFPSEYLSSHLEARLNRAIVWLAGYNATTQEIVRPSELLAGVKAYIGFIQSLAQFLGADASRVIRNALLQQTQPLDSCGEQTITTLYTNWSVLLRLFHCLTLCWHFFLYTVGPQGPSILAPRVIDSKMEGCFSLRN

SEQ ID NO: 906693 - protein, 111 aa, Homo sapiens
MSLTSAYQHKLAEKLTILNDRGQGVLIRMYNIKKTCSDPKSKPPFLLEKSMEPSLKYINKKFPNIDVRNSTQHLGPVHREKAEIIRFLTNYYQSFVDVMEFRVSSLEPFPM

SEQ ID NO: 906694 - protein, 1127 aa, Homo sapiens; identical to SEQ ID NO: 906685

SEQ ID NO: 906695 - protein, 892 aa, Homo sapiens
PRKQATYTARYEAWVVAVEVMERWIIIGFLLCHGCLNSNSQCQKLWKLCLQGSLYITLIREDVLQVHKVTEDLFSSLKGYGKRVADIKESKEHVIANSGQFHCQRRQFLRMAVKELETVLADEPGLLGPKALFAFMALSFIRDEVTWLVRHTENVTKTKTPEDYADSSIAELLFLLEGIRSLVRRHIKVIQQYHLQYLARFDALVLSDIIQNLSVCPEEESIIMSSFVSILSSLNLKQVDNGEKFEFSGLRLDWFRLQAYTSVAKAPLHLHENPDLAKVMNLIVFHSRMLDSVEKLLVETSDLSTFCFHLRIFEKMFAMTLEESAMLRYAIAFPLICAHFVHCTHEMCPEEYPHLKNHGLHHCNSFLEELAKQTSNCVLEICAEQRNLSEQLLPKHCATTISKAKNKKTRKQRQTPRKGEPERDKPGAESHRKNRSIVTNMDKLHLNLTELALTMNHVYSFSVFEHTIFPSEYLSSHLEARLNRAIVWLAGYNATTQEIVRPSELLAGVKAYIGFIQSLAQFLGADASRVIRNALLQQTQPLDSCGEQTITTLYTNWYLESLLRQASSGTIILSPAMQAFVSLPREGEQNFSAEEFSDISEMRALAELLGPYGMKFLSENLMWHVTSQIVELKKLVVENMDILVQIRSNFSKPDLMASLLPQLTGAENVLKRMTIIGVILSFRAMAQEGLREVFSSHCPFLMGPIECLKEFVTPDTDIKVTLSIFELASAAGVGCDIDPALVAAIANLKADTSSPEEEYKVACLLLIFLAVSLPLLATDPSSFYSIEKDGYNNNIHCLTKAIIQVSAALFTLYNKNIETHLKEFLVVASVSLLQLGQETDKLKTRNRESISLLMRLVVEESSFLTLDMLESCFPYVLLRNAYREVSRAFHLN

SEQ ID NO: 906696 - protein, 1127 aa, Homo sapiens; identical to SEQ ID NO: 906685

SEQ ID NO: 906697 - protein, 1026 aa, Homo sapiens
MSLTSAYQHKLAEKLTILNDRGQGVLIRMYNIKKTCSDPKSKPPFLLEKSMEPSLKYINKKFPNIDVRNSTQHLGPVHREKAEIIRFLTNYYQSFVDVMEFRDHVYELLNTIDACQCHFDINLNFDFTRSYLDLIVTYTSVILLLSRIEDRRILIGMYNCAHEMLHGHGDPSFARLGQMVLEYDHPLKKLTEEFGPHTKAVSGALLSLHFLFVRRNQGAEQWRSAQLLSLISNPPAMINPANSDTMACEYLSVEVMERWIIIGFLLCHGCLNSNSQCQKLWKLCLQGSLYITLIREDVLQVHKVTEDLFSSLKGYGKRVADIKESKEHVIANSGQFHCQRRQFLRMAVKELETVLADEPGLLGPKALFAFMALSFIRDEVTWLVRHTENVTKTKTPEDYADSSIAELLFLLEGIRSLVRRHIKVIQQYHLQYLARFDALVLSDIIQNLSVCPEEESIIMSSFVSILSSLNLKQVDNGEKFEFSGLRLDWFRLQAYTSVAKAPLHLHENPDLAKVMNLIVFHSRMLDSVEKLLVETSDLSTFCFHLRIFEKMFAMTLEESAMLRYAIAFPLICAHFVHCTHEMCPEEYPHLKNHGLHHCNSFLEELAKQTSNCVLEICAEQRNLSEQLLPKHCATTISKAKNKKTRKQRQTPRKGEPERDKPGAESHRKNRSIVTNMDKLHLNLTELALTMNHVYSFSVFEHTIFPSEYLSSHLEARLNRAIVWLAGYNATTQEIVRPSELLAGVKAYIGFIQSLAQFLGADASRVIRNALLQQTQPLDSCGEQTITTLYTNWYLESLLRQASSGTIILSPAMQAFVSLPREGEQNFSAEEFSDISEMRALAELLGPYGMKFLSENLMWHVTSQIVELKKLVVENMDILVQIRSNFSKPDLMASLLPQLTGAENVLKRMTIIGVILSFRAMAQEGLREVFSSHCPFLMGPIECLKEFVTPDTDIKVTLSIFELASAAGVGCDIDPALVAAIANLKADTSSPEEEYKVACLLLIFLAVSLPLLATDPSSFYSIEKDGK

SEQ ID NO: 906698 - protein, 1070 aa, Homo sapiens
MSLTSAYQHKLAEKLTILNDRGQGVLIRMYNIKKTCSDPKSKPPFLLEKSMEPSLKYINKKFPNIDVRNSTQHLGPVHREKAEIIRFLTNYYQSFVDVMEFRDHVYELLNTIDACQCHFDINLNFDFTRSYLDLIVTYTSVILLLSRIEDRRILIGMYNCAHEMLHGHGDPSFARLGQMVLEYDHPLKKLTEEFGPHTKAVSGALLSLHFLFVRRNQGAEQWRSAQLLSLISNPPAMINPANSDTMACEYLSVEVMERWIIIGFLLCHGCLNSNSQCQKLWKLCLQGSLYITLIREDVLQVHKVTEDLFSSLKGYGKRVADIKESKEHVIANSGQFHCQRRQFLRMAVKELETVLADEPGLLGPKALFAFMALSFIRDEVTWLVRHTENVTKTKTPEDYADSSIAELLFLLEGIRSLVRRHIKVIQQYHLQYLARFDALVLSDIIQNLSVCPEEESIIMSSFVSILSSLNLKQVDNGEKFEFSGLRLDWFRLQAYTSVAKAPLHLHENPDLAKVMNLIVFHSRMLDSVEKLLVETSDLSTFCFHLRIFEKMFAMTLEESAMLRYAIAFPLICAHFVHCTHEMCPEEYPHLKNHGLHHCNSFLEELAKQTSNCVLEICAEQRNLSEQLLPKHCATTISKAKNKKTRKQRQTPRKGEPERDKPGAESHRKNRSIVTNMDKLHLNLTELALTMNHVYSFSVFEHTIFPSEYLSSHLEARLNRAIVWLAGYNATTQEIVRPSELLAGVKAYIGFIQSLAQFLGADASRVIRNALLQQTQPLDSCGEQTITTLYTNWYLESLLRQASSGTIILSPAMQAFVSLPREGEQNFSAEEFSDISEMRALAELLGPYGMKFLSENLMWHVTSQIVELKKLVVENMDILVQIRSNFSKPDLMASLLPQLTGAENVLKRMTIIGVILSFRAMAQEGLREVFSSHCPFLMGPIECLKEFVTPDTDIKVTLSIFELASAAGVGCDIDPALVAAIANLKADTSSPEEEYKVACLLLIFLAVSLPLLATDPSSFYSIEKDGYNNNISVKAVPLGLTRDLISVLLCIGDEQGENKCVPTATRDIGYT

SEQ ID NO: 906699 - protein, 314 aa, Homo sapiens
MSLTSAYQHKLAEKLTILNDRGQGVLIRMYNIKKTCSDPKSKPPFLLEKSMEPSLKYINKKFPNIDVRNSTQHLGPVHREKAEIIRFLTNYYQSFVDVMEFRDHVYELLNTIDACQCHFDINLNFDFTRSYLDLIVTYTSVILLLSRIEDRRILIGMYNCAHEMLHGHGDPSFARLGQMVLEYDHPLKKLTEEFGPHTKAVSGALLSLHFLFVRRNQGAEQWRSAQLLSLISNPPAMINPANSDTMACEYLSVEVMERWIIIGFLLCHGCLNSNSQCQKLWKLCLQGSLYITLIREDVLQVHKVTEDLFSSLKG

SEQ ID NO: 906700 - protein, 360 aa, Homo sapiens
DAWVDPRARKVADIGLAAWGRKALDIAENEMPGLMRMRERYSASKPLKGARIAGCLHMTVETAVLIETLVTLGAEVQWSSCNIFSTQDHAAAAIAKAGIPVYAWKGETDEEYLWCIEQTLYFKDGPLNMILDDGGDLTNLIHTKYPQLLPGIRGISEETTTGVHNLYKMMANGILKVPAINVNDSVTKSKFDNLYGCRESLIDGIKRATDVMIAGKVAVVAGYGDVGKGCAQALRGFGARVIITEIDPINALQAAMEGYEVTTMDEACQEGNIFVTTTGCIDIILGRLWALQIVPVGILALAGDRAVATGRGGGTPARDASVKGPLRGGRARGGPWGLPTWRGAPPGFHVGAGGQPGPPR

SEQ ID NO: 906701 - protein, 190 aa, Homo sapiens
VAGAAGPTRGSLDPLESQPRRVSGRAKPAGSWSSRAAMSGPFRVAVDYKSQHAPRRRGRRAVCEPQTGGVLRGRAHLATAWDGWHLPDPARGACARPPRPGPDPVQLGGPDERPPLSGPPTGTARAPRRVYEERPGKRAPGRLRSSSPLGLWASYPTCGVPHPSSRGSLAEISKKIWSGLKNPAVPPIEV

SEQ ID NO: 906702 - protein, 432 aa, Homo sapiens
MSDKLPYKVADIGLAAWGRKALDIAENEMPGLMRMRERYSASKPLKGARIAGCLHMTVETAVLIETLVTLGAEVQWSSCNIFSTQDHAAAAIAKAGIPVYAWKGETDEEYLWCIEQTLYFKDGPLNMILDDGGDLTNLIHTKYPQLLPGIRGISEETTTGVHNLYKMMANGILKVPAINVNDSVTKSKFDNLYGCRESLIDGIKRATDVMIAGKVAVVAGYGDVGKGCAQALRGFGARVIITEIDPINALQAAMEGYEVTTMDEACQEGNIFVTTTGCIDIILGRHFEQMKDDAIVCNIGHFDVEIDVKWLNENAVEKVNIKPQVDRYRLKNGRRIILLAEGRLVNLGCAMGHPSFVMSNSFTNQVMAQIELWTHPDKYPVGVHFLPKKLDEAVAEAHLGKLNVKLTKLTEKQAQYLGMSCDGPFKPDHYRY

SEQ ID NO: 906703 - protein, 432 aa, Homo sapiens; identical to SEQ ID NO: 906702

SEQ ID NO: 906704 - protein, 465 aa, Homo sapiens
MSDKLPYKVADIGLAAWGRKALDIAENEMPGLMRMRERYSASKPLKGARIAGCLHMTVETAVLIETLVTLGAEVQWSSCNIFSTQDHAAAAIAKAGIPVYAWKGETDEEYLWCIEQTLYFKDGPLNMILDDGGDLTNLIHTKYPQLLPGIRGISEETTTGVHNLYKMMANGILKVPAINVNDSVTKSKFDNLYGCRESLIDGIKRATDVMIAGKVAVVAGYGDVGKGCAQALRGFGARVIITEIDPINALQAAMEGYEVTTMDEACQEGNIFVTTTGCIDIILGRLGARWGVPGSEGGGQSWDSFLSLTISHGLGLPEHFEQMKDDAIVCNIGHFDVEIDVKWLNENAVEKVNIKPQVDRYRLKNGRRIILLAEGRLVNLGCAMGHPSFVMSNSFTNQVMAQIELWTHPDKYPVGVHFLPKKLDEAVAEAHLGKLNVKLTKLTEKQAQYLGMSCDGPFKPDHYRY

SEQ ID NO: 906705 - protein, 432 aa, Homo sapiens; identical to SEQ ID NO: 906702

SEQ ID NO: 906706 - protein, 434 aa, Homo sapiens
DAWVDPRARKVADIGLAAWGRKALDIAENEMPGLMRMRERYSASKPLKGARIAGCLHMTVETAVLIETLVTLGAEVQWSSCNIFSTQDHAAAAIAKAGIPVYAWKGETDEEYLWCIEQTLYFKDGPLNMILDDGGDLTNLIHTKYPQLLPGIRGISEETTTGVHNLYKMMANGILKVPAINVNDSVTKSKFDNLYGCRESLIDGIKRATDVMIAGKVAVVAGYGDVGKGCAQALRGFGARVIITEIDPINALQAAMEGYEVTTMDEACQEGNIFVTTTGCIDIILGRHFEQMKDDAIVCNIGHFDVEIDVKWLNENAVEKVNIKPQVDRYRLKNGRRIILLAEGRLVNLGCAMGHPSFVMSNSFTNQVMAQIELWTHPDKYPVGVHFLPKKLDEAVAEAHLGKLNVKLTKLTEKQAQYLGMSCDGPFKPDHYRY

SEQ ID NO: 906707 - protein, 249 aa, Homo sapiens
MSDKLPYKVADIGLAAWGRKALDIAENEMPGLMRMRERYSASKPLKGARIAGCLHMTVETAVLIETLVTLGAEVQWSSCNIFSTQDHAAAAIAKAGIPVYAWKGETDEEYLWCIEQTLYFKDGPLNMILDDGGDLTNLIHTKYPQLLPGIRGISEETTTGVHNLYKMMANGILKVPAINVNDSVTKSKFDNLYGCRESLIDGIKRATDVMIAGKVAVVAGYGDVGKGCAQALRGFGARVIITEIDPIAL

SEQ ID NO: 906708 - protein, 266 aa, Homo sapiens [sequence omitted]

SEQ ID NO: 906709 - protein, 432 aa, Homo sapiens; identical to SEQ ID NO: 906702

SEQ ID NO: 906710 - protein, 432 aa, Homo sapiens; identical to SEQ ID NO: 906702

SEQ ID NO: 906711 - protein, 432 aa, Homo sapiens; identical to SEQ ID NO: 906702

SEQ ID NO: 906712 - protein, 359 aa, Homo sapiens
MSDKLPYKVADIGLAAWGRKALDIAENEMPGLMRMRERYSASKPLKGARIAGCLHMTVETAVLIETLVTLGAEVQWSSCNIFSTQDHAAAAIAKAGIPVYAWKGETDEEYLWCIEQTLYFKDGPLNMILDDGGDLTNLIHTKYPQLLPGIRGISEETTTGVHNLYKMMANGILKVPAINVNDSVTKSKFDNLYGCRESLIDGIKRATDVMIAGKVAVVAGYGDVGKGCAQALRGFGARVIITEIDPINALQAAMEGYEVTTMDEACQEGNIFVTTTGCIDIILGRLWALQIVPVGILALDREIGQWPRDAGEETPARDASVKGPLRGGRARGGPWGLPTWRGAPPGFHVGAGGQPGPPR

SEQ ID NO: 906713 - protein, 285 aa, Homo sapiens
MSDKLPYKVADIGLAAWGRKALDIAENEMPGLMRMRERYSASKPLKGARIAGCLHMTVETAVLIETLVTLGAEVQWSSCNIFSTQDHAAAAIAKAGIPVYAWKGETDEEYLWCIEQTLYFKDGPLNMILDDGGDLTNLIHTKYPQLLPGIRGISEETTTGVHNLYKMMANGILKVPAINVNDSVTKSKFDNLYGCRESLIDGIKRATDVMIAGKVAVVAGYGDVGKGCAQALRGFGARVIITEIDPINALQAAMEGYEVTTMDEACQEGNIFVTTTGCIDIILGR

SEQ ID NO: 906714 - protein, 171 aa, Homo sapiens
MSDKLPYKVADIGLAAWGRKALDIAENEMPGLMRMRERYSASKPLKGARIAGCLHMTVETAVLIETLVTLGAEVQWSSCNIFSTQDHAAAAIAKAGIPVYAWKGETDEEYLWCIEQTLYFKDGPLNMILDDGGDLTNLIRFALPGIHRNASLGNGSRRMVLGGEDVAQSPC

SEQ ID NO: 906715 - protein, 432 aa, Homo sapiens; identical to SEQ ID NO: 906702

SEQ ID NO: 906716 - protein, 464 aa, Homo sapiens
GRVGRPTRSQSRSCSQTEAQPPSPVSITSAASMSDKLPYKVADIGLAAWGRKALDIAENEMPGLMRMRERYSASKPLKGARIAGCLHMTVETAVLIETLVTLGAEVQWSSCNIFSTQDHAAAAIAKAGIPVYAWKGETDEEYLWCIEQTLYFKDGPLNMILDDGGDLTNLIHTKYPQLLPGIRGISEETTTGVHNLYKMMANGILKVPAINVNDSVTKSKFDNLYGCRESLIDGIKRATDVMIAGKVAVVAGYGDVGKGCAQALRGFGARVIITEIDPINALQAAMEGYEVTTMDEACQEGNIFVTTTGCIDIILGRHFEQMKDDAIVCNIGHFDVEIDVKWLNENAVEKVNIKPQVDRYRLKNGRRIILLAEGRLVNLGCAMGHPSFVMSNSFTNQVMAQIELWTHPDKYPVGVHFLPKKLDEAVAEAHLGKLNVKLTKLTEKQAQYLGMSCDGPFKPDHYRY

SEQ ID NO: 906717 - protein, 432 aa, Homo sapiens; identical to SEQ ID NO: 906702

SEQ ID NO: 906718 - protein, 432 aa, Homo sapiens; identical to SEQ ID NO: 906702

SEQ ID NO: 906719 - protein, 404 aa, Homo sapiens
MPGLMRMRERYSASKPLKGARIAGCLHMTVETAVLIETLVTLGAEVQWSSCNIFSTQDHAAAAIAKAGIPVYAWKGETDEEYLWCIEQTLYFKDGPLNMILDDGGDLTNLIHTKYPQLLPGIRGISEETTTGVHNLYKMMANGILKVPAINVNDSVTKSKFDNLYGCRESLIDGIKRATDVMIAGKVAVVAGYGDVGKGCAQALRGFGARVIITEIDPINALQAAMEGYEVTTMDEACQEGNIFVTTTGCIDIILGRHFEQMKDDAIVCNIGHFDVEIDVKWLNENAVEKVNIKPQVDRYRLKNGRRIILLAEGRLVNLGCAMGHPSFVMSNSFTNQVMAQIELWTHPDKYPVGVHFLPKKLDEAVAEAHLGKLNVKLTKLTEKQAQYLGMSCDGPFKPDHYRY

SEQ ID NO: 906720 - protein, 404 aa, Homo sapiens; identical to SEQ ID NO: 906719

SEQ ID NO: 906721 - protein, 382 aa, Homo sapiens
MSDKLPYKVADIGLAAWGRKALDIAENEMPGLMRMRERYSASKPLKGARIAGCLHMTVETAVLIETLVTLGAEVQWSSCNIFSTQDHAAAAIAKAGIPVYAWKGETDEEYLWCIEQTLYFKDGPLNMILDDGGDLTNLIHTKYPQLLPGIRGISEETTTGVHNLYKMMANGILKVPAINVNDSVTKSKFDNLYGCRESLIDGIKRATDVMIAGKVAVVAGYGDVGKGCAQALRGFGARVIITEIDPINALQAAMEGYEVTTMDEACQEGNIFVTTTGCIDIILGRHFEQMKDDAIVCNIGHFDVEIDVKWLNENAVEKVNIKPQVMAQIELWTHPDKYPVGVHFLPKKLGKLNVKLTKLTEKQAQYLGMSCDGPFKPDHYRY

SEQ ID NO: 906722 - protein, 307 aa, Homo sapiens
PINVNDLLLVTESLTLMAGTLRIPLDIILERLWTPVVVSSEMPRMPGRSCGYYGVADSVTKSKFDNLYGCRESLIDGIKRATDVMIAGKVAVVAGYGDVGKGCAQALRGFGARVIITEIDPINALQAAMEGYEVTTMDEACQEGNIFVTTTGCIDIILGRHFEQMKDDAIVCNIGHFDVEIDVKWLNENAVEKVNIKPQVDRYRLKNGRRIILLAEGRLVNLGCAMGHPSFVMSNSFTNQVMAQIELWTHPDKYPVGVHFLPKKLDEAVAEAHLGKLNVKLTKLTEKQAQYLGMSCDGPFKPDHYRY

SEQ ID NO: 906723 - protein, 432 aa, Homo sapiens; identical to SEQ ID NO: 906702

SEQ ID NO: 906724 - protein, 166 aa, Homo sapiens
FLINIGCYFCAKPCAGGCFGAVRTPHGHCWRQRGLPDQRVGCGSGALPAFTVALPACEVDRYRLKNGRRIILLAEGRLVNLGCAMGHPSFVMSNSFTNQVMAQIELWTHPDKYPVGVHFLPKKLDEAVAEAHLGKLNVKLTKLTEKQAQYLGMSCDGPFKPDHYRY

SEQ ID NO: 906725 - protein, 424 aa, Homo sapiens
MSDKLPYKVADIGLAAWGRKALDIAENEMPGLMRMRERYSASKPLKGARIAGCLHMTVETAVLIETLVTLGAEVQWSSCNIFSTQDHAAAAIAKAGIPVYAWKGETDEEYLWCIEQTLYFKDGPLNMILDDGGDLTNLIHTKYPQLLPGIRGISEETTTGVHNLYKMMANGILKVPAINVNDSVTKSKFDNLYGCRESLIDGIKRATDVMIAGKVAVVAGYGDVGKGCAQALRGFGARVIITEIDPINALQAAMEGYEVTTMDEACQEGNIFVTTTDGLHFTLEQDIDPNELSDDPGVVAGGTMDSGRHTRTGAAKNSGGKAGANYHDAGQTECSEIRDGGNKLTQARSRQRDHNRRPMTTTEGGQETATRAEDLKSDDRTKHGGRHAAERRSDDQRKETRGEKKDEERAACLLLACSQRRVDA

SEQ ID NO: 906726 - protein, 91 aa, Homo sapiens
TALPEARPTKMSALGAVIALLLWGQLFAVDSGNDVTDIADDGCPKPPEIAHGYVEHSVRYQCKNYYKLRTEGDGVYTLNNEKQWINKAVGR

SEQ ID NO: 906727 - protein, 91 aa, Homo sapiens; identical to SEQ ID NO: 906726

SEQ ID NO: 906728 - protein, 91 aa, Homo sapiens; identical to SEQ ID NO: 906726

SEQ ID NO: 906729 - protein, 91 aa, Homo sapiens; identical to SEQ ID NO: 906726

SEQ ID NO: 906730 - protein, 101 aa, Homo sapiens
TALPEARPTKMSALGAVIALLLWGQLFAVDSGNDVTDIADDGCPKPPEIAHGYVEHSVRYQCKNYYKLRTEGDETPAMAMRAVPLPVHDPGGGHPGMRLGS

SEQ ID NO: 906731 - protein, 111 aa, Homo sapiens
TALPEARPTKMSALGAVIALLLWGQLFAVDSGNDVTDIADDGCPKPPEIAHGYVEHSVRYQCKNYYKLRTEGDGVYTLNDKKQWINKAVGDKLPECEAVTSIPGLGSEDHS

SEQ ID NO: 906732 - protein, 161 aa, Homo sapiens
MSALGAVIALLLWGQLFAVDSGNDVTDIADDGCPKPPEIAHGYVEHSVRYQCKNYYKLRTEGDEYYTFKIARRKQTLRIKKAGHLLNPWLHHKALGLGFLYLIEVFSVALGAVCLSPTPKDARKTSTISHVATFTSMPHKCLSESPNSAFPQNKPNAIRQN

SEQ ID NO: 906733 - protein, 199 aa, Homo sapiens
TEPGPQAAPCQLSSSHSRSNRLLSPMARATLSAAPSNPRLLRVALLLLLLVAASRRAAGGSRRPGVPGPDAAGVGAPRQTAPLNQRVSSSLGAPLATELRCQCLQTLQGIHLKNIQSVKVKSPGPHCAQTEVMEVSPIAAAATAGVPDSPAAPNPVLSPTSCLTRFPSLCRATLKNGQKACLNPASPMVKKIIEKMLKK

SEQ ID NO: 906734 - protein, 385 aa, Homo sapiens
MHVCVCVCVCVYMPVCVDACMCCEAGRPAFRSFLFSLCSDLGAVISLLLWGRQLFALYSGNDVTDISDDRFPKPPEIANGYVEHLFRYQCKNYYRLRTEGDGVYTLNDKKQWINKAVGDKLPECEAVCGKPKNPANPVQRILGGHLDAKGSFPWQAKMVSHHNLTTGATLINEQWLLTTAKNLFLNHSENATAKDIAPTLTLYVGKKQLVEIEKVVLHPNYHQVDIGLIKLKQKVLVNERVMPICLPSKNYAEVGRVGYVSGWGQSDNFKLTDHLKYVMLPVADQYDCITHYEGSTCPKWKAPKSPVGVQPILNEHTFCVGMSKYQEDTCYGDAGSAFAVHDLEEDTWYAAGILSFDKSCAVAEYGVYVKVTSIQHWVQKTIAEN

SEQ ID NO: 906735 - protein, 131 aa, Homo sapiens
MSALGAVIALLLWGQLFAVDSGNDVTDIADDGCPKPPEIPFFTKQIPWILISGSWILKVKGYFSYICEFSSDGARGQKRKTWTIPIHSQHFDMSWGKAYIFNLKERSIISMLNRISRSFINDFTETNKGFD

SEQ ID NO: 906736 - protein, 91 aa, Homo sapiens; identical to SEQ ID NO: 906726

SEQ ID NO: 906737 - protein, 91 aa, Homo sapiens; identical to SEQ ID NO: 906726

SEQ ID NO: 906738 - protein, 178 aa, Homo sapiens
MSALGAVIALLLWGQLFAVDSGNDVTDIADDGCPKPPEIAHGYVEHSVRYQCKNYYKLRTEGDVCGEAQESGKPSAAGSWGWDTWDCQRQLFPWQAKMVSHHNLTTGATLINEQWLLTTAKNLFLNHSENATAKDIAPTLTLYVGKKQLVEIEKVVLHPNYSQVDIGLIKLKQKVSVN

SEQ ID NO: 906739 - protein, 135 aa, Homo sapiens
MSRISQMTAARSPPRLHMAMWSTRFATSVRTTTNCAQKEMTWDCQRQLFPWQAKMVSHHNLTTGATLINEQWLLTTAKNLFLNHSENATAKDIAPTLTLYVGKKQLVEIEKVVLHPNYSQVDIGLIKLKQKVSVN

SEQ ID NO: 906740 - protein, 91 aa, Homo sapiens; identical to SEQ ID NO: 906726

SEQ ID NO: 906741 - protein, 91 aa, Homo sapiens; identical to SEQ ID NO: 906726

SEQ ID NO: 906742 - protein, 91 aa, Homo sapiens; identical to SEQ ID NO: 906726

SEQ ID NO: 906743 - protein, 110 aa, Homo sapiens
TALPEARPTKMSALGAVIALLLWGQLFAVDSGNDVTDIADDGCPKPPEIAHGYVEHSVRYQCKNYYKLRTEGDVYVGKKQLVEIEKVVLHPNYSQVDIGLIKLKQKVSVN

SEQ ID NO: 906744 - protein, 91 aa, Homo sapiens; identical to SEQ ID NO: 906726

SEQ ID NO: 906745 - protein, 91 aa, Homo sapiens; identical to SEQ ID NO: 906726

SEQ ID NO: 906746 - protein, 91 aa, Homo sapiens
TALPEARPTKMSALGAVIALLLWGQLFAVDSGNDVTDIADDGCPKPPEIAHGYVEHSVRYQCKNYYKLRTEGDAPEKKTPERSPVGVQAPY

SEQ ID NO: 906747 - protein, 91 aa, Homo sapiens; identical to SEQ ID NO: 906726

SEQ ID NO: 906748 - protein, 142 aa, Homo sapiens
MSALGAVIALLLWGQLFAVDSGNDVTDIADDGCPKPPEIAHGYVEHSVRYQCKNYYKLRTEGDGVYTLNDKKQWINKAVGDKLPECEADDGCPKPPEIAHGYVEHSVRYQCKNYYKLRTEGDGKMWTTVSMPYIQPPSLTFP

SEQ ID NO: 906749 - protein, 311 aa, Homo sapiens
MSALGAVIALLLWGQLFAVDSGNDVTDIADDGCPKPPEIAHGYVEHSVRYQCKNYYKLRTEGDGVYTLNNEKQWINKAVGRYKALFVSEEETKLTRPGGLHQEWGLQKGKLCREMLKHAPGYDKVQDISEVVTHRILMYGRSESPMQTPNNLPEVIWRPYSLHTENVDPYKHGATQHEAHSRSQHTTQHSGTKPVPATGPTLQTFNPLKLQAAGTRHPKQRIESSRRGYRAELEARHRSNVENKNNNHNDNTTCTKQPQQMASQEHHNTRRDRERKTYQTSHSIVEQGTRTMTRNTRYTDTTRRSRRIHSR

SEQ ID NO: 906750 - protein, 74 aa, Homo sapiens
TALPEARPTKMSALGAVIALLLWGQLFAVDSGNDVTDIADDGCPKPPEIAHGYVEHSVRYQCKNYYKLRTEGDE

SEQ ID NO: 906751 - protein, 140 aa, Homo sapiens
MSALGAVIALLLWGQLFAVDSGNDVTDIADDGCPKPPEIAHGYVEHSVRYQCKNYYKLRTEGDGVYTLNDKKQWINKAVGDKLPECEADDGCPKPPEIAHGYVEHSVRYQCKNYYKLRTEGDGVYTLNNEKQWINKAVGR

SEQ ID NO: 906752 - protein, 91 aa, Homo sapiens; identical to SEQ ID NO: 906726

SEQ ID NO: 906753 - protein, 101 aa, Homo sapiens; identical to SEQ ID NO: 906730

SEQ ID NO: 906754 - protein, 157 aa, Homo sapiens
MSALGAVIALLLWGQLFAVDSGNDVTDIADDGCPKPPEIAHGYVEHSVRYQCKNYYKLRTEGDASSRRAEREQLFLQSWKFDTIRFELLEIQHMLNLKYKGEKINQLLKHKNEYQGPDQISHSSFLATLSAPHAPEYPPKKIIGFKTISAPHPKNNC

SEQ ID NO: 906755 - protein, 92 aa, Homo sapiens
TALPEARPTKMSALGAVIALLLWGQLFAVDSGNDVTDIADDGCPKPPEIAHGYVEHSVRYQCKNYYKLRTEGDVPLPVHDPGGGHPGMRLGS

SEQ ID NO: 906756 - protein, 81 aa, Homo sapiens
TALPEARPTKMSALGAVIALLLWGQLFAVDSGNDVTDIADDGCPKPPEIAHGYVEHSVRYQCKNYYKLRTEGDVWLSMVCM

SEQ ID NO: 906757 - protein, 93 aa, Homo sapiens
TALPEARPTKMSALGAVIALLLWGQLFAVDSGNDVTDIADDGCPKPPEIAHGYVEHSVRYQCKNYYKLRTEGDGKMWTTVSMPYIQPPSLTFP

SEQ ID NO: 906758 - protein, 91 aa, Homo sapiens; identical to SEQ ID NO: 906726

SEQ ID NO: 906759 - protein, 91 aa, Homo sapiens; identical to SEQ ID NO: 906726

SEQ ID NO: 906760 - protein, 91 aa, Homo sapiens; identical to SEQ ID NO: 906726

SEQ ID NO: 906761 - protein, 91 aa, Homo sapiens; identical to SEQ ID NO: 906726

SEQ ID NO: 906762 - protein, 140 aa, Homo sapiens
MSALGAVIALLLWGQLFAVDSGNDVTDIADDGCPKPPEIAHGYVEHSVRYQCKNYYKLRTEGDDNLTTGATLINEQWLLTTAKNLFLNHSENATAKDIAPTLTLYVGKKQLVEIEKVVLHPNYSQVDIGLIKLKQKVSVN

SEQ ID NO: 906763 - protein, 265 aa, Homo sapiens
MPICLPSKDYAEVGRVGYVSGWGRNANFKFTFPWQAKMVSHHNLTTGATLINEQWLLTTAKNLFLNHSENATAKDIAPTLTLYVGKKQLVEIEKVVLHPNYHQVDIGLIKLKQKVLVNERVMPICLPSKNYAEVGRVGYVSGWGQSDNFKLTDHLKYVMLPVADQYDCITHYEGSTCPKWKAPKSPVGVQPILNEHTFCVGMSKYQEDTCYGDAGSAFAVHDLEEDTWYAAGILSFDKSCAVAEYGVYVKVTSIQHWVQKTIAEN

SEQ ID NO: 906764 - protein, 97 aa, Homo sapiens
TALPEARPTKMSALGAVIALLLWGQLFAVDSGNDVTDIADDGCPKPPEIAHGYVEHSVRYQCKNYYKLRTEGDATFKGLCRSRACGLCFWLGAKCQF

SEQ ID NO: 906765 - protein, 91 aa, Homo sapiens; identical to SEQ ID NO: 906726

SEQ ID NO: 906766 - protein, 91 aa, Homo sapiens; identical to SEQ ID NO: 906726

SEQ ID NO: 906767 - protein, 165 aa, Homo sapiens
MSALGAVIALLLWGQLFAVDSGNDVTDIADDGCPKPPEIAHGYVEHSVRYQCKNYYKLRTEGDGVYTLNDKKQWINKAVGDKLPECEADNLTTGATLINEQWLLTTAKNLFLNHSENATAKDIAPTLTLYVGKKQLVEIEKVVLHPNYSQVDIGLIKLKQKVSVN

SEQ ID NO: 906768 - protein, 106 aa, Homo sapiens
  misc_feature (106)..(106): Xaa can be any naturally occurring amino acid
MSALGAVIALLLWGQLFAVDSGNDVTDIADDGCPKPPEIAHGYVEHSVRYQCKNYYKLRTEGDGVYTLNDKKQWINKAVGDKLPECEADNPGKPKYSLPRGASHRX

SEQ ID NO: 906769 - protein, 713 aa, Homo sapiens
MRLLVAPLLLAWVAGATAAVPVVPWHVPCPPQCACQIRPWYTPRSSYREATTVDCNDLFLTAVPPALPAGTQTLLLQSNSIVRVDQSELGYLANLTELDLSQNSFSDARDCDFHALPQLLSLHLEENQLTRLEDHSFAGLASLQELYLNHNQLYRIAPRAFSGLSNLLRLHLNSNLLRAIDSRWFEMLPNLEILMIGGNKVDAILDMNFRPLANLRSLVLAGMNLREISDYALEGLQSLESLSFYDNQLARVPRRALEQVPGLKFLDLNKNPLQRVGPGDFANMLHLKELGLNNMEELVSIDKFALVNLPELTKLDITNNPRLSFIHPRAFHHLPQMETLMLNNNALSALHQQTVESLPNLQEVGLHGNPIRCDCVIRWANATGTRVRFIEPQSTLCAEPPDLQRLPVREVPFREMTDHCLPLISPRSFPPSLQVASGESMVLHCRALAEPEPEIYWVTPAGLRLTPAHAGRRYRVYPEGTLELRRVTAEEAGLYTCVAQNLVGADTKTVSVVVGRALLQPGRDEGQGLELRVQETHPYHILLSWVTPPNTVSTNLTWSSASSLRGQGATALARLPRGTHSYNITRLLQATEYWACLQVAFADAHTQLACVWARTKEATSCHRALGDRPGLIAILALAVLLLAAGLAAHLGTGQPRKGVGGRRPLPPAWAFWGWSAPSVRVVSAPLVLPWNPGRKLPRSSEGETLLPPLSQNS

SEQ ID NO: 906770 - protein, 713 aa, Homo sapiens; identical to SEQ ID NO: 906769

SEQ ID NO: 906771 - protein, 713 aa, Homo sapiens; identical to SEQ ID NO: 906769

SEQ ID NO: 906772 - protein, 713 aa, Homo sapiens; identical to SEQ ID NO: 906769

SEQ ID NO: 906773 - protein, 713 aa, Homo sapiens; identical to SEQ ID NO: 906769

SEQ ID NO: 906774 - protein, 790 aa, Homo sapiens
MNIMNTEQSQNSIVSRIKVFEGQTNIETSGLPKKPEITPRSLPPKPTVSSGKPSVAPKPAANRASGEWDSGTENRLKVTSKEGLTPYPPLQEAGSIPVTKPELPKKPNPGLIRSVNPEIPGRGPLAESSDSGKKVPTPAPRPLLLKKSVSSENPTYPSAPLKPVTVPPRLAGASQAKAYKSLGEGPPANPPVPVLQSKPLVDIDLISFDDDVLPTPSGNLAEESVGSEMVLDPFQLPAKTEPIKERAVQPAPTRKPTVIRIPAKPGKCLHEDPQSPPPLPAEKPIGNTFSTVSGKLSNVERTRNLESNHPGQTGGFVRVPPRLPPRPVNGKTIPTQQPPTKVPPERPPPPKLSATRRSNKKLPFNRSSSDMDLQKKQSNLATGLSKAKSQVFKNQDPVLPPRPKPGHPLYSKYMLSVPHGIANEDIVSQNPGELSCKRGDVLVMLKQTENNYLECQKGEDTGRVHLSQMKIITPLDEHLRSRPNDPSHAQKPVDSGAPHAVVLHDFPAEQVDDLNLTSGEIVYLLEKIDTDWYRGNCRNQIGIFPANYVKVIIDIPEGGNGKRECVSSHCVKGSRCVARFEYIGEQKDELSFSEGEIIILKEYVNEEWARGEVRGRTGIFPLNFVEPVEDYPTSGANVLSTKVPLKTKKEDSGSNSQVNSLPAEWCEALHSFTAETSDDLSFKRGDRIQILERLDSDWCRGRLQDREGIFPAVFVRPCPAEAKSMLAIVPKGRKAKALYDFRGENEDELSFKAGDIITELESVDDDWMSGELMGKSGIFPKNYIQFLQIS

SEQ ID NO: 906775 - protein, 790 aa, Homo sapiens; identical to SEQ ID NO: 906774

SEQ ID NO: 906776 - protein, 1109 aa, Homo sapiens
EESGSGSGKGQGLRGRRDAARRRGIGSARALPLPGRLQVEFAEVAISTAAADASSPGAAFPPARGRWLWGAGCRRSGAPGPQLAGHPAAAPRASPMAEGRRREDEEEELRERRELGGQRRARGRALSGHSAADRNERNKPEHRSSSQGPLSSIRAVIKRSSRTSIQSELHRDRRRPEITIVAAEPLRPASWFPGTPPPGLGFPTSSAAGSWRPNELVPAELPPSYEQVIKEINQVQVNTTNNNNAAATPRHTITSATQTDFSEEIDNDLPQSNATLQAPLKPLQPFSAVSSGNLPTNVAPLIVFDISEEPNCPENPSATRCPVPKPRSKSNLRPIPRDSHIKEQSQQKISPAAVGEESSPGRPQSLLDNASTSDSQAVMNIMNTEQSQNSIVSRIKVFEGQTNIETSGLPKKPEITPRSLPPKPTVSSGKPSVAPKPAANRASGEWDSGTENRLKVTSKEGLTPYPPLQEAGSIPVTKPELPKKPNPGLIRSVNPEIPGRGPLAESSDSGKKVPTPAPRPLLLKKSVSSENPTYPSAPLKPVTVPPRLAGASQAKAYKSLGEGPPANPPVPVLQSKPLVDIDLISFDDDVLPTPSGNLAEESVGSEMVLGLHEDPQSPPPLPAEKPIGNTFSTVSGKLSNVERTRNLESNHPGQTGGFVRVPPRLPPRPVNGKTIPTQQPPTKVPPERPPPPKLSATRRSNKKLPFNRSSSDMDLQKKQSNLATGLSKAKSQVFKNQDPVLPPRPKPGHPLYSKYMRGDVLVMLKQTENNYLECQKGEDTGRVHLSQMKIITPLDEHLRSRPNDPSHAQKPVDSGAPHAVVLHDFPAEQVDDLNLTSGEIVYLLEKIDTDWYRGNCRNQIGIFPANYVKVIIDIPEGGNGKRECVSSHCVKGSRCVARFEYIGEQKDELSFSEGEIIILKEYVNEEWARGEVRGRTGIFPLNFVEPVEDYPTSGANVLSTKVPLKTKKEDSGSNSQVNSLPAEWCEALHSFTAETSDDLSFKRGDRIQILERLDSDWCRGRLQDREGIFPAVFVRPCPAEAKSMLAIVPKGRKAKALYDFRGENEDELSFKAGDIITELESVDDDWMSGELMGKSGIFPKNYIQFLQIS

SEQ ID NO: 906777 - protein, 546 aa, Homo sapiens
DYPQLQHYSMKPTVIRIPAKPGKCLHEDPQSPPPLPAEKPIGNTFSTVSGKLSNVERTRNLESNHPGQTGGFVRVPPRLPPRPVNGKTIPTQQPPTKVPPERPPPPKLSATRRSNKKLPFNRSSSDMDLQKKQSNLATGLSKAKSQVFKNQDPVLPPRPKPGHPLYSKYMLSVPHGIANEDIVSQNPGELSCKRGDVLVMLKQTENNYLECQKGEDTGRVHLSQMKIITPLDEHLRSRPNDPSHAQKPVDSGAPHAVVLHDFPAEQVDDLNLTSGEIVYLLEKIDTDWYRGNCRNQIGIFPANYVKVIIDIPEGGNGKRECVSSHCVKGSRCVARFEYIGEQKDELSFSEGEIIILKEYVNEEWARGEVRGRTGIFPLNFVEPVEDYPTSGANVLSTKVPLKTKKEDSGSNSQVNSLPAEWCEALHSFTAETSDDLSFKRGDRIQILERLDSDWCRGRLQDREGIFPAVFVRPCPAEAKSMLAIVPKGRKAKALYDFRGENEDELSFKAGDIITELESVDDDWMSGELMGKSGIFPKNYIQFLQIS

SEQ ID NO: 906778 - protein, 1174 aa, Homo sapiens
EESGSGSGKGQGLRGRRDAARRRGIGSARALPLPGRLQVEFAEVAISTAAADASSPGAAFPPARGRWLWGAGCRRSGAPGPQLAGHPAAAPRASPMAEGRRREDEEEELRERRELGGQRRARGRALSGHSAADRNERNKPEHRSSSQGPLSSIRAVIKRSSRTSIQSELHRDRRRPEITIVAAEPLRPASWFPGTPPPGLGFPTSSAAGSWRPNELVPAELPPSYEQVIKEINQVQVNTTNNNNAAATPRHTITSATQTDFSEEIDNDLPQSNATLQAPLKPLQPFSAVSSGNLPTNVAPLIVFDISEEPNCPENPSATRCPVPKPRSKSNLRPIPRDSHIKEQSQQKISPAAVGEESSPGRPQSLLDNASTSDSQAVMNIMNTEQSQNSIVSRIKVFEGQTNIETSGLPKKPEITPRSLPPKPTVSSGKPSVAPKPAANRASGEWDSGTENRLKVTSKEGLTPYPPLQEAGSIPVTKPELPKKPNPGLIRSVNPEIPGRGPLAESSDSGKKVPTPAPRPLLLKKSVSSENPTYPSAPLKPVTVPPRLAGASQAKAYKSLGEGPPANPPVPVLQSKPLVDIDLISFDDDVLPTPSGNLAEESVGSEMVLDPFQLPAKTEPIKERAVQPAPTRKPTVIRIPAKPGKCLHEDPQSPPPLPAEKPIGNTFSTVSGKLSNVERTRNLESNHPGQTGGFVRVPPRLPPRPVNGKTIPTQQPPTKVPPERPPPPKLSATRRSNKKLPFNRSSSDMDLQKKQSNLATGLSKAKSQVFKNQDPVLPPRPKPGHPLYSKYMLSVPHGIANEDIVSQNPGELSCKRGDVLVMLKQTENNYLECQKGEDTGRVHLSQMKIITPLDEHLRSRPNPFSPPKDPSHAQKPVDSGAPHAVVLHDFPAEQVDDLNLTSGEIVYLLEKIDTDWYRGNCRNQIGIFPANYVKVIIDIPEGGNGKRECVSSHCVKGSRCVARFEYIGEQKDELSFSEGEIIILKEYVNEEWARGEVRGRTGIFPLNFVEPVEDYPTSGANVLSTKVPLKTKKEDSGSNSQVNSLPAEWCEALHSFTAETSDDLSFKRGDRIQILERLDSDWCRGRLQDREGIFPAVFVRPCPAEAKSMLAIVPKGRKAKALYDFRGENEDELSFKAGDIITELESVDDDWMSGELMGKSGIFPKNYIQFLQIS

SEQ ID NO: 906779 - protein, 1109 aa, Homo sapiens; identical to SEQ ID NO: 906776

SEQ ID NO: 906780 - protein, 108 aa, Homo sapiens
SGVAFHQALPPTLGIMIQLEIWWLHRSKPYQALRHSNPPYTVKHYPSLVLARAKLRLCCWHLDAIVFEYIAGDIITELESVDDDWMSGELMGKSGIFPKNYIQFLQIS

SEQ ID NO: 906781 - protein, 1078 aa, Homo sapiens
EESGSGSGKGQGLRGRRDAARRRGIGSARALPLPGRLQVEFAEVAISTAAADASSPGAAFPPARGRWLWGAGCRRSGAPGPQLAGHPAAAPRASPMAEGRRREDEEEELRERRELGGQRRARGRALSGHSAADRNERNKPEHRSSSQGPLSSIRAVIKRSSRTSIQSELHRDRRRPEITIVAAEPLRPASWFPGTPPPGLGFPTSSAAGSWRPNELVPAELPPSYEQVIKEINQVQVNTTNNNNAAATPRHTITSATQTDFSEEIDNDLPQSNATLQAPLKPLQPFSAVSSGNLPTNVAPLIVFDISEEPNCPENPSATRCPVPKPRSKSNLRPIPRDSHIKEQSQQKISPAAVGEESSPGRPQSLLDNASTSDSQAVMNIMNTEQSQNSIVSRIKVFEGQTNIETSGLPKKPEITPRSLPPKPTVSSGKPSVAPKPAANRASGEWDSGTENRLKVTSKEGLTPYPPLQEAGSIPVTKPELPKKPNPGLIRSVNPEIPGRGPLAESSDSGKKVPTPAPRPLLLKKSVSSENPTYPSAPLKPVTVPPRLAGASQAKAYKSLGEGPPANPPVPVLQSKPLVDIDLISFDDDVLPTPSGNLAEESVGSEMVLGLHEDPQSPPPLPAEKPIGNTFSTVSGKLSNVERTRNLESNHPGQTGGFVRVPPRLPPRPVNGKTIPTQQPPTKVPPERPPPPKLSATRRSNKKLPFNRSSSDMDLQKKQSNLATGLSKAKSQVFKNQDPVLPPRPKPGHPLYSKYMRGDVLVMLKQTENNYLECQKGEDTGRVHLSQMKIITPLDEHLRSRPNDPSHAQKPVDSGAPHAVVLHDFPAEQVDDLNLTSGEIVYLLEKIDTDWYRGNCRNQIGIFPANYVKVIIDIPEGGNGKRECVSSHCVKGSRCVARFEYIGEQKDELSFSEGEIIILKEYVNEEWARGEVRGRTGIFPLNFVEPVEDYPTSGANVLSTKVPLKTKKEDSGSNSQVNSLPAEWCEALHSFTAETSDDLSFKRGDRIQILERLDSDWCRGRLQDREGIFPAVFVRPCPAEAKSMLAIVPKGRKAKALYDFRGENEDELSFKVRMCISS

SEQ ID NO: 906782 - protein, 1053 aa, Homo sapiens
EESGSGSGKGQGLRGRRDAARRRGIGSARALPLPGRLQVEFAEVAISTAAADASSPGAAFPPARGRWLWGAGCRRSGAPGPQLAGHPAAAPRASPMAEGRRREDEEEELRERRELGGQRRARGRALSGHSAADRNERNKPEHRSSSQGPLSSIRAVIKRSSRTSIQSELHRDRRRPEITIVAAEPLRPASWFPGTPPPGLGFPTSSAAGSWRPNELVPAELPPSYEQVIKEINQVQVNTTNNNNAAATPRHTITSATQTDFSEEIDNDLPQSNATLQAPLKPLQPFSAVSSGNLPTNVAPLIVFDISEEPNCPENPSATRCPVPKPRSKSNLRPIPRDSHIKEQSQQKISPAAVGEESSPGRPQSLLDNASTSDSQAVMNIMNTEQSQNSIVSRIKVFEGQTNIETSGLPKKPEITPRSLPPKPTVSSGKPSVAPKPAANRASGEWDSGTENRLKVTSKEGLTPYPPLQEAGSIPVTKPELPKKPNPGLIRSVNPEIPGRGPLAESSDSGKKVPTPAPRPLLLKKSVSSENPTYPSAPLKPVTVPPRLAGASQAKAYKSLGEGPPANPPVPVLQSKPLVDIDLISFDDDVLPTPSGNLAEESVGSEMVLGLHEDPQSPPPLPAEKPIGNTFSTVSGKLSNVERTRNLESNHPGQTGGFVRVPPRLPPRPVNGKTIPTQQPPTKVPPERPPPPKLSATRRSNKKLPFNRSSSDMDLQKKQSNLATGLSKAKSQVFKNQDPVLPPRPKPGHPLYSKYMRGDVLVMLKQTENNYLECQKGEDTGRVHLSQMKIITPLDEHLRSRPNDPSHAQKPVDSGAPHAVVLHDFPAEQVDDLNLTSGEIVYLLEKIDTDWYRGNCRNQIGIFPANYVKVIIDIPEGGNGKRECVSSHCVKGSRCVARFEYIGEQKDELSFSEGEIIILKEYVNEEWARGEVRGRTGIFPLNFVEPVEDYPTSGANVLSTKVPLKTKKEDSGSNSQVNSLPAEWCEALHSFTAETSDDLSFKRGDRIQILERLDSDWCRGRLQDREGIFPAVFVRPCPAEAGGSLEPGRSRLQ

SEQ ID NO: 906783 - protein, 1168 aa, Homo sapiens
EESGSGSGKGQGLRGRRDAARRRGIGSARALPLPGRLQVEFAEVAISTAAADASSPGAAFPPARGRWLWGAGCRRSGAPGPQLAGHPAAAPRASPMAEGRRREDEEEELRERRELGGQRRARGRALSGHSAADRNERNKPEHRSSSQGPLSSIRAVIKRSSRTSIQSELHRDRRRPEITIVAAEPLRPASWFPGTPPPGLGFPTSSAAGSWRPNELVPAELPPSYEQVIKEINQVQVNTTNNNNAAATPRHTITSATQTDFSEEIDNDLPQSNATLQAPLKPLQPFSAVSSGNLPTNVAPLIVFDISEEPNCPENPSATRCPVPKPRSKSNLRPIPRDSHIKEQSQQKISPAAVGEESSPGRPQSLLDNASTSDSQAVMNIMNTEQSQNSIVSRIKVFEGQTNIETSGLPKKPEITPRSLPPKPTVSSGKPSVAPKPAANRASGEWDSGTENRLKVTSKEGLTPYPPLQEAGSIPVTKPELPKKPNPGLIRSVNPEIPGRGPLAESSDSGKKVPTPAPRPLLLKKSVSSENPTYPSAPLKPVTVPPRLAGASQAKAYKSLGEGPPANPPVPVLQSKPLVDIDLISFDDDVLPTPSGNLAEESVGSEMVLDPFQLPAKTEPIKERAVQPAPTRKPTVIRIPAKPGKCLHEDPQSPPPLPAEKPIGNTFSTVSGKLSNVERTRNLESNHPGQTGGFVRVPPRLPPRPVNGKTIPTQQPPTKVPPERPPPPKLSATRRSNKKLPFNRSSSDMDLQKKQSNLATGLSKAKSQVFKNQDPVLPPRPKPGHPLYSKYMLSVPHGIANEDIVSQNPGELSCKRGDVLVMLKQTENNYLECQKGEDTGRVHLSQMKIITPLDEHLRSRPNDPSHAQKPVDSGAPHAVVLHDFPAEQVDDLNLTSGEIVYLLEKIDTDWYRGNCRNQIGIFPANYVKVIIDIPEGGNGKRECVSSHCVKGSRCVARFEYIGEQKDELSFSEGEIIILKEYVNEEWARGEVRGRTGIFPLNFVEPVEDYPTSGANVLSTKVPLKTKKEDSGSNSQVNSLPAEWCEALHSFTAETSDDLSFKRGDRIQILERLDSDWCRGRLQDREGIFPAVFVRPCPAEAKSMLAIVPKGRKAKALYDFRGENEDELSFKAGDIITELESVDDDWMSGELMGKSGIFPKNYIQFLQIS

SEQ ID NO: 906784 - protein, 1072 aa, Homo sapiens
RARTIWLDEEEELRERRELGGQRRARGRALSGHSAADRNERNKPEHRSSSQGPLSSIRAVIKRSSRTSIQSELHRDRRRPEITIVAAEPLRPASWFPGTPPPGLGFPTSSAAGSWRPNELVPAELPPSYEQVIKEINQVQVNTTNNNNAAATPRHTITSATQTDFSEEIDNDLPQSNATLQAPLKPLQPFSAVSSGNLPTNVAPLIVFDISEEPNCPENPSATRCPVPKPRSKSNLRPIPRDSHIKEQSQQKISPAAVGEESSPGRPQSLLDNASTSDSQAVMNIMNTEQSQNSIVSRIKVFEGQTNIETSGLPKKPEITPRSLPPKPTVSSGKPSVAPKPAANRASGEWDSGTENRLKVTSKEGLTPYPPLQEAGSIPVTKPELPKKPNPGLIRSVNPEIPGRGPLAESSDSGKKVPTPAPRPLLLKKSVSSENPTYPSAPLKPVTVPPRLAGASQAKAYKSLGEGPPANPPVPVLQSKPLVDIDLISFDDDVLPTPSGNLAEESVGSEMVLDPFQLPAKTEPIKERAVQPAPTRKPTVIRIPAKPGKCLHEDPQSPPPLPAEKPIGNTFSTVSGKLSNVERTRNLESNHPGQTGGFVRVPPRLPPRPVNGKTIPTQQPPTKVPPERPPPPKLSATRRSNKKLPFNRSSSDMDLQKKQSNLATGLSKAKSQVFKNQDPVLPPRPKPGHPLYSKYMLSVPHGIANEDIVSQNPGELSCKRGDVLVMLKQTENNYLECQKGEDTGRVHLSQMKIITPLDEHLRSRPNDPSHAQKPVDSGAPHAVVLHDFPAEQVDDLNLTSGEIVYLLEKIDTDWYRGNCRNQIGIFPANYVKVIIDIPEGGNGKRECVSSHCVKGSRCVARFEYIGEQKDELSFSEGEIIILKEYVNEEWARGEVRGRTGIFPLNFVEPVEDYPTSGANVLSTKVPLKTKKEDSGSNSQVNSLPAEWCEALHSFTAETSDDLSFKRGDRIQILERLDSDWCRGRLQDREGIFPAVFVRPCPAEAKSMLAIVPKGRKAKALYDFRGENEDELSFKAGDIITELESVDDDWMSGELMGKSGIFPKNYIQFLQIS

SEQ ID NO: 906785 - protein, 1014 aa, Homo sapiens
MPRGRASRTSIQSELHRDRRRPEITIVAAEPLRPASWFPGTPPPGLGFPTSSAAGSWRPNELVPAELPPSYEQVIKEINQVQVNTTNNNNAAATPRHTITSATQTDFSEEIDNDLPQSNATLQAPLKPLQPFSAVSSGNLPTNVAPLIVFDISEEPNCPENPSATRCPVPKPRSKSNLRPIPRDSHIKEQSQQKISPAAVGEESSPGRPQSLLDNASTSDSQAVMNIMNTEQSQNSIVSRIKVFEGQTNIETSGLPKKPEITPRSLPPKPTVSSGKPSVAPKPAANRASGEWDSGTENRLKVTSKEGLTPYPPLQEAGSIPVTKPELPKKPNPGLIRSVNPEIPGRGPLAESSDSGKKVPTPAPRPLLLKKSVSSENPTYPSAPLKPVTVPPRLAGASQAKAYKSLGEGPPANPPVPVLQSKPLVDIDLISFDDDVLPTPSGNLAEESVGSEMVLDPFQLPAKTEPIKERAVQPAPTRKPTVIRIPAKPGKCLHEDPQSPPPLPAEKPIGNTFSTVSGKLSNVERTRNLESNHPGQTGGFVRVPPRLPPRPVNGKTIPTQQPPTKVPPERPPPPKLSATRRSNKKLPFNRSSSDMDLQKKQSNLATGLSKAKSQVFKNQDPVLPPRPKPGHPLYSKYMLSVPHGIANEDIVSQNPGELSCKRGDVLVMLKQTENNYLECQKGEDTGRVHLSQMKIITPLDEHLRSRPNDPSHAQKPVDSGAPHAVVLHDFPAEQVDDLNLTSGEIVYLLEKIDTDWYRGNCRNQIGIFPANYVKVIIDIPEGGNGKRECVSSHCVKGSRCVARFEYIGEQKDELSFSEGEIIILKEYVNEEWARGEVRGRTGIFPLNFVEPVEDYPTSGANVLSTKVPLKTKKEDSGSNSQVNSLPAEWCEALHSFTAETSDDLSFKRGDRIQILERLDSDWCRGRLQDREGIFPAVFVRPCPAEAKSMLAIVPKGRKAKALYDFRGENEDELSFKAGDIITELESVDDDWMSGELMGKSGIFPKNYIQFLQIS

SEQ ID NO: 906786 - protein, 1109 aa, Homo sapiens; identical to SEQ ID NO: 906776

SEQ ID NO: 906787 - protein, 1109 aa, Homo sapiens; identical to SEQ ID NO: 906776

SEQ ID NO: 906788 - protein, 1109 aa, Homo sapiens; identical to SEQ ID NO: 906776

SEQ ID NO: 906789 - protein, 1083 aa, Homo sapiens
EESGSGSGKGQGLRGRRDAARRRGIGSARALPLPGRLQVEFAEVAISTAAADASSPGAAFPPARGRWLWGAGCRRSGAPGPQLAGHPAAAPRASPMAEGRRREDEEEELRERRELGGQRRARGRALSGHSAADRNERNKPEHRSSSQGPLSSIRAVIKRSSRTSIQSELHRDRRRPEITIVAAEPLRPASWFPGTPPPGLGFPTSSAAGSWRPNELVPAELPPSYEQVIKEINQVQVNTTNNNNAAATPRHTITSATQTDFSEEIDNDLPQSNATLQAPLKPLQPFSAVSSGNLPTNVAPLIVFDISEEPNCPENPSATRCPVPKPRSKSNLRPIPRDSHIKEQSQQKISPAAVGEESSPGRPQSLLDNASTSDSQAVMNIMNTEQSQNSIVSRIKVFEGQTNIETSGLPKKPEITPRSLPPKPTVSSGKPSVAPKPAANRASGEWDSGTENRLKVTSKEGLTPYPPLQEAGSIPVTKPELPKKPNPGLIRSVNPEIPGRGPLAESSDSGKKVPTPAPRPLLLKKSVSSENPTYPSAPLKPVTVPPRLAGASQAKAYKSLGEGPPANPPVPVLQSKPLVDIDLISFDDDVLPTPSGNLAEESVGSEMVLGLHEDPQSPPPLPAEKPIGNTFSTVSGKLSNVERTRNLESNHPGQTGGFVRVPPRLPPRPVNGKTIPTQQPPTKVPPERPPPPKLSATRRSNKKLPFNRSSSDMDLQKKQSNLATGLSKAKSQVFKNQDPVLPPRPKPGHPLYSKYMRGDVLVMLKQTENNYLECQKGEDTGRVHLSQMKIITPLDEHLRSRPNDPSHAQKPVDSGAPHAVVLHDFPAEQVDDLNLTSGEIVYLLEKIDTDWYRGNCRNQIGIFPANYVKVIIDIPEGGNGKRECVSSHCVKGSRCVARFEYIGEQKDELSFSEGEIIILKEYVNEEWARGEVRGRTGIFPLNFVEPVEDYPTSGANVLSTKVPLKTKKEDSGSNSQVNSLPAEWCEALHSFTAETSDDLSFKRGDRIQILERLDSDWCRGRLQDREGIFPAVFVRPCPAEAKSMLAIVPKGRKAKALYDFRGENEDELSFKMRKRPSNSGSHL

SEQ ID NO: 906790 - protein, 996 aa, Homo sapiens
EESGSGSGKGQGLRGRRDAARRRGIGSARALPLPGRLQVEFAEVAISTAAADASSPGAAFPPARGRWLWGAGCRRSGAPGPQLAGHPAAAPRASPMAEGRRREDEEEELRERRELGGQRRARGRALSGHSAADRNERNKPEHRSSSQGPLSSIRAVIKRSSRTSIQSELHRDRRRPEITIVAAEPLRPASWFPGTPPPGLGFPTSSAAGSWRPNELVPAELPPSYEQVIKEINQVQVNTTNNNNAAATPRHTITSATQTDFSEEIDNDLPQSNATLQAPLKPLQPFSAVSSGNLPTNVAPLIVFDISEEPNCPENPSATRCPVPKPRSKSNLRPIPRDSHIKEQSQQKISPAAVGEESSPGRPQSLLDNASTSDSQAVMNIMNTEQSQNSIVSRIKVFEGQTNIETSGLPKKPEITPRSLPPKPTVSSGKPSVAPKPAANRASGEWDSGTENRLKVTSKEGLTPYPPLQEAGSIPVTKPELPKKPNPGLIRSVNPEIPGRGPLAESSDSGKKVPTPAPRPLLLKKSVSSENPTYPSAPLKPVTVPPRLAGASQAKAYKSLGEGPPANPPVPVLQSKPLVDIDLISFDDDVLPTPSGNLAEESVGSEMVLDPFQLPAKTEPIKERAVQPAPTRKPTVIRIPAKPGKCLHEDPQSPPPLPAEKPIGNTFSTVSGKLSNVERTRNLESNHPGQTGGFVRVPPRLPPRPVNGKTIPTQQPPTKVPPERPPPPKLSATRRSNKKLPFNRSSSDMDLQKKQSNLATGLSKAKSQVFKNQDPVLPPRPKPGHPLYSKYMLSVPHGIANEDIVSQNPGELSCKRGDVLVMLKQTENNYLECQKGEDTGRVHLSQMKIITPLDEHLRSRPNPFSPPKDPSHAQKPVDSGAPHAVVLHDFPAGKDVNNAVGEPQDPGVSLFPCRGLASQGHPSSFFCAYRVRDWRGHLIQDSTSRRVDCTSHSRKLSCIPLPLKLPEKEKERERDFPLQMNIANCLPVTNFLTLSK

SEQ ID NO: 906791 - protein, 250 aa, Homo sapiens
HASRTAWVDPRVRVAELLLRRLEASDGGLDSAELAAELGMEHQAVVGAVKSLQALGEVIEAELRSTKHWELTAEGEEIAREGSHEARVFRSIPPEGLAQSELMRLPSGKVGFSKAMSNKWIRVDKSAADGPRVFRVVDSMEDEVQRRLQLVRGGQAEKLGEKERSELRKRKLLAEVTLKTYWVSKGSAFSTSISKQETELSPEMISSGSWRDRPFKPYNFLAHGVLPDSGHLHPLLKVRSQFRQIFLEMG

SEQ ID NO: 906792 - protein, 468 aa, Homo sapiens
  misc_feature (468)..(468): Xaa can be any naturally occurring amino acid
WEGVMADGQVAELLLRRLEASDGGLDSAELAAELGMEHQAVVGAVKSLQALGEVIEAELRSTKHWELTAEGEEIAREGSHEARVFRSIPPEGLAQSELMRLPSGKVGFSKAMSNKWIRVDKSAADGPRVFRVVDSMEDEVQRRLQLVRGGQAEKLGEKERSELRKRKLLAEVTLKTYWVSKGSAFSTSISKQETELSPEMISSGSWRDRPFKPYNFLAHGVLPDSGHLHPLLKVRSQFRQIFLEMGFTEMPTDNFIESSFWNFDALFQPQQHPARDQHDTFFLRDPAEALQLPMDYVQRVKRTHSQGGYGSQGYKYNWKLDEARKNLLRTHTTSASARALYRLAQKKPFTPVKYFSIDRVFRNETLDATHLAEFHQIEGVVADHGLTLGHLMGVLREFFTKLGITQLRFKPAYNPYTEPSMEVFSYHQGLKKWVEVGNSGVFRPEMLLPMGLPENVSVIAWGLSLERX

SEQ ID NO: 906793 - protein, 371 aa, Homo sapiens
WEGVMADGQVAELLLRRLEASDGGLDSAELAAELGMEHQAVVGAVKSLQALGEVIEAELRSTKHWELTAEGEEIAREGSHEARVFRSIPPEGLAQSELMRLPSGKVGFSKAMSNKWIRVDKSAADGPRVFRVVDSMEDEVQRRLQLVRGGQAEKLGEKERSELRKRKLLAEVTLKTYWVSKGSAFSTSISKQETELSPEMISSGSWRDRPFKPYNFLAHGVLPDSGHLHPLLKVRSQFRQIFLEMGFTEMPTDNFIESSFWNFDALFQPQQHPARDQHDTFFLRDPAEALQLPMDYVQRVKRTHSQGGYGSQGYKYNWKLDEARKNLLRTHTTSASARALYRLAQKTTYFVTKTLLLTSLFFEFDDTPRFR

SEQ ID NO: 906794 - protein, 337 aa, Homo sapiens
WEGVMADGQVAELLLRRLEASDGGLDSAELAAELGMEHQAVVGAVKSLQALGEVIEAELRSTKHWELTAEGEEIAREGSHEARVFRSIPPEGLAQSELMRLPSGKVGFSKAMSNKWIRVDKSAADGPRVFRVVDSMEDEVQRRLQLVRGGQAEKLGEKERSELRKRKLLAEVTLKTYWVSKGSAFSTSISKQETELSPEMISSGSWRDRPFKPYNFLAHGVLPDSGHLHPLLKVRSQFRQIFLEMGFTEMPTDNFIESSFWNFDALFQPQQHPARDQHDTFFLRDPAEALQLPTMIKYGINNIRELVGHKVNLQMVYDSPLCRLDAEPRPPPTQEAA

SEQ ID NO: 906795 - protein, 449 aa, Homo sapiens
WEGVMADGQVAELLLRRLEASDGGLDSAELAAELGMEHQAVVGAVKSLQALGEVIEAELRSTKHWELTAEGEEIAREGSHEARVFRSIPPEGLAQSELMLRKRKLLAEVTLKTYWVSKGSAFSTSISKQETELSPEMISSGSWRDRPFKPYNFLAHGVLPDSGHLHPLLKVRSQFRQIFLEMGFTEMPTDNFIESSFWNFDALFQPQQHPARDQHDTFFLRDPAEALQLPMDYVQRVKRTHSQGGYGSQGYKYNWKLDEARKNLLRTHTTSASARALYRLAQKKPFTPVKYFSIDRVFRNETLDATHLAEFHQIEGVVADHGLTLGHLMGVLREFFTKLGITQLRFKPAYNPYTEPSMEVFSYHQGLKKWVEVGNSGVFRPEMLLPMGLPENVSVIAWGLSLERPTMIKYGINNIRELVGHKVNLQMVYDSPLCRLDAEPRPPPTQEAA

SEQ ID NO: 906796 - protein, 397 aa, Homo sapiens
PPISPPPPPPPALARAVGGNLAVAELLLRRLEASDGGLDSAELAAELGMEHQAVVGAVKSLQALGEVIEAELRSTKQETELSPEMISSGSWRDRPFKPYNFLAHGVLPDSGHLHPLLKVRSQFRQIFLEMGFTEMPTDNFIESSFWNFDALFQPQQHPARDQHDTFFLRDPAEALQLPMDYVQRVKRTHSQGGYGSQGYKYNWKLDEARKNLLRTHTTSASARALYRLAQKKPFTPVKYFSIDRVFRNETLDATHLAEFHQIEGVVADHGLTLGHLMGVLREFFTKLGITQLRFKPAYNPYTEPSMEVFSYHQGLKKWVEVGNSGVFRPEMLLPMGLPENVSVIAWGLSLERPTMIKYGINNIRELVGHKVNLQMVYDSPLCRLDAEPRPPPTQEAA

SEQ ID NO: 906797 - protein, 236 aa, Homo sapiens
WEGVMADGQVAELLLRRLEASDGGLDSAELAAELGMEHQAVVGAVKSLQALGEVIEAELRSTKHWELTAEGEEIAREGSHEARVFRSIPPEGLAQSELMRLPSGKVGFSKAMSNKWIRVDKSAADGPRVFRVVDSMEDEVQRRLQLVRGGQAEKLGEKERSELRKRKLLAEVTLKTYWVSKGSAFSTSISKQETELSPEMISSGSWRDRPFKPYNFLAHGVLPDSGHLHPLCIPGQ

SEQ ID NO: 906798 - protein, 236 aa, Homo sapiens; identical to SEQ ID NO: 906797

SEQ ID NO: 906799 - protein, 249 aa, Homo sapiens
PPISPPPPPPPALARAVGGNLAVAELLLRRLEASDGGLDSAELAAELGMEHQAVVGAVKSLQALGEVIEAELRSTKHWELTAEGEEIAREGSHEARVFRSIPPEGLAQSELMRLPSGKVGFSKAMSNKWIRVDKSAADGPRVFRVVDSMEDEVQRRLQLVRGGQAEKLGEKERSELRKRKLLAEVTLKTYWVSKGSAFSTSISKQETELSPEMISSGSWRDRPFKPYNFLAHGVLPDSGHLHPLCIPGQ

SEQ ID NO: 906800 - protein, 512 aa, Homo sapiens
WEGVMADGQVAELLLRRLEASDGGLDSAELAAELGMEHQAVVGAVKSLQALGEVIEAELRSTKHWELTAEGEEIAREGSHEARVFRSIPPEGLAQSELMRLPSGKVGFSKAMSNKWIRVDKSAADGPRVFRVVDSMEDEVQRRLQLVRGGQAEKLGEKERSELRKRKLLAEVTLKTYWVSKGSAFSTSISKQETELSPEMISSGSWRDRPFKPYNFLAHGVLPDSGHLHPLLKVRSQFRQIFLEMGFTEMPTDNFIESSFWNFDALFQPQQHPARDQHDTFFLRDPAEALQLPMDYVQRVKRTHSQGGYGSQGYKYNWKLDEARKNLLRTHTTSASARALYRLAQKKPFTPVKYFSIDRVFRNETLDATHLAEFHQIEGVVADHGLTLGHLMGVLREFFTKLGITQLRFKPAYNPYTEPSMEVFSYHQGLKKWVEVGNSGVFRPEMLLPMGLPENVSVIAWGLSLERPTMIKYGINNIRELVGHKVNLQMVYDSPLCRLDAEPRPPPTQEAA

SEQ ID NO: 906801 - protein, 540 aa, Homo sapiens
MADGQVAELLLRRLEASDGGLDSAELAAELGMEHQAVVGAVKSLQALGEVIEAELRSTKHWELTAEGEEIAREGSHEARVFRSIPPEGLAQSELMRLPSGKVGFSKAMSNKWIRVDKSAADGPRVFRVVDSMEDEVQRRLQLVRGGQAEKLGEKERSELRKRKLLAEVTLKTYWVSKGSAFSTSISKQETELSPEMISSGSWRDRPFKPYNFLAHGVLPDSGHLHPLLKVRSQFRQIFLEMGFTEMPTDNFIESSFWNFDALFQPQQHPARDQHDTFFLRDPAEALQLPMDYVQRVKRTHSQGGYGSQGYKYNWKLDEARKNLLRTHTTSASARALYRLAQKVRLAQAGAPVGRGCCQRDLLTHTWAWLGCHPKKPFTPVKYFSIDRVFRNETLDATHLAEFHQIEGVVADHGLTLGHLMGVLREFFTKLGITQLRFKPAYNPYTEPSMEVFSYHQGLKKWVEVGNSGVFRPEMLLPMGLPENVSVIAWGLSLERPTMIKYGINNIRELVGHKVNLQMVYDSPLCRLDAEPRPPPTQEAA

SEQ ID NO: 906802 - protein, 394 aa, Homo sapiens
WEGVMADGQVAELLLRRLEASDGGLDSAELAAELGMEHQAVVGAVKSLQALGEVIEAELRSTKHWELTAEGEEIAREGSHEARVFRSIPPEGLAQSELMRLPSGKVGFSKAMSNKWIRVDKSAADGPRVFRVVDSMEDEVQRRLQLVRGGQAEKLGEKERSELRKRKLLAEVTLKTYWVSKGSAFSTSISKQETELSPEMISSGSWRDRPFKPYNFLAHGVLPDSGHLHPLLKVRSQFRQIFLEMGFTEMPTDNFIESSFWNFDALFQPQQHPARDQHDTFFLRDPAEALQLPMDYVQRVKRTHSQGGYGSQGYKYNWKLDEARKNLLRTHTTSASARALYRLAQKAFTPVKYFSIDRFRIGALARTGCSQMGGVGLAHWRLLGLGVSQGFRIR

SEQ ID NO: 906803 - protein, 467 aa, Homo sapiens
SHTKSHTCTGVPHLVPHLHWELTAEGEEIAREGSHEARVFRSIPPEGLAQSELMRLPSGKVGFSKAMSNKWIRVDKSAADGPRVFRVVDSMEDEVQRRLQLVRGGQAEKLGEKERSELRKRKLLAEVTLKTYWVSKGSAFSTSISKQETELSPEMISSGSWRDRPFKPYNFLAHGVLPDSGHLHPLLKVRSQFRQIFLEMGFTEMPTDNFIESSFWNFDALFQPQQHPARDQHDTFFLRDPAEALQLPMDYVQRVKRTHSQGGYGSQGYKYNWKLDEARKNLLRTHTTSASARALYRLAQKKPFTPVKYFSIDRVFRNETLDATHLAEFHQIEGVVADHGLTLGHLMGVLREFFTKLGITQLRFKPAYNPYTEPSMEVFSYHQGLKKWVEVGNSGVFRPEMLLPMGLPENVSVIAWGLSLERPTMIKYGINNIRELVGHKVNLQMVYDSPLCRLDAEPRPPPTQEAA

SEQ ID NO: 906804 - protein, 246 aa, Homo sapiens
WEGVMADGQVAELLLRRLEASDGGLDSAELAAELGMEHQAVVGAVKSLQALGEVIEAELRSTKHWELTAEGEEIAREGSHEARVFRSIPPEGLAQSELMRLPSGKVGFSKAMSNKWIRVDKSAADGPRVFRVVDSMEDEVQRRLQLVRGGQAEKLGEKERSELRKRKLLAEVTLKTYWVSKGSAFSTSISKQETELSPEMISSGSWRDRPFKPYNFLAHGVLPDSGHLHPLLKVRSQFRQIFLEMG

SEQ ID NO: 906805 - protein, 260 aa, Homo sapiens
WEGVMADGQVAELLLRRLEASDGGLDSAELAAELGMEHQAVVGAVKSLQALGEVIEAELRSTKHWELTAEGEEIAREGSHEARVFRSIPPEGLAQSELMRLPSGKVGFSKAMSNKWIRVDKSAADGPRVFRVVDSMEDEVQRRLQLVRGGQAEKLGEKERSELRKRKLLAEVTLKTYWVSKGSAFSTSISKQETELSPEMISSGSWRDRPFKPYNFLAHGVLPDSGHLHPLLKVRSQFQNPRDRGLGSRFLLLSCVVCLL

SEQ ID NO: 906806 - protein, 209 aa, Homo sapiens
WEGVMADGQVAELLLRRLEASDGGLDSAELAAELGMEHQAVVGAVKSLQALGEVIEAELRSTKHWELTAEGEEIAREGSHEARVFRSIPPEGLAQSELMRLPSGKVGFSKAMSNKWIRVDKSAADGPRVFRVVDSMEDEVQRRLQLVRGGQAEKLGEKERSELRKRKLLAEVTLKTYWVSKGSAFSTSISNKNPHAIQEPQGTSRQLHT

SEQ ID NO: 906807 - protein, 609 aa, Homo sapiens
ASAMALRKELLKSIWYAFTALDVEKSGKVSKSQLKVLSHNLYTVLHIPHDPVALEEHFRDDDDGPVSSQGYMPYLNKYILDKVEEGAFVKEHFDELCWTLTAKKNYRADSNGNSMLSNQDAFRLWCLFNFLSEDKYPLIMVPDEVEYLLKKVLSSMSLEVSLGELEELLAQEAQVAQTTGGLSVWQFLELFNSGRCLRGVGRDTLSMAIHEVYQELIQDVLKQGYLWKRGHLRRNWAERWFQLQPSCLCYFGSEECKEKRGIIPLDAHCCVEVLPDRDGKRCMFCVKTATRTYEMSASDTRQRQEWTAAIQMAIRLQAEGKTSLHKDLKQKRREQREQRERRRAAKEEELLRLQQLQEEKERKLQELEPLQQALEGQLREAEQARASMQAEMELKEEEAARQRQRIKELEEMQQRLQEALQLEVKARRDEESVRIAQTRLLEEEEEKLKQLMQLKEEQERYIERAQQEKEELQQEMAQQSRSLQQAQQQLEEVRQNRQRADEDVEAAQRKLRQASTNVKHWNVQMNRLMHPIEPGDKRPVTSSSFSGFQPPLLAHRDSSLKRLTRWGSQGNRTPSPNSNEQQKSLNGGDEAPAPASTPQEDKLDPAPEN

SEQ ID NO: 906808 - protein, 597 aa, Homo sapiens
ASAMALRKELLKSIWYAFTALDVEKSGKVSKSQLKVLSHNLYTVLHIPHDPVALEEHFRDDDDGPVSSQGYMPYLNKYILDKDAFRLWCLFNFLSEDKYPLIMVPDEVEYLLKKVLSSMSLEVSLGELEELLAQEAQVAQTTGGLSVWQFLELFNSGRCLRGVGRDTLSMAIHEVYQELIQDVLKQGYLWKRGHLRRNWAERWFQLQPSCLCYFGSEECKEKRGIIPLDAHCCVEVLPDRDGKRCMFCVKTATRTYEMSASDTRQRQEWTAAIQMAIRLQAEGKTSLHKDLKQKRREQREQRERRRAAKEEELLRLQQLQEEKERKLQELELLQEAQRQAERLLQEEEERRRSQHRELQQALEGQLREAEQARASMQAEMELKEEEAARQRQRIKELEEMQQRLQEALQLEVKARRDEESVRIAQTRLLEEEEEKLKQLMQLKEEQERYIERAQQEKEELQQEMAQQSRSLQQAQQQLEEVRQNRQRADEDVEAAQRKLRQASTNVKHWNVQMNRLMHPIEPGDKRPVTSSSFSGFQPPLLAHRDSSLKRLTRWGSQGNRTPSPNSNEQQKSLNGGDEAPAPASTPQEDKLDPAPEN

SEQ ID NO: 906809 - protein, 352 aa, Homo sapiens [sequence omitted]

SEQ ID NO: 906810 - protein, 165 aa, Homo sapiens
ASAMALRKELLKSIWYAFTALDVEKSGKVSKSQLKVLSHNLYTVLHIPHDPVALEEHFRDDDDGPVSSQGYMPYLNKYILDKVEEGAFVKEHFDELCWTLTAKKNYRADSNGNSMLSNQDAFRLWCLFNFLSEDKYPLIMVPDEVRVMAAPGTESLGTRPKQNHE

SEQ ID NO: 906811 - protein, 634 aa, Homo sapiens
ASAMALRKELLKSIWYAFTALDVEKSGKVSKSQLKVLSHNLYTVLHIPHDPVALEEHFRDDDDGPVSSQGYMPYLNKYILDKVEEGAFVKEHFDELCWTLTAKKNYRADSNGNSMLSNQDAFRLWCLFNFLSEDKYPLIMVPDEVEYLLKKVLSSMSLEVSLGELEELLAQEAQVAQTTGGLSVWQFLELFNSGRCLRGVGRDTLSMAIHEVYQELIQDVLKQGYLWKRGHLRRNWAERWFQLQPSCLCYFGSEECKEKRGIIPLDAHCCVEVLPDRDGKRCMFCVKTATRTYEMSASDTRQRQEWTAAIQMAIRLQAEGKTSLHKDLKQKRREQREQRERRRAAKEEELLRLQQLQEEKERKLQELELLQEAQRQAERLLQEEEERRRSQHRELQQALEGQLREAEQARASMQAEMELKEEEAARQRQRIKELEEMQQRLQEALQLEVKARRDEESVRIAQTRLLEEEEEKLKQLMQLKEEQERYIERAQQEKEELQQEMAQQSRSLQQAQQQLEEVRQNRQRADEDVEAAQRKLRQASTNVKHWNVQMNRLMHPIEPGDKRPVTSSSFSGFQPPLLAHRDSSLKRLTRWGSQGNRTPSPNSNEQQKSLNGGDEAPAPASTPQEDKLDPAPEN

SEQ ID NO: 906812 - protein, 243 aa, Homo sapiens
IIYTWLFLSLLSRIHQALDGSPTKEMELKEEEAARQRQRIKELEEMQQRLQEALQLEVKARRDEESVRIAQTRLLEEEEEKLKQLMQLKEEQERYIERAQQEKEELQQEMAQQSRSLQQAQQQLEEVRQNRQRADEDVEAAQRKLRQASTNVKHWNVQMNRLMHPIEPGDKRPVTSSSFSGFQPPLLAHRDSSLKRLTRWGSQGNRTPSPNSNEQQKSLNGGDEAPAPASTPQEDKLDPAPEN

SEQ ID NO: 906813 - protein, 259 aa, Homo sapiens
MDPPAEKPGEAGGLQITPQLLKSRTGEFSLESILLLKLRGLGLADLGCLGECLGLEWLDLSGNALTHLGPLASLRQLAVLNVSNNRLTGLEPLATCENLQSLNAAGNLLATPGQLQCLAGLPCLEYLRLRDPLARLSNPLCANPSYWAAVRELLPGLKVIDGERVIGRGSEFYQLCRDLDSSLRPSSSPGPRATEAQPWVEPGYWESWPSRSSSILEEACRQFQDTLQECWDLDRQASDSLAQAEQVLSSAGPTSSFVF

SEQ ID NO: 906814 - protein, 205 aa, Homo sapiens
MDPPAEKPGEAGGLQITPQLLKSRTGEFSLESILLLKLRGLGLADLGCLGECLGLEWLDLSGNALTHLGPLASLRQLAVLNVSNNRLTGLEPLATCENLQSLNAAGNLLATPGQLQCLAGLPCLEYLRLRDPLARLSNPLCANPSYWAAVRELLPGLKVIDGERVIGRGSEFYQLCRDLDRQASDSLAQAEQVLSSAGPTSSFVF

SEQ ID NO: 906815 - protein, 259 aa, Homo sapiens; identical to SEQ ID NO: 906813

SEQ ID NO: 906816 - protein, 259 aa, Homo sapiens; identical to SEQ ID NO: 906813

SEQ ID NO: 906817 - protein, 259 aa, Homo sapiens; identical to SEQ ID NO: 906813

SEQ ID NO: 906818 - protein, 259 aa, Homo sapiens; identical to SEQ ID NO: 906813

SEQ ID NO: 906819 - protein, 259 aa, Homo sapiens; identical to SEQ ID NO: 906813

SEQ ID NO: 906820 - protein, 259 aa, Homo sapiens; identical to SEQ ID NO: 906813

SEQ ID NO: 906821 - protein, 259 aa, Homo sapiens; identical to SEQ ID NO: 906813

SEQ ID NO: 906822 - protein, 228 aa, Homo sapiens
MDPPAEKPGEAGGLQITPQLLKSRTGEFSLESILLLKLRGLGLADLGCLGECLGLEWLDLSGNALTHLGPLASLRQLAVLNVSNNRLTGLEPLATCENLQSLNAAGNLLATPGQLQCLAGLPCLEYLRLRDPLARLSNPLCANPSYWAAVRELLPGLKVIDGERVIGRGSEFYQLCRDLDSSLRPSSSPGPRATEAQPWVEPGYWESWPSQARKVGMGQPPVSAVGRQ

SEQ ID NO: 906823 - protein, 331 aa, Homo sapiens
MPIPPPPPPPPGPPPPPTFHQANTEQPKLSRDEQRGRGALLQDICKGTKLKKVTNINDRSAPILEKPKGSSGGYGSGGAALQPKGGLFQGGVLKLRPVGAKDGSENLAGKPALQIPSSRAAAPRPPVSAASGRPQDDTDSSRASLPELPRMQRPSLPDLSRPNTTSSTGMKHSSSAPPPPPPGRRANAPPTPLPMHSSKAPAYNREKPLPPTPGQRLHPGREGPPAPPPVKPPPSPVNIRTGPSGQSLAPPPPPYRQPPGVPNGPSSPTNESAPELPQRHNSLHRKTPGPVRGLAPPPPTSASPSLLSNRPPPPARDPPSRGGHPLLLHRP

SEQ ID NO: 906824 - protein, 331 aa, Homo sapiens; identical to SEQ ID NO: 906823

SEQ ID NO: 906825 - protein, 331 aa, Homo sapiens; identical to SEQ ID NO: 906823

SEQ ID NO: 906826 - protein, 159 aa, Homo sapiens
MPIPPPPPPPPGPPPPPTFHQANTEQPKLSRDEQRGRGALLQDICKGTKLKKVTNINDRSAPILEKPKGSSGGYGSGGAALQPKGGLFQGGVLKLRPVGAKDGSENLAGKPALQIPSSRAAAPRPPVSAASGRPQDDTDSSRASLPELPRITAGSSRTL

SEQ ID NO: 906827 - protein, 72 aa, Homo sapiens
TEQPKLSRDEQRGRGALLQDICKGTKLKKVTNINDRSAPILESESELHFLVNWQDPRSDLETWLGSYFYWAL

SEQ ID NO: 906828 - protein, 331 aa, Homo sapiens; identical to SEQ ID NO: 906823

SEQ ID NO: 906829 - protein, 110 aa, Homo sapiens
EQIHFRVGKRGGGGGGGGGGGGGGDGEKELCRGASRTGRSRSVGGRGFAPRAAAARYMNDLKVQIKTEREQCQLGAGQECQFLLPRHPHLVLLHLPHFIRHILALLPRLQ

SEQ ID NO: 906830 - protein, 486 aa, Homo sapiens [sequence omitted]

SEQ ID NO: 906831 - protein, 486 aa, Homo sapiens [sequence omitted]

SEQ ID NO: 906832 - protein, 555 aa, Homo sapiens
MGVSVSVLSPLLFPNQGLCHYCPSQLSMQEDRVAWYSYPCPSPKGSTRKLKRLKKKRVCELKKNRDSKETQNCIPLSGAIPCDGIVHSLPMVRNVHAPGAGLLKQDLCFLYILVKFSKHISSLSTDFLSRDKKNLTADCWQSFQALSHVPFLTQIPKGLHSHCESHYCPIDKAGIEAPVVILYGGRMKGYFLHCIIIAFNIMLQNHIHIRLEFRYLDMNTYLAISMAISVLFSNVFHIILAMTETEQAKIQSVLGSLSRAPSNEKPGSGMTVPLKIHNLVCKLYYATFYFPCYFIAIHFTPQSQFRTLSLTGMCSDIFGPLGFMCQYKEYLFKIDLFRGGTVLLICVTPPIFLKTFVCFSKFVVDLNIIDPTIIRQISLISYILCVRLAVKYTALILIQNSYIGSQKYMITDVRSNLNSTVKCYGSFSAKLEIKEYYTLGMGSSTFSFGRYDLYTSEQCQFHTLDLELFSSYCNTEYCQSLIYLMLLIGSGADEIRTGGKSTVFRHRQPQCIRRSYSKRLSVGCLQPGMYFPLETRLSMVVRPLEQLEKMIKPIG

SEQ ID NO: 906833 - protein, 486 aa, Homo sapiens [sequence omitted]

SEQ ID NO: 906834 - protein, 527 aa, Homo sapiens
MMHFKSGLELTELQNMTVPEDDNISNDSNDFTEVENGQINSKFISDRESRRSLTNSHLEKKKCDEYIPGTTSLGMSVFNLSNAIMGSGILGLAFALANTGILLFLVLLTSVTLLSIYSINLLLICSKETGCMVYEKLGEQVFGTTGKFVIFGATSLQNTGAMLSYLFIVKNELPSAIKFLMGKEETFSAWYVDGRVLVVIVTFGIILPLCLLKNLGYLGYTSGFSLSCMVFFLIVVIYKKFQIPCIVPELNSTISANSTNADTCTPKYVTFNSKTVYALPTIAFAFVCHPSVLPIYSELKDRSQKKMQMVSNISFFAMFVMYFLTAIFGYLTFYDNVQSDLLHKYQSKDDILILTVRLAVIVAVILTVPVLFFTDRSSLFELAKKTKFNLCRHTVVTCILLVVINLLVIFIPSMKDIFGVVGVTSANMLIFILPSSLYLKITTRMEIKELKEFGLPFSWAWGCCSPWSAFPWSSMTGPAHRVMVKATETRREKETSLLSAQSSPHTSAISHHFFCKFTEANRNVQDT

SEQ ID NO: 906835 - protein, 51 aa, Homo sapiens
MKFFVFALILALMLSMTGADSHAKRHHGYKRKFHEKHHSHRGYRSNYLYDN

SEQ ID NO: 906836 - protein, 51 aa, Homo sapiens; identical to SEQ ID NO: 906835

SEQ ID NO: 906837 - protein, 51 aa, Homo sapiens; identical to SEQ ID NO: 906835

SEQ ID NO: 906838 - protein, 264 aa, Homo sapiens [sequence omitted]

SEQ ID NO: 906839 - protein, 133 aa, Homo sapiens
MRGPSLSWAIPATHPLGAAPLGNPGPGEPIWLPCVGGAEVRAQLGSFYSWESESSLPSTPLSLLVSCGGSALTTHAFPPIGGPIPSRFPAANKYLPSSARVQGSVGISIYPATDKATYLSTWSAHSGRRERPK

SEQ ID NO: 906840 - protein, 171 aa, Homo sapiens [sequence omitted]

SEQ ID NO: 906841 - protein, 171 aa, Homo sapiens [sequence omitted]

SEQ ID NO: 906842 - protein, 171 aa, Homo sapiens [sequence omitted]

SEQ ID NO: 906843 - protein, 230 aa, Homo sapiens
MLGAETEEKLFDAPLSISKREQLEQQVGGVGQRWRQVQWPRALPELLSSQGCWAPYSTHGRCTQGLVGCPCRSLSPLTCPCLILQVPENYFYVPDLGQVPEIDVPSYLPDLPGIANDLMYIADLGPGIAPSAPGTIPELPTFHTEVAEPLKADLQDGVLTPPPPPPPPPPAPEVLASAPPLPPSTAAPVGQGARQDDSSSSASPSGGSSSLRPPDFWRAQCTRVDFLWVC

SEQ ID NO: 906844 - protein, 171 aa, Homo sapiens [sequence omitted]

SEQ ID NO: 906845 - protein, 219 aa, Homo sapiens
MLGAETEEKLFDAPLSISKREQLEQQVPENYFYVPDLGQVPEIDVPSYLPDLPGIANDLMYIADLGPGIAPSAPGTIPELPTFHTEVAEPLKADLQDGVLTPPPPPPPPPPAPEVLASAPPLPPSTAAPVGQGARQDDSSSSASPSVQGAPREVVDPSGGWATLLESIRQAGGIGKAKLRSMKERKLEKKKQKEQEQGERALELAVGGPWARSPPPLQP

SEQ ID NO: 906846 - protein, 213 aa, Homo sapiens
MLGAETEEKLFDAPLSISKREQLEQQVPENYFYVPDLGQVPEIDVPSYLPDLPGIANDLMYIADLGPGIAPSAPGTIPELPTFHTEVAEPLKADLQDGVLTPPPPPPPPPPAPEVLASAPPLPPSTAAPVGQGARQDDSSSSASPSVRATSQGGHLMSDLFNKLVMRRKGISGKGPGAGEGPGGAFARVSDSIPPLPPPQQPQAEEDEDDWES

SEQ ID NO: 906847 - protein, 171 aa, Homo sapiens [sequence omitted]

SEQ ID NO: 906848 - protein, 241 aa, Homo sapiens
MLGAETEEKLFDAPLSISKREQLEQQVPENYFYVPDLGQVPEIDVPSYLPDLPGIANDLMYIADLGPGIAPSAPGTIPELPTFHTEVAEPLKADLQDGVLTPPPPPPPPPPAPEVLASAPPLPPSTAAPVGQGARQDDSSSSASPSVQGAPREVVDPSGGWATLLESIRQAGGIGKAKLRSMKERKLEKKKQKEQEQGISGKGPGAGEGPGGAFARVSDSIPPLPPPQQPQAEEDEDDWES

SEQ ID NO: 906849 - protein, 171 aa, Homo sapiens [sequence omitted]

SEQ ID NO: 906850 - protein, 171 aa, Homo sapiens [sequence omitted]

SEQ ID NO: 906851 - protein, 133 aa, Homo sapiens; identical to SEQ ID NO: 906839

SEQ ID NO: 906852 - protein, 152 aa, Homo sapiens
MLGAETEEKLFDAPLSISKREQLEQQVPENYFYVPDLGQVPEIDVPSYLPDLPGIANDLMYIADLGPGIAPSAPGTIPELPTFHTEVAEPLKALQDGGYLNRPTRDAPKRRATATRASDATGRTAHNRPPQDGPPGHRQPPDRPHHTRPPSI

SEQ ID NO: 906853 - protein, 230 aa, Homo sapiens; identical to SEQ ID NO: 906843

SEQ ID NO: 906854 - protein, 133 aa, Homo sapiens; identical to SEQ ID NO: 906839

SEQ ID NO: 906855 - protein, 264 aa, Homo sapiens [sequence omitted]

SEQ ID NO: 906856 - protein, 171 aa, Homo sapiens [sequence omitted]

SEQ ID NO: 906857 - protein, 357 aa, Homo sapiens
MPCSTCRRSLETSSAEVEQSRSQVQAIGEKVSLAQAKIEKIKGSKKAIKVVPIPLCPEATGQSLHFPVPLRLPSLCPAAHLYLELSSRPGFQLHPLLPSNPSPLSLLGPPQTCPCVHSVLQCQVPCSRAPAGIWLHLHGRPGPWPAETPPPQDPEQAPPPGRAGPAGEAEGLSCVREHQAGARGRCRRGTWGSSQQHQLCQLLAALQHHREPVPENYFYVPDLGQVPEIDVPSYLPDLPGIANDLMYIADLGPGIAPSAPGTIPELPTFHTEVAEPLKADLQDGVLTPPPPPPPPPPAPEVLASAPPLPPSTAAPVGQGARQDDSSSSASPSGGSSSLRPPDFWRAQCTRVDFLWVC

SEQ ID NO: 906858 - protein, 227 aa, Homo sapiens
MPCSTCRRSLETSSAEVEQSRSQVQAIGEKVSLAQAKIEKIKGSKKAIKVVPIPLCPEATGQSLHFPVPLRLPSLCPAAHLYLELSSRPGFQLHPLLPSNPSPLSLLGPPQTCPCVHSVLQCQVPCSRAPAGIWLHLHGRPGPWPAETPPPQDPEQAPPPGRAGPAGEAEGLSCVREHQAGARGRCRRGTWGSSHSSSASPSGGSSSLRPPDFWRAQCTRVDFLWVC

SEQ ID NO: 906859 - protein, 171 aa, Homo sapiens [sequence omitted]

SEQ ID NO: 906860 - protein, 171 aa, Homo sapiens [sequence omitted]

SEQ ID NO: 906861 - protein, 84 aa, Homo sapiens
YYYYYGVFRRRQKGQEQVRATSQGGHLMSDLFNKLVMRRKGISGKGPGAGEGPGGAFARVSDSIPPLPPPQQPQAEEDEDDWES

SEQ ID NO: 906862 - protein, 133 aa, Homo sapiens; identical to SEQ ID NO: 906839

SEQ ID NO: 906863 - protein, 122 aa, Homo sapiens
MLGAETEEKLFDAPLSISKREQLEQQVPENYFYVPDLGQVPEIDVPSYLPDLPGIANDLMYIADLGPGIAPSAPGTIPELPTFHTEVAEPLKDLQDGVLTTADDQGNVMRVGRACNQGGGPD

SEQ ID NO: 906864 - protein, 314 aa, Homo sapiens
MLGKGGKRKFDEHEDGLEGKIVSPCDGPSKVSYTLQRQTIFNISLMKLYNHRPLTEPSLQKTVLINNMLRRIQEELKQEGSLRPMFTPSSQPTTEPSDSYREAPPAFSHLASPSSHPCDLGSTTPLEACLTPASLLEDDDDTFCTSQAMQPTAPTKLSPPALLPEKDSFSSALDEIEELCPTSTSTEAATAATDSVKGTSSEAGTQKLDGPQESRADDSKLMDSLPGNFEITTSTGFLTDLTLDDILFADIDTSMYDFDPCTSSSGTASKMAPVSADDLLKTLAPYSSQPVTPSQPFKMDLTELDHIMEVLVGS

SEQ ID NO: 906865 - protein, 314 aa, Homo sapiens; identical to SEQ ID NO: 906864

SEQ ID NO: 906866 - protein, 314 aa, Homo sapiens; identical to SEQ ID NO: 906864

SEQ ID NO: 906867 - protein, 314 aa, Homo sapiens; identical to SEQ ID NO: 906864

SEQ ID NO: 906868 - protein, 472 aa, Homo sapiens
APASEAVTMDYDFKVKLSSERERVEDLFEYEGCKVGRGTYGHVYKAKRKDGKDDKDYALKQIEGTGISMSACREIALLRELKHPNVISLQKVFLSHADRKVWLLFDYAEHDLWHIIKFHRASKANKKPVQLPRGMVKSLLYQILDGIHYLHANWVLHRDLKPANILVMGEGPERGRVKIADMGFARLFNSPLKPLADLDPVVVTFWYRAPELLLGARHYTKAIDIWAIGCIFAELLTSEPIFHCRQEDIKTSNPYHHDQLDRIFNVMGFPADKDWEDIKKMPEHSTLMKDFRRNTYTNCSLIKYMEKHKVKPDSKAFHLLQKLLTMDPIKRITSEQAMQDPYFLEDPLPTSDVFAGCQIPYPKREFLTEEEPDDKGDKKNQQQQQGNNHTNGTGHPGNQDSSHTQGPPLKKVRVVPPTTTSGGLIMTSDYQRSNPHAAYPNPGPSTSQPQSSMGYSATSQQPPQYSHQTHRY

SEQ ID NO: 906869 - protein, 453 aa, Homo sapiens
APASEAVTMDYDFKVKLSSERERVEDLFEYEGCKVGRGTYGHVYKAKRKDGKDDKDYALKQIEGTGISMSACREIALLRELKHPNVISLQKVFLSHADRKVWLLFDYAEHDLWHIIKFHRASKANKKPVQLPRGMVKSLLYQILDGIHYLHANWVLHRDFADMGFARLFNSPLKPLADLDPVVVTFWYRAPELLLGARHYTKAIDIWAIGCIFAELLTSEPIFHCRQEDIKTSNPYHHDQLDRIFNVMGFPADKDWEDIKKMPEHSTLMKDFRRNTYTNCSLIKYMEKHKVKPDSKAFHLLQKLLTMDPIKRITSEQAMQDPYFLEDPLPTSDVFAGCQIPYPKREFLTEEEPDDKGDKKNQQQQQGNNHTNGTGHPGNQDSSHTQGPPLKKVRVVPPTTTSGGLIMTSDYQRSNPHAAYPNPGPSTSQPQSSMGYSATSQQPPQYSHQTHRY

SEQ ID NO: 906870 - protein, 372 aa, Homo sapiens
APASEAVTMDYDFKVKLSSERERVEDLFEYEGCKVGRGTYGHVYKAKRKDGKDDKDYALKQIEGTGISMSACREIALLRELKHPNVISLQKVFLSHADRKVWLLFDYAEHDLWHIIKFHRASKANKKPVQLPRGMVKSLLYQILDGIHYLHANWVLHRDFADMGFARLFNSPLKPLADLDPVVVTFWYRAPELLLGARHYTKAIDIWAIGCIFAELLTSEPIFHCRQEDIKTSNPYHHDQLDRIFNVMGFPADKDWEDIKKMPEHSTLMKDFRRNTYTNCSLIKYMEKHKVKPDSKAFHLLQKLLTMDPIKRITSEQAMQDPYFLEDPLPTSDVFAGCQIPYPKREFLTDSEDYTHACPKHLDTLLTHGQYP

SEQ ID NO: 906871 - protein, 472 aa, Homo sapiens; identical to SEQ ID NO: 906868

SEQ ID NO: 906872 - protein, 424 aa, Homo sapiens
APASEAVTMDYDFKVKLSSERERVEDLFEYEGCKVGRGTYGHVYKAKRKDGKDDKDYALKQIEGTGISMSACREIALLRELKHPNVISLQKVFLSHADRKVWLLFDYAEHDLWHIIKFHRASKANKKPVQLPRGMVKSLLYQILDGIHYLHANWVLHRDLKPANILVMGEGPERGRVKIADMGFARLFNSPLKPLADLDPVVVTFWYRAPELLLGARHYTKAIDKDWEDIKKMPEHSTLMKDFRRNTYTNCSLIKYMEKHKVKPDSKAFHLLQKLLTMDPIKRITSEQAMQDPYFLEDPLPTSDVFAGCQIPYPKREFLTEEEPDDKGDKKNQQQQQGNNHTNGTGHPGNQDSSHTQGPPLKKVRVVPPTTTSGGLIMTSDYQRSNPHAAYPNPGPSTSQPQSSMGYSATSQQPPQYSHQTHRY

SEQ ID NO: 906873 - protein, 558 aa, Homo sapiens
MAKKVAVIGAGVSGLSSIKCCVDEDLEPTCFERSDDIGGLWKFTESSKDGMTRVYKSLVTNVCKEMSCYSDFPFHEDYPNFMNHEKFWDYLQEFAEHFDLLKYIQFKTTVCSITKRPDFSETGQWDVVTETEGKQNRAVFDAVMVCTGHFLNPHLPLEAFPGIHKFKGQILHSQEYKIPEGFQGKRVLVIGLGNTGGDIAVELSRTAAQVLLSTRTGTWVLGRSSDWGYPYNMMVTRRCCSFIAQVLPSRFLNWIQERKLNKRFNHEDYGLSITKGKKAKFIVNDELPNCILCGAITMKTSVIEFTETSAVFEDGTVEENIDVVIFTTGYTFSFPFFEEPLKSLCTKKIFLYKQVFPLNLERATLAIIGLIGLKGSILSGTELQARWVTRVFKGLCKIPPSQKLMMEATEKEQLIKRGVFKDTSKDKFDYIAYMDDIAACIGTKPSIPLLFLKDPRLAWEVFFGPCTPYQYRLMGPGKWDGARNAILTQWDRTLKPLKTRIVPDSSKPASMSHYLKAWGAPVLLASLLLICKSSLFLKLVRDKLQDRMSPYLVSLWRG

SEQ ID NO: 906874 - protein, 117 aa, Homo sapiens
MAKKVAVIGAGVSGLSSIKCCVDEDLEPTCFERSDDIGGLWKFTESSKDGMTRVYKSLVTNVCKEMSCYSDFPFHEDYPNFMNHEKFWDYLQEFAEHFDLLKYIQFKDSVRYLHPKN

SEQ ID NO: 906875 - protein, 558 aa, Homo sapiens; identical to SEQ ID NO: 906873

SEQ ID NO: 906876 - protein, 318 aa, Homo sapiens
MAKKVAVIGAGVSGLSSIKCCVDEDLEPTCFERSDDIGGLWKFTESSKDGMTRVYKSLVTNVCKEMSCYSDFPFHEDYPNFMNHEKFWDYLQEFAEHFDLLKYIQFKTTVCSITKRPDFSETGQWDVVTETEGKQNRAVFDAVMVCTGHFLNPHLPLEAFPGIHKFKGQILHSQEYKIPEGFQGKRVLVIGLGNTGGDIAVELSRTAAQVLLSTRTGTWVLGRSSDWGYPYNMMVTRRCCSFIAQVLPSRFLNWIQERKLNKRFNHEDYGLSITKGYLHFLFSRKNIKSIFIITFYSEFKMFNNCNIAFVYSTLNPFP

SEQ ID NO: 906877 - protein, 615 aa, Homo sapiens
MPASAARPRPGPGQPTASPFPLLLLAVLSGPVSGRVPRSVPRTSLPISEADSCLTRFAVPHTYNYSVLLVDPASHTLYVGARDTIFALSLPFSGERPRRIDWMVPEAHRQNCRKKGKKEGDLGGRKTLQQRWTTFLKADLLCPGPEHGRASSVLQDVAVLRPELGAGTPIFYGIFSSQWEGATISAVCAFRPQDIRTVLNGPFRELKHDCNRGLPVVDNDVPQPRPGECITNNMKLRHFGSSLSLPDRVLTFIRDHPLMDRPVFPADGHPLLVTTDTAYLRVVAHRVTSLSGKEYDVLYLGTEDGHLHRAVRIGAQLSVLEDLALFPEPQPVENMKLYHSWLLVGSRTEVTQVNTTNCGRLQSCSECILAQDPVCAWSFRLDECVAHAGEHRGLVQDIESADVSSLCPKEPGERPVVFEVPVATAAHVVLPCSPSSAWASCVWHQPSGVTALTPRRDGLEVVVTPGAMGAYACECQEGGAAHVVAAYSLVWGSQRDAPSRAHTVGAGLAGFFLGILAASLTLILIGRRQQRRRQRELLARDKVGLDLGAPPSGTTSYSQDPPSPSPEDERLPLALAKRGSGFGGFSPPFLLDPCPSPAHIRLTGAPLATCDETSI

SEQ ID NO: 906878 - protein, 696 aa, Homo sapiens
MPASAARPRPGPGQPTASPFPLLLLAVLSGPVSGRVPRSVPRTSLPISEADSCLTRFAVPHTYNYSVLLVDPASHTLYVGARDTIFALSLPFSGERPRRIDWMVPEAHRQNCRKKGKKEDECHNFVQILAIANASHLLTCGTFAFDPKCGVIDVSRFQQVERLESGRGKCPFEPAQRSAAVMAGGVLYAATVKNYLGTEPIITRAVGRAEDWIRTDTLPSWLNAPAFVAAVALSPAEWGDEDGDDEIYFFFTETSRAFDSYERIKVPRVARVCAGDLGGRKTLQQRWTTFLKADLLCPGPEHGRASSVLQDVAVLRPELGAGTPIFYGIFSSQWEGATISAVCAFRPQDIRTVLNGPFRELKHDCNRGLPVVDNDVPQPRPGERMDTSTEQCGSELSSAFLKIWPYSQSHSQFENMKLYHSWLLVGSRTEVTQVNTTNCGRLQSCSECILAQDPVCAWSFRLDECVAHAGEHRGLVQDIESADVSSLCPKEPGERPVVFEVPVATAAHVVLPCSPSSAWASCVWHQPSGVTALTPRRDGLEVVVTPGAMGAYACECQEGGAAHVVAAYSLVWGSQRDAPSRAHTVGAGLAGFFLGILAASLTLILIGRRQQRRRQRELLARDKVGLDLGAPPSGTTSYSQDPPSPSPEDERLPLALAKRGSGFGGFSPPFLLDPCPSPAHIRLTGAPLATCDETSI

SEQ ID NO: 906879 - protein, 503 aa, Homo sapiens
MPASAARPRPGPGQPTASPFPLLLLAVLSGPVSGRVPRSVPRTSLPISEADSCLTRFAVPHTYNYSVLLVDPASHTLYVGARDTIFALSLPFSGERPRRIDWMVPEAHRQNCRKKGKKEDECHNFVQILAIANASHLLTCGTFAFDPKCGVIDVSRFQQVERLESGRGKCPFEPAQRSAAVMAGGVLYAATVKNYLGTEPIITRAVGRAEDWIRTDTLPSWLNAPAFVAAVALSPAEWGDEDGDDEIYFFFTETSRAFDSYERIKVPRVARVCAGDLGGRKTLQQRWTTFLKADLLCPGPEHGRASSVLQDVAVLRPELGAGTPIFYGIFSSQWEGATISAVCAFRPQDIRTVLNGPFRELKHDCNRGLPVVDNDVPQPRPGECITNNMKLRHFGSSLSLPDRVLTFIRDHPLMDRPVFPADGHPLLVTTDTAYLRVVAHRVTSLSGKEYDVLYLGTGIFNGQAGCLPSAYTFSSQRGYCNTYRSESQAQGQLCNYSCSFPVP

SEQ ID NO: 906880 - protein, 770 aa, Homo sapiens
MPASAARPRPGPGQPTASPFPLLLLAVLSGPVSGRVPRSVPRTSLPISEADSCLTRFAVPHTYNYSVLLVDPASHTLYVGARDTIFALSLPFSGERPRRIDWMVPEAHRQNCRKKGKKEDECHNFVQILAIANASHLLTCGTFAFDPKCGVIDVSRFQQVERLESGRGKCPFEPAQRSAAVMAGGVLYAATVKNYLGTEPIITRAVGRAEDWIRTDTLPSWLNAPAFVAAVALSPAEWGDEDGDDEIYFFFTETSRAFDSYERIKVPRVARVCAGDLGGRKTLQQRWTTFLKADLLCPGPEHGRASSVLQDVAVLRPELGAGTPIFYGIFSSQWEGATISAVCAFRPQDIRTVLNGPFRELKHDCNRGLPVVDNDVPQPRPGECITNNMKLRHFGSSLSLPDRVLTFIRDHPLMDRPVFPADGHPLLVTTDTAYLRVVAHRVTSLSGKEYDVLYLGTEDGHLHRAVRIGAQLSVLEDLALFPEPQPVENMKLYHSWLLVGSRTEVTQVNTTNCGRLQSCSECILAQDPVCAWSFRLDECVAHAGEHRGLVQDIESADVSSLCPKEPGERPVVFEVPVATAAHVVLPCSPSSAWASCVWHQPSGVTALTPRRDGLEVVVTPGAMGAYACECQEGGAAHVVAAYSLVWGSQRDAPSRAHTVGAGLAGFFLGILAASLTLILIGRRQQRRRQRELLARDKVGLDLGAPPSGTTSYSQDPPSPSPEDERLPLALAKRGSGFGGFSPPFLLDPCPSPAHIRLTGAPLATCDETSI

SEQ ID NO: 906881 - protein, 706 aa, Homo sapiens
MPASAARPRPGPGQPTASPFPLLLLAVLSGPVSGRVPRSVPRTSLPISEADSCLTRFAVPHTYNYSVLLVDPASHTLYVGARDTIFALSLPFSGERPRRIDWMVPEAHRQNCRKKGKKEEGVLYAATVKNYLGTEPIITRAVGRAEDWIRTDTLPSWLNAPAFVAAVALSPAEWGDEDGDDEIYFFFTETSRAFDSYERIKVPRVARVCAGDLGGRKTLQQRWTTFLKADLLCPGPEHGRASSVLQDVAVLRPELGAGTPIFYGIFSSQWEGATISAVCAFRPQDIRTVLNGPFRELKHDCNRGLPVVDNDVPQPRPGECITNNMKLRHFGSSLSLPDRVLTFIRDHPLMDRPVFPADGHPLLVTTDTAYLRVVAHRVTSLSGKEYDVLYLGTEDGHLHRAVRIGAQLSVLEDLALFPEPQPVENMKLYHSWLLVGSRTEVTQVNTTNCGRLQSCSECILAQDPVCAWSFRLDECVAHAGEHRGLVQDIESADVSSLCPKEPGERPVVFEVPVATAAHVVLPCSPSSAWASCVWHQPSGVTALTPRRDGLEVVVTPGAMGAYACECQEGGAAHVVAAYSLVWGSQRDAPSRAHTVGAGLAGFFLGILAASLTLILIGRRQQRRRQRELLARDKVGLDLGAPPSGTTSYSQDPPSPSPEDERLPLALAKRGSGFGGFSPPFLLDPCPSPAHIRLTGAPLATCDETSI

SEQ ID NO: 906882 - protein, 500 aa, Homo sapiens
RDENLKFMKNRDVYSSDYFSFVLSLASLNATKLKHPYYPCMAKVSLQLAIQFLFQTYLRTKKKLRVDTEEWIATIEALLSKSFDACQWLVEYFISSEGRELIKIFLLECNVREVRVAVATILEKTLDSALFYQDKLKSLHQLLEVLLALLDKDVPENCKNCAQYFFLFNTFVQKQGIRAGDLLLRHSALRHMISFLLGASRQNNQIRRWSSAQAREFGNLHNTVALLVLHSDVSSQRNVAPGIFKQRPPISIAPSSPLLPLHEEVEALLFMSEGKPYLLEVMFALRELTGSLLALIEMVVYCCFCNEHFSFTMLHFIKNQLETAPPHELKNTFQLLHEILVIEDPIQVERVKFVFETENGLLALMHHSNHVDSSRCYQCVKFLVTLAQKCPAAKEYFKENSHHWSWAVQWLQKKMSEHYWTPQSNVSNETSTGKTFQRTISAQDTLAYATALLNEKEQSGSSNGSESSPANENGDRHLQQGSESPMMIGELRSDLDDVDP

SEQ ID NO: 906883 - protein, 238 aa, Homo sapiens
MYLAFSHHLSLSFRIFLLECNVREVRVAVATILEKTLDSALFYQDKLKSLHQLLEVLLALLDKDVPENCKNCAQYFFLFNTFVQKQGIRAGDLLLRHSALRHMISFLLGASRQNNQIRRWSSAQAREFGNLHNTVALLVLHSDVSSQRNVAPGIFKQRPPISIAPSSPLLPLHEEVEALLFMSEGKPYLLEVMFALRELTGSLLALIEMVVYCCFCNEHFSFTMLHFIKNQLGNGSTS

SEQ ID NO: 906884 - protein, 238 aa, Homo sapiens; identical to SEQ ID NO: 906883

SEQ ID NO: 906885 - protein, 238 aa, Homo sapiens; identical to SEQ ID NO: 906883

SEQ ID NO: 906886 - protein, 238 aa, Homo sapiens; identical to SEQ ID NO: 906883

SEQ ID NO: 906887 - protein, 157 aa, Homo sapiens
METSASSSQPQDNSQVHRETEDVDCPGHGEPDVLKDELQLYGDAPGEVVPSGESGLRRRGSDPASGEVEASQLRRLNIKKDDEFFHFVLLCFAIGALLVCYHYYADWFMSLGVGLLTFASLETVGIYFGLVYRIHSVLQGFIPLFQKFRLTGFRKTD

SEQ ID NO: 906888 - protein, 106 aa, Homo sapiens
VDESGNSTAQLLEYGFRAGSGRLTEATSRWAAEAGPSVTTTATPEPTRAEQHSERRTGDQARPINRTLFLPCGLNVGTSPGRGISFGQYCCATQLQGWKAEGGCGA

SEQ ID NO: 906889 - protein, 203 aa, Homo sapiens
METSASSSQPQDNSQVHRETEDVDYGETDFHKQDGKAGLFSQEQYERNKSSSSSSSSSSSSSSSSSSSSSGPGHGEPDVLKDELQLYGDAPGEVVPSGESGLRRRGSDPASGEVEASQLRRLNIKKDDEFFHFVLLCFAIGALLVCYHYYADWFMSLGVGLLTFASLETVGIYFGLVYRIHSVLQGFIPLFQKFRLTGFRKTD

SEQ ID NO: 906890 - protein, 233 aa, Homo sapiens
METSASSSQPQDNSQVHRETEDVDYGETDFHKQDGKAGLFSQEQYERNKSSSSSSSSSSSSSSSSSSSSSESNDEDQQPRATGKHRRSLGAGYPHGNGSPGPGHGEPDVLKDELQLYGDAPGEVVPSGESGLRRRGSDPASGEVEASQLRRLNIKKDDEFFHFVLLCFAIGALLVCYHYYADWFMSLGVGLLTFASLETVGIYFGLVYRIHSVLQGFIPLFQKFRLTGFRKTD

SEQ ID NO: 906891 - protein, 164 aa, Homo sapiens
METSASSSQPQDNSQVHRETEDVDYGETDFHKQDGKAGLFSQEQYERNKSSSSSSSSSSSSSSSSSSSSSGPGHGEPDVLKDELQLYGDEFFHFVLLCFAIGALLVCYHYYADWFMSLGVGLLTFASLETVGIYFGLVYRIHSVLQGFIPLFQKFRLTGFRKTD

SEQ ID NO: 906892 - protein, 118 aa, Homo sapiens [sequence omitted]

SEQ ID NO: 906893 - protein, 203 aa, Homo sapiens; identical to SEQ ID NO: 906889

SEQ ID NO: 906894 - protein, 203 aa, Homo sapiens; identical to SEQ ID NO: 906889

SEQ ID NO: 906895 - protein, 588 aa, Homo sapiens
MEAADASRSNGSSPEARDARSPSGPSGSLENGTKADGKDAKTTNGHGGEAAEGKSLGSALKPGEGRSALFAGNEWRRPIIQFVESGDDKNSNYFSMDSMEGKRSPYAGLQLGAAKKPPVTFAEKGELRKSIFSESRKPTVSIMEPGETRRNSYPRADTGLFSRSKSGSEEVLCDSCIGNKQKAVKSCLVCQASFCELHLKPHLEGAAFRDHQLLEPIRDFEARKCPVHGKTMELFCQTDQTCICYLCMFQEHKNHSTVTVEEAKAEKETELSLQKEQLQLKIIEIEDEAEKWQKEKDRIKSFTTNEKAILEQNFRDLVRDLEKQKEEVRAALEQREQDAVDQVKVIMDALDERAKVLHEDKQTREQLHSISDSVLFLQEFGALMSNYSLPPPLPTYHVLLEGEGLGQSLGNFKDDLLNVCMRHVEKMCKADLSRNFIERNHMENGGDHRYVNNYTNSFGGEWSAPDTMKRYSMYLTPKGGVRTSYQPSSPGRFTKETTQKNFNNLYGTKGNYTSRVWEYSSSIQNSDNDLPVVQGSSSFSLKGYPSLMRSQSPKAQPQTWKSGKQTMLSHYRPFYVNKGNGIGSNEAP

SEQ ID NO: 906896 - protein, 570 aa, Homo sapiens
MEAADASRSNGSSPEARDARSPSGPSGSLENGTKADGKDAKTTNGHGGEAAEGKSLGSALKPGEGRSALFAGNEWRRPIIQFVESGDDKNSNYFSMDSMEGKRSPYAGLQLGAAKKPPVTFAEKGELRKSIFSESRKPTVSIMEPGETRRNSYPRADTGLFSRSKSGSEEVLCDSCIGNKQKAVKSCLVCQASFCELHLKPHLEGAAFRDHQLLEPIRDFEARKCPVHGKTMELFCQTDQTCICYLCMFQEHKNHSTVTVEEAKAEKETELSLQKEQLQLKIIEIEDEAEKWQKEKDRIKSFTTNEKAILEQNFRDLVRDLEKQKEEVRAALEQREQDAVDQVKVIMDALDERAKVLHEDKQTREQLHSISDSVLFLQEFGALMSNYSLPPPLPTYHVLLEGEGLGQSLGNFKDDLLNVCMRHVEKMCKADLSRNFIERNHMENGGDHRYVNNYTNSFGGEWSAPDTMKRYSMYLTPKGGVRTSYQPSSPGRFTKETTQKNFNNLYGTKGNYTSRVWEYSSSIQNSDNDLPVVQGSSSFSLKGYPSLMRSQSPKAQPQTWKSGKQTMLVV

SEQ ID NO: 906897 - protein, 358 aa, Homo sapiens
MSDEPWLRVCPLSGAAPWFSGSLPSPPPASPILALSLQTELSLQKEQLQLKIIEIEDEAEKWQKEKDRIKSFTTNEKAILEQNFRDLVRDLEKQKEEVRAALEQREQDAVDQVKVIMDALDERAKVLHEDKQTREQLHSISDSVLFLQEFGALMSNYSLPPPLPTYHVLLEGEGLGQSLGNFKDDLLNVCMRHVEKMCKADLSRNFIERNHMENGGDHRYVNNYTNSFGGEWSAPDTMKRYSMYLTPKGGVRTSYQPSSPGRFTKETTQKNFNNLYGTKGNYTSRVWEYSSSIQNSDNDLPVVQGSSSFSLKGYPSLMRSQSPKAQPQTWKSGKQTMLSHYRPFYVNKGNGIGSNEAP

SEQ ID NO: 906898 - protein, 588 aa, Homo sapiens; identical to SEQ ID NO: 906895

SEQ ID NO: 906899 - protein, 622 aa, Homo sapiens
MEAADASRSNGSSPEARDARSPSGPSGSLENGTKADGKDAKTTNGHGGEAAEGKSLGSALKPGEGRSALFAGNEWRRPIIQFVESGDDKNSNYFSMDSMEGKRSPYAGLQLGAAKKPPVTFAEKGELRKSIFSESRKPTVSIMEPGETRRNSYPRADTGLFSRSKSGSEEVLCDSCIGNKQKAVKSCLVCQASFCELHLKPHLEGAAFRDHQLLEPIRDFEARKCPVHGKTMELFCQTDQTCICYLCMFQEHKNHSTVTVEEAKAEKETELSLQKEQLQLKIIEIEDEAEKWQKEKDRIKSFTTNEKAILEQNFRDLVRDLEKQKEEVRAALEQREQDAVDQVKVIMDALDERAKVLHEDKQTREQLHSISDSVLFLQEFGALMSNYSLPPPLPTYHVLLEGEGLGQSLGNFKDDLLNVCMRHVEKMCKADLSRNFIERNHMENGGDHRYVNNYTNSFGGEWSAPDTMKRYSMYLTPKGGVRTSYQPSSPGRFTKETTQKNFNNLYGTKGNYTSRVWEYSSSIQNSDNDLPVVQGSSSFSLKAGTGKTPYQFTTLGQATAEFSKPLGRSGLSKNNPGYPSLMRSQSPKAQPQTWKSGKQTMLSHYRPFYVNKGNGIGSNEAP

SEQ ID NO: 906900 - protein, 287 aa, Homo sapiens
MTELSLQKEQLQLKIIEIEDEAEKWQKEKDRIKSFTTNEKAILEQNFRDLVRDLEKQKEEVRAALEQREQDAVDQVKEFGALMSNYSLPPPLPTYHVLLEGEGLGQSLGNFKDDLLNVCMRHVEKMCKADLSRNFIERNHMENGGDHRYVNNYTNSFGGEWSAPDTMKRYSMYLTPKGGVRTSYQPSSPGRFTKETTQKNFNNLYGTKGNYTSRVWEYSSSIQNSDNDLPVVQGSSSFSLKGYPSLMRSQSPKAQPQTWKSGKQTMLSHYRPFYVNKGNGIGSNEAP

SEQ ID NO: 906901 - protein, 121 aa, Homo sapiens
MKRYSMYLTPKGGVRTSYQPSSPGRFTKETTQKNFNNLYGTKGNYTSRVWEYSSSIQNSDNDLPVVQGSSSFSLKGYPSLMRSQSPKAQPQTWKSGKQTMLSHYRPFYVNKGNGIGSNEAP

SEQ ID NO: 906902 - protein, 600 aa, Homo sapiens
MEAADASRSNGSSPEARDARSPSGPSGSLENGTKADGKDAKTTNGHGGEAAEGKSLGSALKPGEGRSALFAGNEWRRPIIQFVESGDDKNSNYFSMDSMEGKRSPYAGLQLGAAKKPPVTFAEKGELRKSIFSESRKPTVSIMEPGETRRNSYPRADTGLFSRSKSGSEEVLCDSCIGNKQKAVKSCLVCQASFCELHLKPHLEGAAFRDHQLLEPIRDFEARKCPVHGKTMELFCQTDQTCICYLCMFQEHKNHSTVTVEEAKAEKETELSLQKEQLQLKIIEIEDEAEKWQKEKDRIKSFTTNEKAILEQNFRDLVRDLEKQKEEVRAALEQREQDAVDQVKVIMDALDERAKVLHEDKQTREQLHSISDSVLFLQEFGALMSNYSLPPPLPTYHVLLEGEGLGQSLGNFKDDLLNVCMRHVEKMCKADLSRNFIERNHMENGGDHRYVNNYTNSFGGEWSAPDTMKRYSMYLTPKGGVRTSYQPSSPGRFTKETTQKNFNNLYGTKVSLPAILRQQRQRDWVQRSPMSSWRKERGATPLLFLLTLLLLPSKLLCLSGWEGAWSCTCPLQPSASLLGAVPASPTSPLATLHSDSFPAL

SEQ ID NO: 906903 - protein, 120 aa, Homo sapiens
EGPKEGEAVVLPEVEPGLTAREQEATPDPTQKNFNNLYGTKGNYTSRVWEYSSSIQNSDNDLPVVQGSSSFSLKGYPSLMRSQSPKAQPQTWKSGKQTMLSHYRPFYVNKGNGIGSNEAP

SEQ ID NO: 906904 - protein, 92 aa, Homo sapiens
DGAEGTCRRWEVPCNYTSRVWEYSSSIQNSDNDLPVVQGSSSFSLKGYPSLMRSQSPKAQPQTWKSGKQTMLSHYRPFYVNKGNGIGSNEAP

SEQ ID NO: 906905 - protein, 588 aa, Homo sapiens; identical to SEQ ID NO: 906895

SEQ ID NO: 906906 - protein, 588 aa, Homo sapiens; identical to SEQ ID NO: 906895

SEQ ID NO: 906907 - protein, 71 aa, Homo sapiens
CRIARSDGRSLVRVSLLPLCQPLGGSSGLSDFPTGHTPFRLLSCLVTSDGHHHSCAQRPTHHRGEIGWGLP

SEQ ID NO: 906908 - protein, 565 aa, Homo sapiens
MEAADASRSNGSSPEARDARSPSGPSGSLENGTKADGKDAKTTNGHGGEAAEGKSLGSALKPGEGRSALFAGNEWRRPIIQFVESGDDKNSNYFSMDSMEGKRSPYAGLQLGAAKKPPVTFAEKGELRKSIFSESRKPTVSIMEPGETRRNSYPRADTGLFSRSKSGSEEVLCDSCIGNKQKAVKSCLVCQASFCELHLKPHLEGAAFRDHQLLEPIRDFEARKCPVHGKTMELFCQTDQTCICYLCMFQEHKNHSTVTVEEAKAEKETELSLQKEQLQLKIIEIEDEAEKWQKEKDRIKSFTTNEKAILEQNFRDLVRDLEKQKEEVRAALEQREQDAVDQVKVIMDALDERAKVLHEDKQTREQLHSISDSVLFLQEFGALMSNYSLPPPLPTYHVLLEGEGLGQSLGNFKDDLLNVCMRHVEKMCKADLSRNFIERNHMENGGDHRYVNNYTNSFGGEWSAPDTMKRYSMYLTPKGGVRTSYQPSSPGRFTKETTQKNFNNLYGTKGNYTSRVWEYSSSIQNSDNERAKVLHEDRQTREQLHSISDSVLFLQEFGALMSNYS

SEQ ID NO: 906909 - protein, 445 aa, Homo sapiens
MEAADASRSNGSSPEARDARSPSGPSGSLENGTKADGKDAKTTNGHGGEAAEGKSLGSALKPGEGRSALFAGNEWRRPIIQFVESGDDKNSNYFSMDSMEGKRSPYAGLQLGAAKKPPVTFAEKGELRKSIFSESRKPTVSIMEPGETRRNSYPRADTGLFSRSKSGSEEVLCDSCIGNKQKAVKSCLVCQASFCELHLKPHLEGAAFRDHQLLEPIRDFEARKCPVHGKTMELFCQTDQTCICYLCMFQEHKNHSTVTVEEAKAEKETELSLQKEQLQLKIIEIEDEAEKWQKEKDRIKSFTTNEKAILEQNFRDLVRDLEKQKEEVRAALEQREQDAVDQVKVIMDALDERAKVLHEDKQTREQLHSISDSVLFLQEFGALMSNYSLPPPLPTYHRSSTVGTSPVSTAPGLWGLWKDGPACRGWGGRHPAWAFPFGINHWSVK

SEQ ID NO: 906910 - protein, 303 aa, Homo sapiens
MEAADASRSNGSSPEARDARSPSGPSGSLENGTKADGKDAKTTNGHGGEAAEGKSLGSALKPGEGRSALFAGNEWRRPIIQFVESGDDKNSNYFSMDSMEGKRSPYAGLQLGAAKKPPVTFAEKGELRKSIFSESRKPTVSIMEPGETRRNSYPRADTGLFSRSKSGSEEVLCDSCIGNKQKAVKSCLVCQASFCELHLKPHLEGAAFRDHQLLEPIRDFEARKCPVHGKTMELFCQTDQTCICYLCMFQEHKNHSTVTVEEAKAEKETELSLQKEQLQLKIIEIEDEAEKWQKEKDRIKYDK

SEQ ID NO: 906911 - protein, 428 aa, Homo sapiens
MEAADASRSNGSSPEARDARSPSGPSGSLENGTKADGKDAKTTNGHGGEAAEGKSLGSALKPGEGRSALFAGNEWRRPIIQFVESGDDKNSNYFSMDSMEGKRSPYAGLQLGAAKKPPVTFAEKGELRKSIFSESRKPTVSIMEPGETRRNSYPRADTGLFSRSKSGSEEVLCDSCIGNKQKAVKSCLVCQASFCELHLKPHLEGAAFRDHQLLEPIRDFEARKCPVHGKTMELFCQTDQTCICYLCMFQEHKNHSTVTVEEAKAEKETELSLQKEQLQLKIIEIEDEAEKWQKEKDRIKSFTTNEKAILEQNFRDLVRDLEKQKEEVRAALEQREQDAVDQVKVIMDALDERAKVLHEDKQTREQLHSISDSVLFLQVTSHSSVTQALDFTIHFLRPPSNIHPSTYPLIHLFVYLFIHHPAIQPSIH

SEQ ID NO: 906912 - protein, 341 aa, Homo sapiens
GTLWFRWIEVGTVGEAKAEKETELSLQKEQLQLKIIEIEDEAEKWQKEKDRIKSFTTNEKAILEQNFRDLVRDLEKQKEEVRAALEQREQDAVDQVKVIMDALDERAKVLHEDKQTREQLHSISDSVLFLQEFGALMSNYSLPPPLPTYHVLLEGEGLGQSLGNFKDDLLNVCMRHVEKMCKADLSRNFIERNHMENGGDHRYVNNYTNSFGGEWSAPDTMKRYSMYLTPKGGVRTSYQPSSPGRFTKETTQKNFNNLYGTKGNYTSRVWEYSSSIQNSDNDLPVVQGSSSFSLKGYPSLMRSQSPKAQPQTWKSGKQTMLSHYRPFYVNKGNGIGSNEAP

SEQ ID NO: 906913 - protein, 570 aa, Homo sapiens; identical to SEQ ID NO: 906896

SEQ ID NO: 906914 - protein, 588 aa, Homo sapiens; identical to SEQ ID NO: 906895

SEQ ID NO: 906915 - protein, 183 aa, Homo sapiens
WASCFSYFLSLNFLICLRGIQPQLMYGSNKKWALIAPCKGGDHRYVNNYTNSFGGEWSAPDTMKRYSMYLTPKGGVRTSYQPSSPGRFTKETTQKNFNNLYGTKGNYTSRVWEYSSSIQNSDNDLPVVQGSSSFSLKGYPSLMRSQSPKAQPQTWKSGKQTMLSHYRPFYVNKGNGIGSNEAP

SEQ ID NO: 906916 - protein, 119 aa, Homo sapiens
MREMYLRPMSGVRTSYQPSSPGRFTKETTQKNFNNLYGTKGNYTSRVWEYSSSIQNSDNDLPVVQGSSSFSLKGYPSLMRSQSPKAQPQTWKSGKQTMLSHYRPFYVNKGNGIGSNEAP

SEQ ID NO: 906917 - protein, 588 aa, Homo sapiens; identical to SEQ ID NO: 906895

SEQ ID NO: 906918 - protein, 588 aa, Homo sapiens; identical to SEQ ID NO: 906895

SEQ ID NO: 906919 - protein, 588 aa, Homo sapiens; identical to SEQ ID NO: 906895

SEQ ID NO: 906920 - protein, 526 aa, Homo sapiens
MEAADASRSNGSSPEARDARSPSGPSGSLENGTKADGKDAKTTNGHGGEAAEGKSLGSALKPGEGRSALFAGNEWRRPIIQFVESGDDKNSNYFSMDSMEGKRSPYAGLQLGAAKKPPVTFAEKGELRKSIFSESRKPTVSIMEPGETRRNSYPRADTGLFSRSKSGSEEVLCDSCIGNKQKAVKSCLVCQASFCELHLKPHLEGAAFRDHQLLEPIRDFEARKCPVHGKTMELFCQTDQTCICYLCMFQEHKNHSTVTVEEAKAEKETELSLQKEQLQLKIIEIEDEAEKWQKEKDRIKSFTTNEKAILEQNFRDLVRDLEKQKEEVRAALEQREQDAVDQVKVIMDALDERAKVLHEDKQTREQLHSISDSVLFLQEFGALMSNYSLPPPLPTYHVLLEGEGLGQSLGNFKDDLLNVCMRHVEKMCKADLSRNFIERNHMENGGDHRYVNNYTNSFGGEWSAPDTMKRYSMYLTPKGGVRTSYQPSSPGRFTKERIAHQCTKFLQKQHRVADAMQLLPGLLVLM

SEQ ID NO: 906921 - protein, 185 aa, Homo sapiens
MSGGDPSSSLSSPGTTRTPTTSAWTLWKARGRRTQGSSWGLPRSHPLPLPKRASCASPFSRSPGSPRCPSWSPGRPGGTATPGPTRAFFHGPSPAPRRCCATPASATSRRRSSPAWCARPPSASCISSPTWRAPPSETTSCSSPSGTLRPASVPCMARRWSSSARPTRPASATFACSRSTRIIAP

SEQ ID NO: 906922 - protein, 561 aa, Homo sapiens
MITSQGSVSFRDVTVGFTQEEWQHLDPAQRTLYRDVMLENYSHLVSVGYCIPKPEVILKLEKGEEPWILEEKFPSQSHLELINTSRNYSIMKFNEFNKGGKCFCDEKHEIIHSEEEPSEYNKNGNSFWLNEDLIWHQKIKNWEQSFEYNECGKAFPENSLFLVHKRGYTGQKTCKYTEHGKTCDMSFFITHQQTHPRENHYGNECGENIFEESILLEHQSVYPFSQKLNLTPIQRTHSINNIIEYNECGTFFSEKLVLHLQQRTHTGEKPYECHECGKTFTQKSAHTRHQRTHTGGKPYECHECGKTFYKNSDLIKHQRIHTGERPYGCHECGKSFSEKSTLTQHQRTHTGEKPYECHECGKTFSFKSVLTVHQKTHTGEKPYECYACGKAFLRKSDLIKHQRIHTGEKPYECNECGKSFSEKSTLTKHLRTHTGEKPYECIQCGKFFCYYSGFTEHLRRHTGEKPFGCNECGKTFRQKSALIVHQRTHIRQKPYGCNQCGKSFCVKSKLIAHHRTHTGEKPYECNVCGKSFYVKSKLTVHQRIHLGRNPINVVNEGNYSG

SEQ ID NO: 906923 - protein, 120 aa, Homo sapiens
MITSQGSVSFRDVTVGFTQEEWQHLDPAQRTLYRDVMLENYSHLVSVGYCIPKPEVILKLEKGEEPWILEEKFPSQSHLGELVCARWNLKEGRSQRVSLDNKTIEMFFRNHVLEAPDLWK

SEQ ID NO: 906924 - protein, 950 aa, Homo sapiens
MGVPAFFRWLSRKYPSIIVNCVEEKPKECNGVKIPVDASKPNPNDVEFDNLYLDMNGIIHPCTHPEDKPAPKNEDEMMVAIFEYIDRLFSIVRPRRLLYMAIDGVAPRAKMNQQRSRRFRASKEGMEAAVEKQRVREEILAKGGFLPPEEIKERFDSNCITPGTEFMDNLAKCLRYYIADRLNNDPGWKNLTVILSDASAPGEGEHKIMDYIRRQRAQPNHDPNTHHCLCGADADLIMLGLATHEPNFTIIREEFKPNKPKPCGLCNQFGHEVKDCEGLPREKKGKHDELADSLPCAEGEFIFLRLNVLREYLERELTMASLPFTFDVERSIDDWVFMCFFVGNDFLPHLPSLEIRENAIDRLVNIYKNVVHKTGGYLTESGYVNLQRVQMIMLAVGEVEDSIFKKRKDDEDSFRRRQKEKRKRMKRDQPAFTPSGILTPHALGSRNSPGSQVASNPRQAAYEMRMQNNSSPSISPNTSFTSDGSPSPLGGIKRKAEDSDSEPEPEDNVRLWEAGWKQRYYKNKFDVDAADEKFRRKVVQSYVEGLCWVLRYYYQGCASWKWYYPFHYAPFASDFEGIADMPSDFEKGTKPFKPLEQLMGVFPAASGNFLPPSWRKLMSDPDSSIIDFYPEDFAIDLNGKKYAWQGVALLPFVDERRLRAALEEVYPDLTPEETRRNSLGGDVLFVGKHHPLHDFILELYQTGSTEPVEVPPELCHGIQGKFSLDEEAILPDQIVCSPVPMLRDLTQNTVVSINFKDPQFAEDYIFKAVMLPGARKPAAVLKPSDWEKSSNGRQWKPQLGFNRDRRPVHLDQAAFRTLGHVMPRGSGTGIYSNAAPPPVTYQGNLYRPLLRGQAQIPKLMSNMRPQDSWRGPPPLFQQQRFDRGVGAEPLLPWNRMLQTQNAAFQPNQYQMLAGPGGYPPRRDDRGGRQGYPREGRKYPLPPPSGRYNWN

SEQ ID NO: 906925 - protein, 144 aa, Homo sapiens [sequence omitted]

SEQ ID NO: 906926 - protein, 950 aa, Homo sapiens; identical to SEQ ID NO: 906924

SEQ ID NO: 906927 - protein, 435 aa, Homo sapiens
MGVPAFFRWLSRKYPSIIVNCVEEKPKECNGVKIPVDASKPNPNDVEFDNLYLDMNGIIHPCTHPEDKPAPKNEDEMMVAIFEYIDRLFSIVRPRRLLYMAIDGVAPRAKMNQQRSRRFRASKEGMEAAVEKQRVREEILAKGGFLPPEEIKERFDSNCITPGTEFMDNLAKCLRYYIADRLNNDPGWKNLTVILSDASAPGEGEHKIMDYIRRQRAQPNHDPNTHHCLCGADADLIMLGLATHEPNFTIIREEFKPNKPKPCGLCNQFGHEVKDCEGLPREKKGKHDELADSLPCAEGEFIFLRLNVLREYLERELTMASLPFTFDVERSIDDWVFMCFFVGNDFLPHLPSLEIRENAIDRLVNIYKNVVHKTGGYLTESGYVNLQRVQMIMLAVGEVEDSIFKKRKDDEDSFRRRQKEKRKRMKKFTRFSSSQ

SEQ ID NO: 906928 - protein, 874 aa, Homo sapiens
MMVAIFEYIDRLFSIVRPRRLLYMAIDGVAPRAKMNQQRSRRFRASKEGMEAAVEKQRVREEILAKGGFLPPEEIKERFDSNCITPGTEFMDNLAKCLRYYIADRLNNDPGWKNLTVILSDASAPGEGEHKIMDYIRRQRAQPNHDPNTHHCLCGADADLIMLGLATHEPNFTIIREEFKPNKPKPCGLCNQFGHEVKDCEGLPREKKGKHDELADSLPCAEGEFIFLRLNVLREYLERELTMASLPFTFDVERSIDDWVFMCFFVGNDFLPHLPSLEIRENAIDRLVNIYKNVVHKTGGYLTESGYVNLQRVQMIMLAVGEVEDSIFKKRKDDEDSFRRRQKEKRKRMKRDQPAFTPSGILTPHALGSRNSPGSQVASNPRQAAYEMRMQNNSSPSISPNTSFTSDGSPSPLGGIKRKAEDSDSEPEPEDNVRLWEAGWKQRYYKNKFDVDAADEKFRRKVVQSYVEGLCWVLRYYYQGCASWKWYYPFHYAPFASDFEGIADMPSDFEKGTKPFKPLEQLMGVFPAASGNFLPPSWRKLMSDPDSSIIDFYPEDFAIDLNGKKYAWQGVALLPFVDERRLRAALEEVYPDLTPEETRRNSLGGDVLFVGKHHPLHDFILELYQTGSTEPVEVPPELCHGIQGKFSLDEEAILPDQIVCSPVPMLRDLTQNTVVSINFKDPQFAEDYIFKAVMLPGARKPAAVLKPSDWEKSSNGRQWKPQLGFNRDRRPVHLDQAAFRTLGHVMPRGSGTGIYSNAAPPPVTYQGNLYRPLLRGQAQIPKLMSNMRPQDSWRGPPPLFQQQRFDRGVGAEPLLPWNRMLQTQNAAFQPNQYQMLAGPGGYPPRRDDRGGRQGYPREGRKYPLPPPSGRYNWN

SEQ ID NO: 906929 - protein, 784 aa, Homo sapiens
MDNLAKCLRYYIADRLNNDPGWKNLTVILSDASAPGEGEHKIMDYIRRQRAQPNHDPNTHHCLCGADADLIMLGLATHEPNFTIIREEFKPNKPKPCGLCNQFGHEVKDCEGLPREKKGKHDELADSLPCAEGEFIFLRLNVLREYLERELTMASLPFTFDVERSIDDWVFMCFFVGNDFLPHLPSLEIRENAIDRLVNIYKNVVHKTGGYLTESGYVNLQRVQMIMLAVGEVEDSIFKKRKDDEDSFRRRQKEKRKRMKRDQPAFTPSGILTPHALGSRNSPGSQVASNPRQAAYEMRMQNNSSPSISPNTSFTSDGSPSPLGGIKRKAEDSDSEPEPEDNVRLWEAGWKQRYYKNKFDVDAADEKFRRKVVQSYVEGLCWVLRYYYQGCASWKWYYPFHYAPFASDFEGIADMPSDFEKGTKPFKPLEQLMGVFPAASGNFLPPSWRKLMSDPDSSIIDFYPEDFAIDLNGKKYAWQGVALLPFVDERRLRAALEEVYPDLTPEETRRNSLGGDVLFVGKHHPLHDFILELYQTGSTEPVEVPPELCHGIQGKFSLDEEAILPDQIVCSPVPMLRDLTQNTVVSINFKDPQFAEDYIFKAVMLPGARKPAAVLKPSDWEKSSNGRQWKPQLGFNRDRRPVHLDQAAFRTLGHVMPRGSGTGIYSNAAPPPVTYQGNLYRPLLRGQAQIPKLMSNMRPQDSWRGPPPLFQQQRFDRGVGAEPLLPWNRMLQTQNAAFQPNQYQMLAGPGGYPPRRDDRGGRQGYPREGRKYPLPPPSGRYNWN

SEQ ID NO: 906930 - protein, 784 aa, Homo sapiens; identical to SEQ ID NO: 906929

SEQ ID NO: 906931 - protein, 526 aa, Homo sapiens
MKRDQPAFTPSGILTPHALGSRNSPGSQVASNPRQAAYEMRMQNNSSPSISPNTSFTSDGSPSPLGGIKRKAEDSDSEPEPEDNVRLWEAGWKQRYYKNKFDVDAADEKFRRKVVQSYVEGLCWVLRYYYQGCASWKWYYPFHYAPFASDFEGIADMPSDFEKGTKPFKPLEQLMGVFPAASGNFLPPSWRKLMSDPDSSIIDFYPEDFAIDLNGKKYAWQGVALLPFVDERRLRAALEEVYPDLTPEETRRNSLGGDVLFVGKHHPLHDFILELYQTGSTEPVEVPPELCHGIQGKFSLDEEAILPDQIVCSPVPMLRDLTQNTVVSINFKDPQFAEDYIFKAVMLPGARKPAAVLKPSDWEKSSNGRQWKPQLGFNRDRRPVHLDQAAFRTLGHVMPRGSGTGIYSNAAPPPVTYQGNLYRPLLRGQAQIPKLMSNMRPQDSWRGPPPLFQQQRFDRGVGAEPLLPWNRMLQTQNAAFQPNQYQMLAGPGGYPPRRDDRGGRQGYPREGRKYPLPPPSGRYNWN

SEQ ID NO: 906932 - protein, 744 aa, Homo sapiens
MGVPAFFRWLSRKYPSIIVNCVEEKPKECNGVKIPVDASKPNPNDVEFDNLYLDMNGIIHPCTHPEDKPAPKNEDEMMVAIFEYIDRLFSIVRPRRLLYMAIDGVAPRAKMNQQRSRRFRASKEGMEAAVEKQRVREEILAKGGFLPPEEIKERFDSNCITPGTEFMDNLAKCLRYYIADRLNNDPGWKNLTVILSDASAPGEGEHKIMDYIRRQRAQPNHDPNTHHCLCGADADLIMLGLATHEPNFTIIREEFKPNKPKPCGLCNQFGHEVKDCEGLPREKKGKHDELADSLPCAEGEFIFLRLNVLREYLERELTMASLPFTFDVERSIDDWVFMCFFVGNDFLPHLPSLEIRENAIDRLVNIYKNVVHKTGGYLTESGYVNLQRVQMIMLAVGEVEDSIFKKRKDDEDSFRRRQKEKRKRMKRDQPAFTPSGILTPHALGSRNSPGSQVASNPRQAAYEMRMQNNSSPSISPNTSFTSDGSPSPLGGIKRKAEDSDSEPEPEDNVRLWEAGWKQRYYKNKFDVDAADEKFRRKVVQSYVEGLCWVLRYYYQGCASWKWYYPFHYAPFASDFEGIADMPSDFEKGTKPFKPLEQLMGVFPAASGNFLPPSWRKLMSDPDSSIIDFYPEDFAIDLNGKKYAWQGVALLPFVDERRLRAALEEVYPDLTPEENRRKGWRRCLIVGELPIHELIVEAYRKGPEPWGTPTCGDQEGSGRKPRPTKKVPASKGCTNGAVLNHGGTH

SEQ ID NO: 906933 - protein, 352 aa, Homo sapiens [sequence omitted]

SEQ ID NO: 906934 - protein, 435 aa, Homo sapiens; identical to SEQ ID NO: 906927

SEQ ID NO: 906935 - protein, 127 aa, Homo sapiens
MLRFYPRLRRVSIEAKKDIFFQTRGDQTGKGDLLPGMQSAAILCPGSRRAGAGRSRRSPGRAVAREPPQLRRARPRAPGLGPPRASCSLRHPVRRRTPPPTNSPARPFSAAPSSSEASFPASPAAAP

SEQ ID NO: 906936 - protein, 950 aa, Homo sapiens; identical to SEQ ID NO: 906924

SEQ ID NO: 906937 - protein, 950 aa, Homo sapiens; identical to SEQ ID NO: 906924

SEQ ID NO: 906938 - protein, 952 aa, Homo sapiens
MGVPAFFRWLSRKYPSIIVNCVEEKPKECNGVKIPVDASKPNPNDVEFDNLYLDMNGIIHPCTHPEDKPAPKNEDEMMVAIFEYIDRLFSIVRPRRLLYMAIDGVAPRAKMNQQRSRRFRASKEGMEAAVEKQRVREEILAKGGFLPPEEIKERFDSNCITPGTEFMDNLAKCLRYYIADRLNNDPGWKNLTVILSDASAPGEGEHKIMDYIRRQRAQPNHDPNTHHCLCGADADLIMLGLATHEPNFTIIREEFKPNKPKPCGLCNQFGHEVKDCEGLPREKKGKHTAGTDDDTCRESSFRLNVLREIFGNRYLERELTMASLPFTFDVERSIDDWVFMCFFVGNDFLPHLPSLEIRENAIDRLVNIYKNVVHKTGGYLTESGYVNLQRVQMIMLAVGEVEDSIFKKRKDDEDSFRRRQKEKRKRMKRDQPAFTPSGILTPHALGSRNSPGSQVASNPRQAAYEMRMQNNSSPSISPNTSFTSDGSPSPLGGIKRKAEDSDSEPEPEDNVRLWEAGWKQRYYKNKFDVDAADEKFRRKVVQSYVEGLCWVLRYYYQGCASWKWYYPFHYAPFASDFEGIADMPSDFEKGTKPFKPLEQLMGVFPAASGNFLPPSWRKLMSDPDSSIIDFYPEDFAIDLNGKKYAWQGVALLPFVDERRLRAALEEVYPDLTPEETRRNSLGGDVLFVGKHHPLHDFILELYQTGSTEPVEVPPELCHGIQGKFSLDEEAILPDQIVCSPVPMLRDLTQNTVVSINFKDPQFAEDYIFKAVMLPGARKPAAVLKPSDWEKSSNGRQWKPQLGFNRDRRPVHLDQAAFRTLGHVMPRGSGTGIYSNAAPPPVTYQGNLYRPLLRGQAQIPKLMSNMRPQDSWRGPPPLFQQQRFDRGVGAEPLLPWNRMLQTQNAAFQPNQYQMLAGPGGYPPRRDDRGGRQGYPREGRKYPLPPPSGRYNWN

SEQ ID NO: 906939 - protein, 977 aa, Homo sapiens
MGVPAFFRWLSRKYPSIIVNCVEEKPKECNGVKIPVDASKPNPNDVEFDNLYLDMNGIIHPCTHPEDKPAPKNEDEMMVAIFEYIDRLFSIVRPRRLLYMAIDGVAPRAKMNQQRSRRFRASKEGMEAAVEKQRVREEILAKGGFLPPEEIKERFDSNCITPGTEFMDNLAKCLRYYIADRLNNDPGWKNLTVILSDASAPGEGEHKIMDYIRRQRAQPNHDPNTHHCLCGADADLIMLGLATHEPNFTIIREEFKPNKPKPCGLCNQFGHEVKDCEGLPREKKGKHDELADSLPCAEGEFIFLRLNVLREYLERELTMASLPFTFDVERSIDDWVFMCFFVGNDFLPHLPSLEIRENAIDRLVNIYKNVVHKTGVSSFLNDFKTEVFAFIRRSFYIYFITSGYLTESGYVNLQRVQMIMLAVGEVEDSIFKKRKDDEDSFRRRQKEKRKRMKRDQPAFTPSGILTPHALGSRNSPGSQVASNPRQAAYEMRMQNNSSPSISPNTSFTSDGSPSPLGGIKRKAEDSDSEPEPEDNVRLWEAGWKQRYYKNKFDVDAADEKFRRKVVQSYVEGLCWVLRYYYQGCASWKWYYPFHYAPFASDFEGIADMPSDFEKGTKPFKPLEQLMGVFPAASGNFLPPSWRKLMSDPDSSIIDFYPEDFAIDLNGKKYAWQGVALLPFVDERRLRAALEEVYPDLTPEETRRNSLGGDVLFVGKHHPLHDFILELYQTGSTEPVEVPPELCHGIQGKFSLDEEAILPDQIVCSPVPMLRDLTQNTVVSINFKDPQFAEDYIFKAVMLPGARKPAAVLKPSDWEKSSNGRQWKPQLGFNRDRRPVHLDQAAFRTLGHVMPRGSGTGIYSNAAPPPVTYQGNLYRPLLRGQAQIPKLMSNMRPQDSWRGPPPLFQQQRFDRGVGAEPLLPWNRMLQTQNAAFQPNQYQMLAGPGGYPPRRDDRGGRQGYPREGRKYPLPPPSGRYNWN

SEQ ID NO: 906940 - protein, 914 aa, Homo sapiens
MGVPAFFRWLSRKYPSIIVNCVEEKPKECNGVKIPVDASKPNPNDVEFDNLYLDMNGIIHPCTHPEDKPAPKNEDEMMVAIFEYIDRLFSIVRPRRLLYMAIDGVAPRAKMNQQRSRRFRASKEGMEAAVEKQRVREEILAKGGFLPPEEIKERFDSNCITPGTEFMDNLAKCLRYYIADRLNNDPGWKNLTVILSDASAPGEGEHKIMDYIRRQRAQPNHDPNTHHCLCGADADLIMLGLATHEPNFTIIREEFKPNKPKPCGLCNQFGHEVKDCEGLPREKKGKHDELADSLPCAEGEFIFLRLNVLREYLERELTMASLPFTFDVERSIDDWVFMCFFVGNDFLPHLPSLEIRENAIDRLVNIYKNVVHKTGDSFRRRQKEKRKRMKRDQPAFTPSGILTPHALGSRNSPGSQVASNPRQAAYEMRMQNNSSPSISPNTSFTSDGSPSPLGGIKRKAEDSDSEPEPEDNVRLWEAGWKQRYYKNKFDVDAADEKFRRKVVQSYVEGLCWVLRYYYQGCASWKWYYPFHYAPFASDFEGIADMPSDFEKGTKPFKPLEQLMGVFPAASGNFLPPSWRKLMSDPDSSIIDFYPEDFAIDLNGKKYAWQGVALLPFVDERRLRAALEEVYPDLTPEETRRNSLGGDVLFVGKHHPLHDFILELYQTGSTEPVEVPPELCHGIQGKFSLDEEAILPDQIVCSPVPMLRDLTQNTVVSINFKDPQFAEDYIFKAVMLPGARKPAAVLKPSDWEKSSNGRQWKPQLGFNRDRRPVHLDQAAFRTLGHVMPRGSGTGIYSNAAPPPVTYQGNLYRPLLRGQAQIPKLMSNMRPQDSWRGPPPLFQQQRFDRGVGAEPLLPWNRMLQTQNAAFQPNQYQMLAGPGGYPPRRDDRGGRQGYPREGRKYPLPPPSGRYNWN

SEQ ID NO: 906941 - protein, 560 aa, Homo sapiens
MIMLAVGEVEDSIFKKRKDDEDSFRRRQKEKRKRMKRDQPAFTPSGILTPHALGSRNSPGSQVASNPRQAAYEMRMQNNSSPSISPNTSFTSDGSPSPLGGIKRKAEDSDSEPEPEDNVRLWEAGWKQRYYKNKFDVDAADEKFRRKVVQSYVEGLCWVLRYYYQGCASWKWYYPFHYAPFASDFEGIADMPSDFEKGTKPFKPLEQLMGVFPAASGNFLPPSWRKLMSDPDSSIIDFYPEDFAIDLNGKKYAWQGVALLPFVDERRLRAALEEVYPDLTPEETRRNSLGGDVLFVGKHHPLHDFILELYQTGSTEPVEVPPELCHGIQGKFSLDEEAILPDQIVCSPVPMLRDLTQNTVVSINFKDPQFAEDYIFKAVMLPGARKPAAVLKPSDWEKSSNGRQWKPQLGFNRDRRPVHLDQAAFRTLGHVMPRGSGTGIYSNAAPPPVTYQGNLYRPLLRGQAQIPKLMSNMRPQDSWRGPPPLFQQQRFDRGVGAEPLLPWNRMLQTQNAAFQPNQYQMLAGPGGYPPRRDDRGGRQGYPREGRKYPLPPPSGRYNWN

SEQ ID NO: 906942 - protein, 679 aa, Homo sapiens
MGVPAFFRWLSRKYPSIIVNCVEEKPKECNGVKIPVDASKPNPNDVEFDNLYLDMNGIIHPCTHPEDKPAPKNEDEMMVAIFEYIDRLFSIVRPRRLLYMAIDGVAPRAKMNQQRSRRFRASKEGMEAAVEKQRVREEILAKGGFLPPEEIKERFDSNCITPGTEFMDNLAKCLRYYIADRLNNDPGWKNLTVILSDASAPGEGEHKIMDYIRRQRAQPNHDPNTHHCLCGADADLIMLGLATHEPNFTIIREEFKPNKPKPCGLCNQFGHEVKDCEGLPREKKGKHDELADSLPCAEGEFIFLRLNVLREYLERELTMASLPFTFDVERSIDDWVFMCFFVGNDFLPHLPSLEIRENAIDRLVNIYKNVVHKTGGYLTESGYVNLQRVQMIMLAVGEVEDSIFKKRKDDEDSFRRRQKEKRKRMKRDQPAFTPSGILTPHALGSRNSPGSQVASNPRQAAYEMRMQNNSSPSISPNTSFTSDGSPSPLGGIKRKAEDSDSEPEPEDNVRLWEAGWKQRYYKNKFDVDAADEKFRRKVVQSYVEGLCWVLRYYYQGCASWKWYYPFHYAPFASDFEGIADMPSDFEKGTKPFKPLEQLMGVFPAASGNFLPPSWRKLMSDPDSSIIDFYPEDFAIDLNGKKYAWQVVAHCHSGMSERYECPKRLPDSIRKPKRLGDFGE

SEQ ID NO: 906943 - protein, 510 aa, Homo sapiens
MGVPAFFRWLSRKYPSIIVNCVEEKPKECNGVKIPVDASKPNPNDVEFDNLYLDMNGIIHPCTHPEDKPAPKNEDEMMVAIFEYIDRLFSIVRPRRLLYMAIDGVAPRAKMNQQRSRRFRASKEGMEAAVEKQRVREEILAKGGFLPPEEIKERFDSNCITPGTEFMDNLAKCLRYYIADRLNNDPGWKNLTVILSDASAPGEGEHKIMDYIRRQRAQPNHDPNTHHCLCGADADLIMLGLATHEPNFTIIREEFKPNKPKPCGLCNQFGHEVKDCEGLPREKKGKHDELADSLPCAEGEFIFLRLNVLREYLERELTMASLPFTFDVERSIDDWVFMCFFVGNDFLPHLPSLEIRENAIDRLVNIYKNVVHKTGGYLTESGYVNLQRVQMIMLAVGEVEDSIFKKRKDDEDSFRRRQKEKRKRMKRDQPAFTPSGILTPHALGSRNSPGSQVASNPRQAAYEMRMQNNSSPSISPNTSFTSDGSPSPLGGIKRKAEDSDSEPEPEDNVR

SEQ ID NO: 906944 - protein, 430 aa, Homo sapiens
MGVPAFFRWLSRKYPSIIVNCVEEKPKECNGVKIPVDASKPNPNDVEFDNLYLDMNGIIHPCTHPEDKPAPKNEDEMMVAIFEYIDRLFSIVRPRRLLYMAIDGVAPRAKMNQQRSRRFRASKEGMEAAVEKQRVREEILAKGGFLPPEEIKERFDSNCITPGTEFMDNLAKCLRYYIADRLNNDPGWKNLTVILSDASAPGEGEHKIMDYIRRQRAQPNHDPNTHHCLCGADADLIMLGLATHEPNFTIIREEFKPNKPKPCGLCNQFGHEVKDCEGLPREKKGKHDELADSLPCAEGEFIFLRLNVLREYLERELTMASLPFTFDVERSIDDWVFMCFFVGNDFLPHLPSLEIRENAIDRLVNIYKNVVHKTGGYLTESGYVNLQRVQMIMLAVGEVEDSIFKKRKDDEDSFRRRQKEKRKRMKVSFN

SEQ ID NO: 906945 - protein, 257 aa, Homo sapiens
MGVPAFFRWLSRKYPSIIVNCVEEKPKECNGVKIPVDASKPNPNDVEFDNLYLDMNGIIHPCTHPEDKPAPKNEDEMMVAIFEYIDRLFSIVRPRRLLYMAIDGVAPRAKMNQQRSRRFRASKEGMEAAVEKQRVREEILAKGGFLPPEEIKERFDSNCITPGTEFMDNLAKCLRYYIADRLNNDPGWKNLTVILSDASAPGEGEHKIMDYIRRQRAQETGHCDIVRWYPHQSLCSHGAVQVPSAVPLSWPPVLMPW

SEQ ID NO: 906946 - protein, 133 aa, Homo sapiens
FPPNTVTGSERVQITAIGDVLGPSINGLASLIRMPYGCGEQNMINFAPNIYILDYLTKKKQLTDNLKEKALSFMRQGYQRELLYQREDGSFSAFGNYDPSGSTCRGLCSCQRVHVSKRRLQVCHSPERGGWSL

SEQ ID NO: 906947 - protein, 273 aa, Homo sapiens
FPPNTVTGSERVQITAIGDVLGPSINGLASLIRMPYGCGEQNMINFAPNIYILDYLTKKKQLTDNLKEKALSFMRQGYQRELLYQREDGSFSAFGNYDPSGSTWLSAFVLRCFLEADPYIDIDQNVLHRTYTWLKGHQKSNGEFWDPGRVIHSELQGGNKSPVTLTAYIVTSLLGYRKYQPNIDVQESIHFLESEFSRGISDNYTLALITYALSSVGSPKAKEALNMLTWRAEQEGGMQFWVSSESKLSDSWQPRSLDIEVAAYALLSHFLQF

SEQ ID NO: 906948 - protein, 152 aa, Homo sapiens
TSTCTLIFLSPKIDIAPGNQTLPVPVRAQVHQHRAVQIIPLLIGLGVTNATGTGIAGLSPSLSYYHTLLKDLSDSLQDIAKSTLTLQSQIDSLAAVTLQNHRGLDLLTVEKGGLCTFLGEDCFSTNQSGLVRDAASQLNEKASKIRQCLSDF

SEQ ID NO: 906949 - protein, 348 aa, Homo sapiens
TCDCVRIQAMSKEIGLQMHEELLKVTNELYTVMKTYHMYHAESISAESKLKEAEKQEEKQFNKSGDLSMNLLRHEDRPQRRSSVKKIEKMKEKRQAKYSENKLKCTKARNDYLLNLAATNAAISKYYIHDVSDLIDCCDLGFHASLARTFRTYLSAEYNLETSRHEGLDVIENAVDNLDSRSDKHTVMDMCNQVFCPPLKFEFQPHMGDEVCQVSAQQPVQTELLMRYHQLQSRLATLKIENEEVRKTLDATMQTLQDMLTVEDFDVSDAFQHSRSTESVKSAASETYMSKINIAKRRANQQETEMFYFTKFKEYVNGSNLITKLQAKHDLLKQTLGEGERAECGTTR

SEQ ID NO: 906950 - protein, 118 aa, Homo sapiens
MRIQDFCQSAVFPQVRKTLDATMQTLQDMLTVEDFDVSDAFQHSRSTESVKSAASETYMSKINIAKRRANQQETEMFYFTVSGILGPDTTLSAKPLAVTFQEQPKLLRTRETTWVNWI

SEQ ID NO: 906951 - protein, 1099 aa, Homo sapiens
LGGFRGVAHVLRSCQFLAMARESDLAPQYLRFLIHYIGACPLRGTEEIRTQLVEQFKCLEQQSESRLQLLQDLQEFFRRKAEIELEYSRSLEKLAERFSSKIRSSREHQFKKDQYLLSPVNCWYLVLHQTRRESRDHATLNDIFMNNVIVRLSQISEDVIRLFKKSKEIGLQMHEELLKVTNELYTVMKTYHMYHAESISAESKLKEAEKQEEKQFNKSGDLSMNLLRHEDRPQRRSSVKKIEKMKEKRQAKYSENKLKCTKARNDYLLNLAATNAAISKYYIHDVSDLIDCCDLGFHASLARTFRTYLSAEYNLETSRHEGLDVIENAVDNLDSRSDKHTVMDMCNQVFCPPLKFEFQPHMGDEVCQVSAQQPVQTELLMRYHQLQSRLATLKIENEEVRKTLDATMQTLQDMLTVEDFDVSDAFQHSRSTESVKSAASETYMSKINIAKRRANQQETEMFYFTKFKEYVNGSNLITKLQAKHDLLKQTLGEGERAECGTTRGRRNARTRNQDSGQAIPLVVESCIRYINLYGLQQQGIFRVPGSQVEVNDIKNSFERGEDPLVDDQNERDINSVAGVLKLYFRGLENPLFPKERFQDLISTIKLENPAERVHQIQQILVTLPRVVIVVMRYLFAFLNHLSQYSDENMMDPYNLAICFGPTLMHIPDGQDPVSCQAHINEVIKTIIIHHEAIFPSPRELEGPVYEKCMAGGEEYCDSPHSEPGAIDEVDHDNGTEPHTSDEEVEQIEAIAKFDYMGRSPRELSFKKGASLLLYHRASEDWWEGRHNGVDGLIPHQYIVVQDMDDAFSDSLSQKADSEASSGPLLDDKASSKNDLQSPTEHISDYGFGGVMGRVRLRSDGAAIPRRRSGGDTHSPPRGLGPSIDTPPRAAACPSSPHKIPLTRGRIESPEKRRMATFGSAGSINYPDKKALSEGHSMRSTCGSTRHSSLGDHKSLEAEALAEDIEKTMSTALHELRELERQNTVKQAPDVVLDTLEPLKNPPGPVSSEPASPLHTIVIRDPDAAMRRSSSSSTEMMTTFKPALSARLAGAQLRPPPMRPVRPVVQHRSSSSSSSGVGSPAVTPTEKMFPNSSADKSGTM

SEQ ID NO: 906952 - protein, 82 aa, Homo sapiens
TSFLCTLFLMMDPFPFSLTDPSVPLDPISVSNSSSQIILKWKPPSDPNGNITHYLVFWERQAEDSELFELDYCLKGECRQLC

SEQ ID NO: 906953 - protein, 91 aa, Homo sapiens
LLDSEDPVKICGQDACGSNSWTVVDIDPPLRSNDPKSQNHPGWLMRGLKPWTQYAIFVKTLVTFSDERRTYGAKSDIIYVQTDATSECVLG

SEQ ID NO: 906954 - protein, 1428 aa, Homo sapiens
GGLRGRVGAHTRRTRGPQRSWGPPRSMTPAGQRRAPDPRRPRAPAAMGTGGRRGAAAAPLLVAVAALLLGAAGHLYPGEVCPGMDIRNNLTRLHELENCSVIEGHLQILLMFKTRPEDFRDLSFPKLIMITDYLLLFRVYGLESLKDLFPNLTVIRGSRLFFNYALVIFEMVHLKELGLYNLMNITRGSVRIEKNNELCYLATIDWSRILDSVEDNYIVLNKDDNEECGDICPGTAKGKTNCPATVINGQFVERCWTHSHCQKVCPTICKSHGCTAEGLCCHSECLGNCSQPDDPTKCVACRNFYLDGRCVETCPPPYYHFQDWRCVNFSFCQDLHHKCKNSRRQGCHQYVIHNNKCIPECPSGYTMNSSNLLCTPCLGPCPKVCHLLEGEKTIDSVTSAQELRGCTVINGSLIINIRGGNNLAAELEANLGLIEEISGYLKIRRSYALVSLSFFRKLRLIRGETLEIGNYSFYALDNQNLRQLWDWSKHNLTITQGKLFFHYNPKLCLSEIHKMEEVSGTKGRQERNDIALKTNGDQASCENELLKFSYIRTSFDKILLRWEPYWPPDFRDLLGFMLFYKEAPYQNVTEFDGQDACGSNSWTVVDIDPPLRSNDPKSQNHPGWLMRGLKPWTQYAIFVKTLVTFSDERRTYGAKSDIIYVQTDATNPSVPLDPISVSNSSSQIILKWKPPSDPNGNITHYLVFWERQAEDSELFELDYCLKGLKLPSRTWSPPFESEDSQKHNQSEYEDSAGECCSCPKTDSQILKELEESSFRKTFEDYLHNVVFVPRKTSSGTGAEDPRPSRKRRSLGDVGNVTVAVPTVAAFPNTSSTSVPTSPEEHRPFEKVVNKESLVISGLRHFTGYRIELQACNQDTPEERCSVAAYVSARTMPEAKADDIVGPVTHEIFENNVVHLMWQEPKEPNGLIVLYEVSYRRYGDEELHLCVSRKHFALERGCRLRGLSPGNYSVRIRATSLAGNGSWTEPTYFYVTDYLDVPSNIAKIIIGPLIFVFLFSVVIGSIYLFLRKRQPDGPLGPLYASSNPEYLSASDVFPCSVYVPDEWEVSREKITLLRELGQGSFGMVYEGNARDIIKGEAETRVAVKTVNESASLRERIEFLNEASVMKGFTCHHVVRLLGVVSKGQPTLVVMELMAHGDLKSYLRSLRPEAENNPGRPPPTLQEMIQMAAEIADGMAYLNAKKFVHRDLAARNCMVAHDFTVKIGDFGMTRDIYETDYYRKGGKGLLPVRWMAPESLKDGVFTTSSDMWSFGVVLWEITSLAEQPYQGLSNEQVLKFVMDGGYLDQPDNCPERVTDLMRMCWQFNPKMRPTFLEIVNLLKDDLHPSFPEVSFFHSEENKAPESEELEMEFEDMENVPLDRSSHCQREEAGGRDGGSSLGFKRSYEEHIPYTHMNGGKKNGRILTLPRSNPS

SEQ ID NO: 906955 - protein, 1416 aa, Homo sapiens
GGLRGRVGAHTRRTRGPQRSWGPPRSMTPAGQRRAPDPRRPRAPAAMGTGGRRGAAAAPLLVAVAALLLGAAGHLYPGEVCPGMDIRNNLTRLHELENCSVIEGHLQILLMFKTRPEDFRDLSFPKLIMITDYLLLFRVYGLESLKDLFPNLTVIRGSRLFFNYALVIFEMVHLKELGLYNLMNITRGSVRIEKNNELCYLATIDWSRILDSVEDNYIVLNKDDNEECGDICPGTAKGKTNCPATVINGQFVERCWTHSHCQKVCPTICKSHGCTAEGLCCHSECLGNCSQPDDPTKCVACRNFYLDGRCVETCPPPYYHFQDWRCVNFSFCQDLHHKCKNSRRQGCHQYVIHNNKCIPECPSGYTMNSSNLLCTPCLGPCPKVCHLLEGEKTIDSVTSAQELRGCTVINGSLIINIRGGNNLAAELEANLGLIEEISGYLKIRRSYALVSLSFFRKLRLIRGETLEIGNYSFYALDNQNLRQLWDWSKHNLTITQGKLFFHYNPKLCLSEIHKMEEVSGTKGRQERNDIALKTNGDQASCENELLKFSYIRTSFDKILLRWEPYWPPDFRDLLGFMLFYKEAPYQNVTEFDGQDACGSNSWTVVDIDPPLRSNDPKSQNHPGWLMRGLKPWTQYAIFVKTLVTFSDERRTYGAKSDIIYVQTDATNPSVPLDPISVSNSSSQIILKWKPPSDPNGNITHYLVFWERQAEDSELFELDYCLKGLKLPSRTWSPPFESEDSQKHNQSEYEDSAGECCSCPKTDSQILKELEESSFRKTFEDYLHNVVFVPRPSRKRRSLGDVGNVTVAVPTVAAFPNTSSTSVPTSPEEHRPFEKVVNKESLVISGLRHFTGYRIELQACNQDTPEERCSVAAYVSARTMPEAKADDIVGPVTHEIFENNVVHLMWQEPKEPNGLIVLYEVSYRRYGDEELHLCVSRKHFALERGCRLRGLSPGNYSVRIRATSLAGNGSWTEPTYFYVTDYLDVPSNIAKIIIGPLIFVFLFSVVIGSIYLFLRKRQPDGPLGPLYASSNPEYLSASDVFPCSVYVPDEWEVSREKITLLRELGQGSFGMVYEGNARDIIKGEAETRVAVKTVNESASLRERIEFLNEASVMKGFTCHHVVRLLGVVSKGQPTLVVMELMAHGDLKSYLRSLRPEAENNPGRPPPTLQEMIQMAAEIADGMAYLNAKKFVHRDLAARNCMVAHDFTVKIGDFGMTRDIYETDYYRKGGKGLLPVRWMAPESLKDGVFTTSSDMWSFGVVLWEITSLAEQPYQGLSNEQVLKFVMDGGYLDQPDNCPERVTDLMRMCWQFNPKMRPTFLEIVNLLKDDLHPSFPEVSFFHSEENKAPESEELEMEFEDMENVPLDRSSHCQREEAGGRDGGSSLGFKRSYEEHIPYTHMNGGKKNGRILTLPRSNPS

SEQ ID NO: 906956 - protein, 1428 aa, Homo sapiens; identical to SEQ ID NO: 906954

SEQ ID NO: 906957 - protein, 1442 aa, Homo sapiens
GGLRGRVGAHTRRTRGPQRSWGPPRSMTPAGQRRAPDPRRPRAPAAMGTGGRRGAAAAPLLVAVAALLLGAAGHLYPGEVCPGMDIRNNLTRLHELENCSVIEGHLQILLMFKTRPEDFRDLSFPKLIMITDYLLLFRVYGLESLKDLFPNLTVIRGSRLFFNYALVIFEMVHLKELGLYNLMNITRGSVRIEKNNELCYLATIDWSRILDSVEDNYIVLNKDDNEECGDICPGTAKGKTNCPATVINGQFVERCWTHSHCQKVCPTICKSHGCTAEGLCCHSECLGNCSQPDDPTKCVACRNFYLDGRCVETCPPPYYHFQDWRCVNFSFCQDLHHKCKNSRRQGCHQYVIHNNKCIPECPSGYTMNSSNLLCTPCLGPCPKVCHLLEGEKTIDSVTSAQELRGCTVINGSLIINIRGGNNLAAELEANLGLIEEISGYLKIRRSYALVSLSFFRKLRLIRGETLEIGNYSFYALDNQNLRQLWDWSKHNLTITQGKLFFHYNPKLCLSEIHKMEEVSGTKGRQERNDIALKTNGDQASCENELLKFSYIRTSFDKILLRWEPYWPPDFRDLLGFMLFYKEAPYQNVTEFDGQDACGSNSWTVVDIDPPLRSNDPKSQNHPGWLMRGLKPWTQYAIFVKTLVTFSDERRTYGAKSDIIYVQTDATNPSVPLDPISVSNSSSQIILKWKPPSDPNGNITHYLVFWERQAEDSELFELDYCLKGLKLPSRTWSPPFESEDSQKHNQSEYEDSAGECCSCPKTDSQILKELEESSFRKTFEDYLHNVVFVPRKTSSGTGAEDPRPSRKRRSLGDVGNVTVAVPTVAAFPNTSSTSVPTSPEEHRPFEKVVNKESLVISGLRHFTGYRIELQACNQDTPEERCSVAAYVSARTMPEAKADDIVGPVTHEIFENNVVHLMWQEPKEPNGLIVLYEVSYRRYGDEELHLCVSRKHFALERGCRLRGLSPGNYSVRIRATSLAGNGSWTEPTYFYVTDYLDVPSNIAKIIIGPLIFVFLFSVVIGSIYLFLRKRQPDGPLGPLYASSNPEYLSASDVFPCSVYVPDEWEVSREKITLLRELGQGSFGMVYEGNARDIIKGEAETRVAVKTVNESASLRERIEFLNEASVMKGFTCHHVVRLLGVVSKGQPTLVVMELMAHGDLKSYLRSLRPEAENNPGRPPPTLQEMIQMAAEIADGMAYLNAKKFVHRDLAARNCMVAHDFTVKIGGRLAFCFENITTQANFGMTRDIYETDYYRKGGKGLLPVRWMAPESLKDGVFTTSSDMWSFGVVLWEITSLAEQPYQGLSNEQVLKFVMDGGYLDQPDNCPERVTDLMRMCWQFNPKMRPTFLEIVNLLKDDLHPSFPEVSFFHSEENKAPESEELEMEFEDMENVPLDRSSHCQREEAGGRDGGSSLGFKRSYEEHIPYTHMNGGKKNGRILTLPRSNPS

SEQ ID NO: 906958 - protein, 509 aa, Homo sapiens
GWTLPDVQSSATLLLLLSSSQELHLCVSRKHFALERGCRLRGLSPGNYSVRIRATSLAGNGSWTEPTYFYVTDYLDVPSNIAKIIIGPLIFVFLFSVVIGSIYLFLRKRQPDGPLGPLYASSNPEYLSASDVFPCSVYVPDEWEVSREKITLLRELGQGSFGMVYEGNARDIIKGEAETRVAVKTVNESASLRERIEFLNEASVMKGFTCHHVVRLLGVVSKGQPTLVVMELMAHGDLKSYLRSLRPEAENNPGRPPPTLQEMIQMAAEIADGMAYLNAKKFVHRDLAARNCMVAHDFTVKIGDFGMTRDIYETDYYRKGGKGLLPVRWMAPESLKDGVFTTSSDMWSFGVVLWEITSLAEQPYQGLSNEQVLKFVMDGGYLDQPDNCPERVTDLMRMCWQFNPKMRPTFLEIVNLLKDDLHPSFPEVSFFHSEENKAPESEELEMEFEDMENVPLDRSSHCQREEAGGRDGGSSLGFKRSYEEHIPYTHMNGGKKNGRILTLPRSNPS

SEQ ID NO: 906959 - protein, 1428 aa, Homo sapiens; identical to SEQ ID NO: 906954

SEQ ID NO: 906960 - protein, 1384 aa, Homo sapiens
GGLRGRVGAHTRRTRGPQRSWGPPRSMTPAGQRRAPDPRRPRAPAAMGTGGRRGAAAAPLLVAVAALLLGAAGHLYPGEVCPGMDIRNNLTRLHELENCSVIEGHLQILLMFKTRPEDFRDLSFPKLIMITDYLLLFRVYGLESLKDLFPNLTVIRGSRLFFNYALVIFEMVHLKELGLYNLMNITRGSVRIEKNNELCYLATIDWSRILDSVEDNYIVLNKDDNEECGDICPGTAKGKTNCPATVINGQFVERCWTHSHCQKVCPTICKSHGCTAEGLCCHSECLGNCSQPDDPTKCVACRNFYLDGRCVETCPPPYYHFQDWRCVNFSFCQDLHHKCKNSRRQGCHQYVIHNNKCIPECPSGYTMNSSNLLCTPCLGPCPKVCHLLEGEKTIDSVTSAQELRGCTVINGSLIINIRGGNNLAAELEANLGLIEEISGYLKIRRSYALVSLSFFRKLRLIRGETLEIGNYSFYALDNQNLRQLWDWSKHNLTITQGKLFFHYNPKLCLSEIHKMEEVSGTKGRQERNDIALKTNGDQASCENELLKFSYIRTSFDKILLRWEPYWPPDFRDLLGFMLFYKEAPYQNVTEFDGQDACGSNSWTVVDIDPPLRSNDPKSQNHPGWLMRGLKPWTQYAIFVKTLVTFSDERRTYGAKSDIIYVQTDATNPSVPLDPISVSNSSSQIILKWKPPSDPNGNITHYLVFWERQAEDSELFELDYCLKGLKLPSRTWSPPFESEDSQKHNQSEYEDSAGECCSCPKTDSQILKELEESSFRKTFEDYLHNVVFVPRKTSSGTGAEDPRPSRKRRSLGDVGNVTVAVPTVAAFPNTSSTSVPTSPEEHRPFEKVVNKESLVISGLRHFTGYRIELQACNQDTPEERCSVAAYVSARTMPEAKADDIVGPVTHEIFENNVVHLMWQEPKEPNGLIVLYEVSYRRYGDEELHLCVSRKHFALERGCRLRGLSPGNYSVRIRATSLAGNGSWTEPTYFYVTDYLDVPSNIAKIIIGPLIFVFLFSVVIGSIYLFLRKRQPDGPLGPLYASSNPEYLSASDVFPCSVYVPDEWEVSREKITLLRELGQGSFGMVYEGNARDIIKGEAETRVAVKTVNESASLRERIEFLNEASVMKGFTCHHVVRLLGVVSKGQPTLVVMELMAHGDLKSYLRSLRPEAENNPGRPPPTLQEMIQMAAEIADGMAYLNAKKFVHRDLAARNCMVAHDFTVKIGDFGMTRDIYETDYYRKGGKGLLPVRWMAPESLKDGVFTTSSDMWSFGVVLWEITSLAEQPYQGLSNEQVLKFVMDGGYLDQPDNCPERVTDLMRMCWQFNPKMRPTFLEIVNLLKDDLHPSFPEVSFFHSEENKAPESEELEMEFEDMENVPLDRSSLLPSY

SEQ ID NO: 906961 - protein, 107 aa, Homo sapiens
SCNLWTLSAHHQLGEVGPWRLSLVAVNISVARQEAASSLSPTPNTDISVFGVGGEWGHELVCLLWGREGEGVRHKWPLCLVLKASISGNEAMFAANTFGCCEATWSV

SEQ ID NO: 906962 - protein, 751 aa, Homo sapiens
GGLRGRVGAHTRRTRGPQRSWGPPRSMTPAGQRRAPDPRRPRAPAAMGTGGRRGAAAAPLLVAVAALLLGAAGHLYPGEVCPGMDIRNNLTRLHELENCSVIEGHLQILLMFKTRPEDFRDLSFPKLIMITDYLLLFRVYGLESLKDLFPNLTVIRGSRLFFNYALVIFEMVHLKELGLYNLMNITRGSVRIEKNNELCYLATIDWSRILDSVEDNYIVLNKDDNEECGDICPGTAKGKTNCPATVINGQFVERCWTHSHCQKVCPTICKSHGCTAEGLCCHSECLGNCSQPDDPTKCVACRNFYLDGRCVETCPPPYYHFQDWRCVNFSFCQDLHHKCKNSRRQGCHQYVIHNNKCIPECPSGYTMNSSNLLCTPCLGPCPKVCHLLEGEKTIDSVTSAQELRGCTVINGSLIINIRGGNNLAAELEANLGLIEEISGYLKIRRSYALVSLSFFRKLRLIRGETLEIGNYSFYALDNQNLRQLWDWSKHNLTITQGKLFFHYNPKLCLSEIHKMEEVSGTKGRQERNDIALKTNGDQASCENELLKFSYIRTSFDKILLRWEPYWPPDFRDLLGFMLFYKEAPYQNVTEFDGQDACGSNSWTVVDIDPPLRSNDPKSQNHPGWLMRGLKPWTQYAIFVKTLVTFSDERRTYGAKSDIIYVQTDATNPSVPLDPISVSNSSSQIILKWKPPSDPNGNITHYLVFWERQAEDSELFELDYCLKGRSRKQGRSRKRQKQEAAEAGSGRSRKRV

SEQ ID NO: 906963 - protein, 294 aa, Homo sapiens
GGLRGRVGAHTRRTRGPQRSWGPPRSMTPAGQRRAPDPRRPRAPAAMGTGGRRGAAAAPLLVAVAALLLGAAGHLYPGEVCPGMDIRNNLTRLHELENCSVIEGHLQILLMFKTRPEDFRDLSFPKLIMITDYLLLFRVYGLESLKDLFPNLTVIRGSRLFFNYALVIFEMVHLKELGLYNLMNITRGSVRIEKNNELCYLATIDWSRILDSVEDNYIVLNKDDNEECGDICPGTAKGKTNCPATVINGQFVERCWTHSHCQKGTPGIQGSKQCLVPCSRKLKMFYGLKMLNGH

SEQ ID NO: 906964 - protein, 77 aa, Homo sapiens
DTCGLQVSEPSGLSNEVPSVLKGVGFVSTEKPLQALVPRTLGMTHLCDPWCLLRAGPAACQADASENPGVSLAFCMR

SEQ ID NO: 906965 - protein, 1428 aa, Homo sapiens; identical to SEQ ID NO: 906954

SEQ ID NO: 906966 - protein, 1428 aa, Homo sapiens; identical to SEQ ID NO: 906954

SEQ ID NO: 906967 - protein, 1428 aa, Homo sapiens; identical to SEQ ID NO: 906954

SEQ ID NO: 906968 - protein, 1082 aa, Homo sapiens
MSEGPWIPGHPPPLSLSLSLCSVLSLLCTPCLGPCPKVCHLLEGEKTIDSVTSAQELRGCTVINGSLIINIRGGNNLAAELEANLGLIEEISGYLKIRRSYALVSLSFFRKLRLIRGETLEIGNYSFYALDNQNLRQLWDWSKHNLTITQGKLFFHYNPKLCLSEIHKMEEVSGTKGRQERNDIALKTNGDQASCENELLKFSYIRTSFDKILLRWEPYWPPDFRDLLGFMLFYKEAPYQNVTEFDGQDACGSNSWTVVDIDPPLRSNDPKSQNHPGWLMRGLKPWTQYAIFVKTLVTFSDERRTYGAKSDIIYVQTDATNPSVPLDPISVSNSSSQIILKWKPPSDPNGNITHYLVFWERQAEDSELFELDYCLKGLKLPSRTWSPPFESEDSQKHNQSEYEDSAGECCSCPKTDSQILKELEESSFRKTFEDYLHNVVFVPRKTSSGTGAEDPRPSRKRRSLGDVGNVTVAVPTVAAFPNTSSTSVPTSPEEHRPFEKVVNKESLVISGLRHFTGYRIELQACNQDTPEERCSVAAYVSARTMPEAKADDIVGPVTHEIFENNVVHLMWQEPKEPNGLIVLYEVSYRRYGDEELHLCVSRKHFALERGCRLRGLSPGNYSVRIRATSLAGNGSWTEPTYFYVTDYLDVPSNIAKIIIGPLIFVFLFSVVIGSIYLFLRKRQPDGPLGPLYASSNPEYLSASDVFPCSVYVPDEWEVSREKITLLRELGQGSFGMVYEGNARDIIKGEAETRVAVKTVNESASLRERIEFLNEASVMKGFTCHHVVRLLGVVSKGQPTLVVMELMAHGDLKSYLRSLRPEAENNPGRPPPTLQEMIQMAAEIADGMAYLNAKKFVHRDLAARNCMVAHDFTVKIGDFGMTRDIYETDYYRKGGKGLLPVRWMAPESLKDGVFTTSSDMWSFGVVLWEITSLAEQPYQGLSNEQVLKFVMDGGYLDQPDNCPERVTDLMRMCWQFNPKMRPTFLEIVNLLKDDLHPSFPEVSFFHSEENKAPESEELEMEFEDMENVPLDRSSHCQREEAGGRDGGSSLGFKRSYEEHIPYTHMNGGKKNGRILTLPRSNPS

SEQ ID NO: 906969 - protein, 280 aa, Homo sapiens
MELMAHGDLKSYLRSLRPEAENNPGRPPPTLQEMIQMAAEIADGMAYLNAKKFVHRDLAARNCMVAHDFTVKIGDFGMTRDIYETDYYRKGGKGLLPVRWMAPESLKDGVFTTSSDMWSFGVVLWEITSLAEQPYQGLSNEQVLKFVMDGGYLDQPDNCPERVTDLMRMCWQFNPKMRPTFLEIVNLLKDDLHPSFPEVSFFHSEENKAPESEELEMEFEDMENVPLDRSSHCQREEAGGRDGGSSLGFKRSYEEHIPYTHMNGGKKNGRILTLPRSNPS

SEQ ID NO: 906970 - protein, 112 aa, Homo sapiens
IIAALPVCGPKVGRVTPPAPPPLFQENFKFYRLSFKMVFLVFFFSLIQAEGFFFSLQNEFLKLTNSCCFHILDKGLWSRRVLTCVCTCVCPLDTADVCAKYPCGVDALGIGS

SEQ ID NO: 906971 - protein, 1229 aa, Homo sapiens
GGLRGRVGAHTRRTRGPQRSWGPPRSMTPAGQRRAPDPRRPRAPAAMGTGGRRGAAAAPLLVAVAALLLGAAGHLYPGEVCPGMDIRNNLTRLHELENCSVIEGHLQILLMFKTRPEDFRDLSFPKLIMITDYLLLFRVYGLESLKDLFPNLTVIRGSRLFFNYALVIFEMVHLKELGLYNLMNITRGSVRIEKNNELCYLATIDWSRILDSVEDNYIVLNKDDNEECGDICPGTAKGKTNCPATVINGQFVERCWTHSHCQKVCPTICKSHGCTAEGLCCHSECLGNCSQPDDPTKCVACRNFYLDGRCVETCPPPYYHFQDWRCVNFSFCQDLHHKCKNSRRQGCHQYVIHNNKCIPECPSGYTMNSSNLLCTPCLGPCPKVCHLLEGEKTIDSVTSAQELRGCTVINGSLIINIRGGNNLAAELEANLGLIEEISGYLKIRRSYALVSLSFFRKLRLIRGETLEIGNYSFYALDNQNLRQLWDWSKHNLTITQGKLFFHYNPKLCLSEIHKMEEVSGTKGRQERNDIALKTNGDQASCENELLKFSYIRTSFDKILLRWEPYWPPDFRDLLGFMLFYKEAPYQNVTEFDGQDACGSNSWTVVDIDPPLRSNDPKSQNHPGWLMRGLKPWTQYAIFVKTLVTFSDERRTYGAKSDIIYVQTDATNPSVPLDPISVSNSSSQIILKWKPPSDPNGNITHYLVFWERQAEDSELFELDYCLKGLKLPSRTWSPPFESEDSQKHNQSEYEDSAGECCSCPKTDSQILKELEESSFRKTFEDYLHNVVFVPRKTSSGTGAEDPRPSRKRRSLGDVGNVTVAVPTVAAFPNTSSTSVPTSPEEHRPFEKVVNKESLVISGLRHFTGYRIELQACNQDTPEERCSVAAYVSARTMPEAKADDIVGPVTHEIFENNVVHLMWQEPKEPNGLIVLYEVSYRRYGDEELHLCVSRKHFALERGCRLRGLSPGNYSVRIRATSLAGNGSWTEPTYFYVTDYLDVPSNIAKIIIGPLIFVFLFSVVIGSIYLFLRKRQPDGPLGPLYASSNPEYLSASDVFPCSVYVPDEWEVSREKITLLRELGQGSFGMVYEGNARDIIKGEAETRVAVKTVNESASLRERIEFLNEASVMKGFTCHHVVRLLGVVSKGQPTLVVMELMAHGDLKSYLRSLRPEAENNPGRPPPTLQEMIQMAAEIADGMAYLNAKKFVHRDLAARNCMVAHDFTVKIGGSSGFLL

SEQ ID NO: 906972 - protein, 731 aa, Homo sapiens
GGLRGRVGAHTRRTRGPQRSWGPPRSMTPAGQRRAPDPRRPRAPAAMGTGGRRGAAAAPLLVAVAALLLGAAGHLYPGEVCPGMDIRNNLTRLHELENCSVIEGHLQILLMFKTRPEDFRDLSFPKLIMITDYLLLFRVYGLESLKDLFPNLTVIRGSRLFFNYALVIFEMVHLKELGLYNLMNITRGSVRIEKNNELCYLATIDWSRILDSVEDNYIVLNKDDNEECGDICPGTAKGKTNCPATVINGQFVERCWTHSHCQKVCPTICKSHGCTAEGLCCHSECLGNCSQPDDPTKCVACRNFYLDGRCVETCPPPYYHFQDWRCVNFSFCQDLHHKCKNSRRQGCHQYVIHNNKCIPECPSGYTMNSSNLLCTPCLGPCPKVCHLLEGEKTIDSVTSAQELRGCTVINGSLIINIRGGNNLAAELEANLGLIEEISGYLKIRRSYALVSLSFFRKLRLIRGETLEIGNYSFYALDNQNLRQLWDWSKHNLTITQGKLFFHYNPKLCLSEIHKMEEVSGTKGRQERNDIALKTNGDQASCENELLKFSYIRTSFDKILLRWEPYWPPDFRDLLGFMLFYKEAPYQNVTEFDGQDACGSNSWTVVDIDPPLRSNDPKSQNHPGWLMRGLKPWTQYAIFVKTLVTFSDERRTYGAKSDIIYVQTDATNPSVPLDPISVSNSSSQIILKWKPPSDPNGNITHYLVFWERQAEDSELFELDYCLKGRVQSSAPL

SEQ ID NO: 906973 - protein, 130 aa, Homo sapiens
MGTLQRKLLIPAGCRVYRARDENTGPRFPVHEAGSAPDPSDASTVRLLTCLAFCSFSLVVCPGMDIRNNLTRLHELENCSVIEGHLQILLMFKTRPEDFRDLSFPKLIMITDYLLLFRVYGLESLKDLFP

SEQ ID NO: 906974 - protein, 88 aa, Homo sapiens
DAWVDPRVRTVGRPQFARSLSAAPQLSDTADTMGFGDLKSPAGLQVLNDYLADKSYIEGYVPSQADVAVFEAVSSPPPADFVSCPTLV

SEQ ID NO: 906975 - protein, 111 aa, Homo sapiens
QFRRKWPQPRGRASSVISGASRAGSRHLREPWSVGRPQFARSLSAAPQLSDTADTMGFGDLKSPAGLQVLNDYLADKSYIEGYVPSQADVAVFEAVSSPPPADFVSCPTLV

SEQ ID NO: 906976 - protein, 78 aa, Homo sapiens
RSSAGSGPSLEAGRLRSSPALLGLVPVIFGSRGALGYSRHHGFRRPEKPCRPPGAQRLPGGQELHRGVCAITSRCGSI

SEQ ID NO: 906977 - protein, 69 aa, Homo sapiens
IRCSRGYNLCSDPPFAMPYVGIITSSLTKRKRPACQGVNESFGANMGPADVGKTLQESGATDSKDDDDI

SEQ ID NO: 906978 - protein, 77 aa, Homo sapiens
RSSAGSGPSLEAGRLRSSPALLGLVPVIFGSRGGTNLRHAYFINLLPNATKGPWTICGPFNSGPPIRTWRSGNAKVL

SEQ ID NO: 906979 - protein, 77 aa, Homo sapiens; identical to SEQ ID NO: 906978

SEQ ID NO: 906980 - protein, 77 aa, Homo sapiens; identical to SEQ ID NO: 906978

SEQ ID NO: 906981 - protein, 77 aa, Homo sapiens; identical to SEQ ID NO: 906978

SEQ ID NO: 906982 - protein, 77 aa, Homo sapiens; identical to SEQ ID NO: 906978

SEQ ID NO: 906983 - protein, 77 aa, Homo sapiens; identical to SEQ ID NO: 906978

SEQ ID NO: 906984 - protein, 111 aa, Homo sapiens; identical to SEQ ID NO: 906975

SEQ ID NO: 906985 - protein, 105 aa, Homo sapiens
SYAALEDTTYVLTHLLQFILLCGSAFLCSDPLLCSDPPLCSDPPQRGAPTICALSFCCSPALGYSRHHGFRRPEKPCRPPGAQRLPGGQELHRGVCAITSRCGSI

SEQ ID NO: 906986 - protein, 115 aa, Homo sapiens
LDLPFLTHRFRNDQLVPSQRLAQHNDTLEFDNLLPLIYPQSKAFKIKQLFKTLSDTADTMGFGDLKSPAGLQVLNDYLADKSYIEGYVPSQADVAVFEAVSSPPPADFVSCPTLV

SEQ ID NO: 906987 - protein, 77 aa, Homo sapiens; identical to SEQ ID NO: 906978

SEQ ID NO: 906988 - protein, 77 aa, Homo sapiens; identical to SEQ ID NO: 906978

SEQ ID NO: 906989 - protein, 77 aa, Homo sapiens; identical to SEQ ID NO: 906978

SEQ ID NO: 906990 - protein, 69 aa, Homo sapiens
RARCFLSGYGANDEAPHKVLAREVPEYIRDGTRSRKPWKRPVAVLEVAQRITVLGRVILDRCGMLLLQN

SEQ ID NO: 906991 - protein, 160 aa, Homo sapiens
EDSCPLIIVILILIQTCPFVIRCAGLRLLLLPSQELLKNLKLLNKVQAVLAKNSASETLRMSLSNGLGICVCPFLSGVWYRPRRSRYMCLWTRMFMNIQPTACRLCVMPYVGIITSSLTKRKRPACQGVNESFGANMGPADVGKTLQESGATDSKDDDDI

SEQ ID NO: 906992 - protein, 117 aa, Homo sapiens
MSLICCCLLSYCGSADDWCLGLSCKCPAGARGAHGMNWSDNELLKAYVPFISRSASDSQSCITAHRLPTVCHALRWYNHIKSYEKEKASLPGSERKLWGKYGSCRCWEDTTGKWSYR

SEQ ID NO: 906993 - protein, 77 aa, Homo sapiens; identical to SEQ ID NO: 906978

SEQ ID NO: 906994 - protein, 77 aa, Homo sapiens; identical to SEQ ID NO: 906978

SEQ ID NO: 906995 - protein, 77 aa, Homo sapiens; identical to SEQ ID NO: 906978

SEQ ID NO: 906996 - protein, 78 aa, Homo sapiens; identical to SEQ ID NO: 906976

SEQ ID NO: 906997 - protein, 78 aa, Homo sapiens; identical to SEQ ID NO: 906976

SEQ ID NO: 906998 - protein, 78 aa, Homo sapiens; identical to SEQ ID NO: 906976

SEQ ID NO: 906999 - protein, 100 aa, Homo sapiens
DVQILMTSAGYTGYIFKQDPKFGRKGQFTPHKTPQAFRCQGAWCSHMENLPPTPIPLIPDPLNPCSPFIPRLAQYESKKAKKTLHLLPKSSILLDVKPLG

SEQ ID NO: 907000 - protein, 78 aa, Homo sapiens; identical to SEQ ID NO: 906976

SEQ ID NO: 907001 - protein, 78 aa, Homo sapiens; identical to SEQ ID NO: 906976

SEQ ID NO: 907002 - protein, 70 aa, Homo sapiens
  misc_feature (7)..(7): Xaa can be any naturally occurring amino acid
ITVLHTXTRGSLKNANLMPYVGIITSSLTKRKRPACQGVNESFGANMGPADVGKTLQESGATDSKDDDDI

SEQ ID NO: 907003 - protein, 77 aa, Homo sapiens; identical to SEQ ID NO: 906978

SEQ ID NO: 907004 - protein, 77 aa, Homo sapiens; identical to SEQ ID NO: 906978

SEQ ID NO: 907005 - protein, 77 aa, Homo sapiens; identical to SEQ ID NO: 906978

SEQ ID NO: 907006 - protein, 77 aa, Homo sapiens; identical to SEQ ID NO: 906978

SEQ ID NO: 907007 - protein, 77 aa, Homo sapiens; identical to SEQ ID NO: 906978

SEQ ID NO: 907008 - protein, 95 aa, Homo sapiens
SYAALEDTTYVLTHLLHVGRPQFARSLSAAPQLSDTADTMGFGDLKSPAGLQVLNDYLADKSYIEGYVPSQADVAVFEAVSSPPPADFVSCPTLV

SEQ ID NO: 907009 - protein, 77 aa, Homo sapiens; identical to SEQ ID NO: 906978

SEQ ID NO: 907010 - protein, 77 aa, Homo sapiens; identical to SEQ ID NO: 906978

SEQ ID NO: 907011 - protein, 77 aa, Homo sapiens; identical to SEQ ID NO: 906978

SEQ ID NO: 907012 - protein, 77 aa, Homo sapiens; identical to SEQ ID NO: 906978

SEQ ID NO: 907013 - protein, 114 aa, Homo sapiens
QPPQDDRLHFLGWGQLRVPEITWSVLPSQFMPCHKPLPRCHVLRGLPAAPARQPTACRLCVMPYVGIITSSLTKRKRPACQGVNESFGANMGPADVGKTLQESGATDSKDDDDI

SEQ ID NO: 907014 - protein, 101 aa, Homo sapiens
HEGHIHGLHIVLKSSDLLLQHICSNFIIFNYTLYLKFLNQPTACRLCVMPYVGIITSSLTKRKRPACQGVNESFGANMGPADVGKTLQESGATDSKDDDDI

SEQ ID NO: 907015 - protein, 77 aa, Homo sapiens; identical to SEQ ID NO: 906978

SEQ ID NO: 907016 - protein, 77 aa, Homo sapiens; identical to SEQ ID NO: 906978

SEQ ID NO: 907017 - protein, 77 aa, Homo sapiens; identical to SEQ ID NO: 906978

SEQ ID NO: 907018 - protein, 77 aa, Homo sapiens; identical to SEQ ID NO: 906978

SEQ ID NO: 907019 - protein, 157 aa, Homo sapiens
MPLFQSHLYSRQPCGVRCTGPAYRCRKRDVLPSDKVTWLFSNTDKAPRQGTRGRRGQQLAVAADVCPQLHHSSLWLCRARGFSVRVSMCLPFRSSQLVCLAVPGLCSVSPLLRAPPPRFLSPEAVGWAPMNCSSMLRCPCCLPLYKETASEKKRKSR

SEQ ID NO: 907020 - protein, 424 aa, Homo sapiens
LGMGRGLWEAWPPAGSSAVAKGNCREEAEGAEDRQPASRRGAGTTAAMAASGPGCRSWCLCPEVPSATFFTALLSLLVSGPRLFLLQQPLAPSGLTLKSEALRNWQVYRLVTYIFVYENPISLLCGAIIIWRFAGNFERTVGTVRHCFFTVIFAIFSAIIFLSFEAVSSLSKLGEVEDARGFTPVAFAMLGVTTVRSRMRRALVFGMVVPSVLVPWLLLGASWLIPQTSFLSNVCGLSIGLAYGLTYCYSIDLSERVALKLDQTFPFSLMRRISVFKYVSGSSAERRAAQSRKLNPVPGSYPTQSCHPHLSPSHPVSQTQHASGQKLASWPSCTPGHMPTLPPYQPCLRPVLCAEPLWSKPHLLQCLPSFCGHLPGHPAPHACEQPWHGVFWGLGHTRGCRLQGVLQGPHALREFLGKSSHLAF

SEQ ID NO: 907021 - protein, 110 aa, Homo sapiens
LGMGRGLWEAWPPAGSSAVAKGNCREEAEGAEDRQPASRRGAGTTAAMAASGPGCRSWCLCPEVPSATFFTALLSLLVSGPRLFLCRLQGVLQGPHALREFLGKSSHLAF

SEQ ID NO: 907022 - protein, 182 aa, Homo sapiens
PCGVRCTGPAYRCRKRDVLPSDKVTWLFSNTDKAPRQGTRGRRGQQLAVAADVCPQLHHSSLWLCRARGFSVRVSSVRHCFFTVIFAIFSAIIFLSFEAVSSLSKLGEVEDARGFTPVAFAMLGVTTVRSRMRRALVFGMVVPSVLVPWLLLGASWLIPQTSFLSNVCGLSIGLACILPSRE

SEQ ID NO: 907023 - protein, 236 aa, Homo sapiens
MLGVTTVRSRMRRALVFGMVVPSVLVPWLLLGASWLIPQTSFLSNVCGLSIGLAYGLTYCYSIDLSERVALKLDQTFPFSLMRRISVFKYVSGSSAERRAAQSRKLNPVPGSYPTQSCHPHLSPSHPVSQTQHASGQKLASWPSCTPGHMPTLPPYQPCLRPVLCAEPLWSKPHLLQCLPSFCGHLPGHPAPHACEQPWHGVFWGLGHTRGCRLQGVLQGPHALREFLGKSSHLAF

SEQ ID NO: 907024 - protein, 339 aa, Homo sapiens
LGMGRGLWEAWPPAGSSAVAKGNCREEAEGAEDRQPASRRGAGTTAAMAASGPGCRSWCLCPEVPSATFFTALLSLLVSGPRLFLLQQPLAPSGLTLKSEALRNWQVYRLVTYIFVYENPISLLCGAIIIWRFAGNFERTVGTVRHCFFTVIFAIFSAIIFLSFEAVSSLSKLGEVEDARGFTPVAFAMLGVTTVRSRMRRALVFGMVVPSVLVPWLLLGASWLIPQTSFLSNVCGLSIGLAYGLTYCYSIDLSERVALKLDQTFPFSLMRRISVFKYVSGSSAERRAAQSRKLNPVPGSYPTQSCHPHLSPSASSKLLVKAHQDAQRHVAAGTHSGYR

SEQ ID NO: 907025 - protein, 289 aa, Homo sapiens
LGMGRGLWEAWPPAGSSAVAKGNCREEAEGAEDRQPASRRGAGTTAAMAASGPGCRSWCLCPEVPSATFFTALLSLLVSGPRLFLLQQPLAPSGLTLKSEALRNWQVYRLVTYIFVYENPISLLCGAIIIWRFAGNFERTVGTVRHCFFTVIFAIFSAIIFLSFEAVSSLSKLGEVEDARGFTPVAFAMLGVTTVRSRMRRALVFGMVVPSVLVPWLLLGASWLIPQTSFLSNVCGLSIGLAYGLTYCYSIDLSPAAGAPTPIPLPRSGGMGPHELQQHAEVSMLSAFV

SEQ ID NO: 907026 - protein, 424 aa, Homo sapiens; identical to SEQ ID NO: 907020

SEQ ID NO: 907027 - protein, 348 aa, Homo sapiens
LGMGRGLWEAWPPAGSSAVAKGNCREEAEGAEDRQPASRRGAGTTAAMAASGPGCRSWCLCPEVPSATFFTALLSLLVSGPRLFLLQQPLAPSGLTLKSEALRNWQVYRLVTYIFVYENPISLLCGAIIIWRFAGNFERTVGTVRHCFFTVIFAIFSAIIFLSFEAVSSLSKLGEVEDARGFTPVAFAMLGVTTVRSRMRRALVFGMVVPSVLVPWLLLGASWLIPQTSFLSNVCGLSIGLAYGLTYCYSIDLSERVALKLDQTFPFSLMRRISVFKYVSGSSAERRAAQSRKMNPVAGSYTKKRLQLTGSKAPVSRATAWSKAGPGLLEPGDGPCPANMHSWYRDTI

SEQ ID NO: 907028 - protein, 424 aa, Homo sapiens; identical to SEQ ID NO: 907020

SEQ ID NO: 907029 - protein, 155 aa, Homo sapiens
MRRISVFKYVSGSSAERRAAQSRKLNPVPGSYPTQSCHPHLSPSHPVSQTQHASGQKLASWPSCTPGHMPTLPPYQPCLRPVLCAEPLWSKPHLLQCLPSFCGHLPGHPAPHACEQPWHGVFWGLGHTRGCRLQGVLQGPHALREFLGKSSHLAF

SEQ ID NO: 907030 - protein, 293 aa, Homo sapiens
LGMGRGLWEAWPPAGSSAVAKGNCREEAEGAEDRQPASRRGAGTTAAMAASGPGCRSWCLCPEVPSATFFTALLSLLVSGPRLFLLQQPLAPSGLTLKSEALRNWQVYRLVTYIFVYENPISLLCGAIIIWRFAGNFERTVGTVRHCFFTVIFAIFSAIIFLSFEAVSSLSKLGEVEDARGFTPVAFAMLGVTTVRSRMRRALVFGMVVPSVLVPWLLLGASWLIPQTSFLSNVCGLSIGLAYGLTYCYSIDLSERVALKLDQTFPFSLMRRISVFKYVSGSSAERRAAQSRK

SEQ ID NO: 907031 - protein, 271 aa, Homo sapiens
MAGLEVLFASAAPAITCRQDALVCFLHWEVVTHGYCGLGVGDQPGPNDKKSELLPAGWNNNKDLYVLRYEYKDGSRKLLVKAITVESSMILNVLEYGSQQVADLTLNLDDYIDAEHLGDFHRTYKNSEELRSRIVSGIITPIHEQWEKANVSSPHREFPPATAREVDPLRIPPHHPHTSRQPPWCDPLGPFVVGGEDLDPFGPRRGGMIVDPLRSGFPRALIDPSSGLPNRLPPGAVPPGARFDPFGPIGTSPPGPNPDHLPPPGYDDMYL

SEQ ID NO: 907032 - protein, 271 aa, Homo sapiens; identical to SEQ ID NO: 907031

SEQ ID NO: 907033 - protein, 271 aa, Homo sapiens; identical to SEQ ID NO: 907031

SEQ ID NO: 907034 - protein, 271 aa, Homo sapiens; identical to SEQ ID NO: 907031

SEQ ID NO: 907035 - protein, 271 aa, Homo sapiens; identical to SEQ ID NO: 907031

SEQ ID NO: 907036 - protein, 271 aa, Homo sapiens; identical to SEQ ID NO: 907031

SEQ ID NO: 907037 - protein, 183 aa, Homo sapiens
MILNVLEYGSQQVADLTLNLDDYIDAEHLGDFHRTYKNSEELRSRIVSGIITPIHEQWEKANVSSPHREFPPATAREVDPLRIPPHHPHTSRQPPWCDPLGPFVVGGEDLDPFGPRRGGMIVDPLRSGFPRALIDPSSGLPNRLPPGAVPPGARFDPFGPIGTSPPGPNPDHLPPPGYDDMYL

SEQ ID NO: 907038 - protein, 152 aa, Homo sapiens
MCWTYKNSEELRSRIVSGIITPIHEQWEKANVSSPHREFPPATAREVDPLRIPPHHPHTSRQPPWCDPLGPFVVGGEDLDPFGPRRGGMIVDPLRSGFPRALIDPSSGLPNRLPPGAVPPGARFDPFGPIGTSPPGPNPDHLPPPGYDDMYL

SEQ ID NO: 907039 - protein, 195 aa, Homo sapiens
AWVVNRPRVESSMILNVLEYGSQQVADLTLNLDDYIDAEHLGDFHRTYKNSEELRSRIVSGIITPIHEQWEKANVSSPHREFPPATAREVDPLRIPPHHPHTSRQPPWCDPLGPFVVGGEDLDPFGPRRGGMIVDPLRSGFPRALIDPSSGLPNRLPPGAVPPGARFDPFGPIGTSPPGPNPDHLPPPGYDDMYL

SEQ ID NO: 907040 - protein, 222 aa, Homo sapiens
MPKKLGPKSQRQRGAVAPLTQVQQAACSPTYKQAKRNARSYQGRRRRRRCSQNTTSRVPSQLQAVDSSSASCRTYKNSEELRSRIVSGIITPIHEQWEKANVSSPHREFPPATAREVDPLRIPPHHPHTSRQPPWCDPLGPFVVGGEDLDPFGPRRGGMIVDPLRSGFPRALIDPSSGLPNRLPPGAVPPGARFDPFGPIGTSPPGPNPDHLPPPGYDDMYL

SEQ ID NO: 907041 - protein, 245 aa, Homo sapiens
MAGLEVLFASAAPAITCRQDALVCFLHWEVVTHGYCGLGVGDQPGPNDKKSELLPAGWNNNKDLYVLRYEYKDGSRKLLVKAITVESSMILNVLEYGSQQVADLTLNLDDYIDAEHLGDFHRTYKNSEELRSRIVSGIITPIHEQWEVDPLRIPPHHPHTSRQPPWCDPLGPFVVGGEDLDPFGPRRGGMIVDPLRSGFPRALIDPSSGLPNRLPPGAVPPGARFDPFGPIGTSPPGPRPDRRGQ

SEQ ID NO: 907042 - protein, 172 aa, Homo sapiens
MAGLEVLFASAAPAITCRQDALVCFLHWEVVTHGYCGLGVGDQPGPNDKKSELLPAGWNNNKDLYVLRYEYKDGSRKLLVKAITVESSMILNVLEYGSQQVADLTLNLDDYIDAEHLGDFHRTYKNSEELRSRIVSGIITPIHEQWEKANVSSPHREFPPATAREVDPLRIP

SEQ ID NO: 907043 - protein, 204 aa, Homo sapiens
MAGLEVLFASAAPAITCRQDALVCFLHWEVVTHGYCGLGVGDQPGPNDKKSELLPAGWNNNKDLYVLRYEYKDGSRKLLVKAITVESSMILNVLEYGSQQVADLTLNLDDYIDAEHLGDFHRTYKNSEELRSRIVSGIISNHVLAPFDLPQRMVTHQHFIHFWLTGKCLQEGTQSPRPLELFSAGALSLTAFGQGGMNKGYRLQ

SEQ ID NO: 907044 - protein, 99 aa, Homo sapiens
RGFPAPPRPRASPFWSQVWTRQEPAQEGSGVIATPAAEPAHCTTPAPFFPPDAEVAGAHGGPGGTVRIGSAGHHLQAGRARLLLALGSGDTRLLRLGCR

SEQ ID NO: 907045 - protein, 271 aa, Homo sapiens; identical to SEQ ID NO: 907031

SEQ ID NO: 907046 - protein, 271 aa, Homo sapiens; identical to SEQ ID NO: 907031

SEQ ID NO: 907047 - protein, 263 aa, Homo sapiens [sequence omitted]

SEQ ID NO: 907048 - protein, 271 aa, Homo sapiens; identical to SEQ ID NO: 907031

SEQ ID NO: 907049 - protein, 233 aa, Homo sapiens
MAGLEPGPNDKKSELLPAGWNNNKDLYVLRYEYKDGSRKLLVKAITVESSMILNVLEYGSQQVADLTLNLDDYIDAEHLGDFHRTYKNSEELRSRIVSGIITPIHEQWEKANVSSPHREFPPATAREVDPLRIPPHHPHTSRQPPWCDPLGPFVVGGEDLDPFGPRRGGMIVDPLRSGFPRALIDPSSGLPNRLPPGAVPPGARFDPFGPIGTSPPGPNPDHLPPPGYDDMYL

SEQ ID NO: 907050 - protein, 288 aa, Homo sapiens
MAGLEVLFASAAPAITCRQDALVCFLHWEVVTHGYCGLGVGDQPGPNDKKSELLPAGWNNNKDLYVLRYEYKDGSRKLLVKAITVESSMILNVLEYGSQQVADLTLNLDDYIDAEHLGDFHRTYKNSEELRSRIVSGIITPIHEQWEKANVSSPHREFPPATAREVDPLRIPPHHPHTSRQPPWCDPLGPFVVGGEDLDPFGPRRGGMIVDPLRSGFPRALIDPSSGLPNRLPPGAVPPGARFDPFGPIGTSPPGPNPDHLPPPGYDDMYLMTLASSRRRRAVPRRRR

SEQ ID NO: 907051 - protein, 253 aa, Homo sapiens
MAGLEVLFASAAPAITCRQDALVCFLHWEVVTHGYCGLGVGDQPGPNDKKSELLPAGWNNNKDLYVLRYEYKDGSRKLLVKAITVESSMILNVLEYGSQQVADLTLNLDDYIDAEHLGDFHRTYKNSEELRSRIVSGIITPIHEQWEVDPLRIPPHHPHTSRQPPWCDPLGPFVVGGEDLDPFGPRRGGMIVDPLRSGFPRALIDPSSGLPNRLPPGAVPPGARFDPFGPIGTSPPGPNPDHLPPPGYDDMYL

SEQ ID NO: 907052 - protein, 121 aa, Homo sapiens
MSTPHREFPPATAREVDPLRIPPHHPHTSRQPPWCDPLGPFVVGGEDLDPFGPRRGGMIVDPLRSGFPRALIDPSSGLPNRLPPGAVPPGARFDPFGPIGTSPPGPNPDHLPPPGYDDMYL

SEQ ID NO: 907053 - protein, 69 aa, Homo sapiens
TLYFHRYRPRRGGMIVDPLRSGFPRALIDPSSGLPNRLPPGAVPPGARFDPFGPIGTSPPGPRPDRRGQ

SEQ ID NO: 907054 - protein, 143 aa, Homo sapiens
  misc_feature (100)..(100): Xaa can be any naturally occurring amino acid
  misc_feature (102)..(102): Xaa can be any naturally occurring amino acid
  misc_feature (104)..(104): Xaa can be any naturally occurring amino acid
  misc_feature (111)..(111): Xaa can be any naturally occurring amino acid
  misc_feature (114)..(114): Xaa can be any naturally occurring amino acid
  misc_feature (121)..(123): Xaa can be any naturally occurring amino acid
  misc_feature (131)..(131): Xaa can be any naturally occurring amino acid
  misc_feature (137)..(137): Xaa can be any naturally occurring amino acid
  misc_feature (141)..(142): Xaa can be any naturally occurring amino acid
MAGLEVLFASAAPAITCRQDALVCFLHWEVVTHGYCGLGVGDQPGPNDKKSELLPAGWNNNKDLYVLRYEYKDGSRKLLVKAITVESSMILNVLVEYRVXGXGXFTRADTXMIXSAIAQAXXXSLPTGASXAHSAGXLRVXXT

SEQ ID NO: 907055 - protein, 419 aa, Homo sapiens
GRVGRPTRRHASRLRHPQPHLPEGARAAASSVCGSEPELCLWLRLLTGCAQGAVTMPHSYPALSAEQKKELSDIALRIVAPGKGILAADESVGSMAKRLSQIGVENTEENRRLYRQVLFSADDRVKKCIGGVIFFHETLYQKDDNGVPFVRTIQDKGIVVGIKVDKGVVPLAGTDGETTTQGLDGLSERCAQYKKDGADFAKWRCVLKISERTPSALAILENANVLARYASICQQNGIVPIVEPEILPDGDHDLKRCQYVTEKVLAAVYKALSDHHVYLEGTLLKPNMVTPGHACPIKYTPEEIAMATVTALRRTVPPAVPGVTFLSGGQSEEEASFNLNAINRCPLPRPWALTFSYGRALQASALNAWRGQRDNAGAATEEFIKRAEVNGLAAQGKYEGSGEDGGAAAQSLYIANHAY

SEQ ID NO: 907056 - protein, 419 aa, Homo sapiens; identical to SEQ ID NO: 907055

SEQ ID NO: 907057 - protein, 364 aa, Homo sapiens
MPHSYPALSAEQKKELSDIALRIVAPGKGILAADESVGSMAKRLSQIGVENTEENRRLYRQVLFSADDRVKKCIGGVIFFHETLYQKDDNGVPFVRTIQDKGIVVGIKVDKGVVPLAGTDGETTTQGLDGLSERCAQYKKDGADFAKWRCVLKISERTPSALAILENANVLARYASICQQNGIVPIVEPEILPDGDHDLKRCQYVTEKVLAAVYKALSDHHVYLEGTLLKPNMVTPGHACPIKYTPEEIAMATVTALRRTVPPAVPGVTFLSGGQSEEEASFNLNAINRCPLPRPWALTFSYGRALQASALNAWRGQRDNAGAATEEFIKRAEVNGLAAQGKYEGSGEDGGAAAQSLYIANHAY

SEQ ID NO: 907058 - protein, 396 aa, Homo sapiens
MGRPTRRPRVADAWSTHASARAAASSVCGSEPELCLWLRLLTGCAQGAVTMPHSYPALSAEQKKELSDIALRIVAPGKGILAADESVGSMAKRLSQIGVENTEENRRLYRQVLFSADDRVKKCIGGVIFFHETLYQKDDNGVPFVRTIQDKGIVVGIKVDKGVVPLAGTDGETTTQGLDGLSERCAQYKKDGADFAKWRCVVLARYASICQQNGIVPIVEPEILPDGDHDLKRCQYVTEKVLAAVYKALSDHHVYLEGTLLKPNMVTPGHACPIKYTPEEIAMATVTALRRTVPPAVPGVTFLSGGQSEEEASFNLNAINRCPLPRPWALTFSYGRALQASALNAWRGQRDNAGAATEEFIKRAEVNGLAAQGKYEGSGEDGGAAAQSLYIANHAY

SEQ ID NO: 907059 - protein, 299 aa, Homo sapiens
GRVGRPTRRHASRLRHPQPHLPEGARAAASSVCGSEPELCLWLRLLTGCAQGAVTMPHSYPALSAEQKKELSDIALRIVAPGKGILAADESVGSMAKRLSQIGVENTEENRRLYRQVLFSADDRVKKCIGGVIFFHETLYQKDDNGVPFVRTIQDKGIVVGIKVDKGVVPLAGTDGETTTQGLDGLSERCAQYKKDGADFAKWRCVLKISERTPSALAILENANVLARYASICQQNGIVPIVEPEILPDGDHDLKRCQYVTEKVLAAVYKALSDHHVYAPGTIGWEDREPLMTEGRRNC

SEQ ID NO: 907060 - protein, 168 aa, Homo sapiens
  misc_feature (45)..(45): Xaa can be any naturally occurring amino acid
SKGSNLVVNLKHNGEIGQAIKGMDIRKARKYLKDVILQKQCVPFXRYNGGVGRCAQAKQWGWTQGWWPKKSAEFLLHMLKNAESNAELKGLDVDSLVIEHIQVNKAPKMRRRTYRAHGRINPYMSSPCHIEMILTEKEQIVPKPEEEVAQKKKISQKKLKKQKLMARE

SEQ ID NO: 907061 - protein, 419 aa, Homo sapiens; identical to SEQ ID NO: 907055

SEQ ID NO: 907062 - protein, 414 aa, Homo sapiens
MGRPTRRPRVADAWSTHASARAAASSVCGSEPELCLWLRLLTGCAQGAVTMPHSYPALSAEQKKELSDIALRIVAPGKGILAADESVGSMAKRLSQIGVENTEENRRLYRQVLFSADDRVKKCIGGVIFFHETLYQKDDNGVPFVRTIQDKGIVVGIKVDKGVVPLAGTDGETTTQGLDGLSERCAQYKKDGADFAKWRCVLKISERTPSALAILENANVLARYASICQQNGIVPIVEPEILPDGDHDLKRCQYVTEKVLAAVYKALSDHHVYLEGTLLKPNMVTPGHACPIKYTPEEIAMATVTALRRTVPPAVPGVTFLSGGQSEEEASFNLNAINRCPLPRPWALTFSYGRALQASALNAWRGQRDNAGAATEEFIKRAEVNGLAAQGKYEGSGEDGGAAAQSLYIANHAY

SEQ ID NO: 907063 - protein, 364 aa, Homo sapiens; identical to SEQ ID NO: 907057

SEQ ID NO: 907064 - protein, 197 aa, Homo sapiens
MEMMVRYVSIWQQNGIVPIVEPEILPDGDHDLKRCQYVTEKVLAAVYKALSDHHVYLEGTLLKPNMVTPGHACPIKYTPEEIAMATVTALRRTVPPAVPGVTFLSGGQSEEEASFNLNAINRCPLPRPWALTFSYGRALQASALNAWRGQRDNAGAATEEFIKRAEVNGLAAQGKYEGSGEDGGAAAQSLYIANHAY

SEQ ID NO: 907065 - protein, 82 aa, Homo sapiens
GRVGRPTRRPRVADAWSTHASARAAASSVCGSEPELCLWLRLLTGCAQCLPFSLPFPSLIAAPGTIGWEDREPLMTEGRRNC

SEQ ID NO: 907066 - protein, 391 aa, Homo sapiens
MDSLGAVSTRLGFDLFKELKKTNDGNIFFSPVGILTAIGMVLLGTRGATASQLEEVFHSEKETKSSRIKAEEKEVIENTEAVHQQFQKFLTEISKLTNDYELNITNRLFGEKTYLFLQKYLDYVEKYYHASLEPVDFVNAADESRKKINSWVESKTNEKIKDLFPDGSISSSTKLVLVNMVYFKGQWDREFKKENTKEEKFWMNKSTSKSVQMMTQSHSFSFTFLEDLQAKILGIPYKNNDLSMFVLLPNDIDGLEKIIDKISPEKLVEWTSPGHMEERKVNLHLPRFEVEDGYDLEAVLAAMGMGDAFSEHKADYSGMSSGSGLYAQKFLHSSFVAVTEEGTEAAAATGIGFTVTSAPGHENVHCNHPFLFFIRHNESNSILFFGRFSSP

SEQ ID NO: 907067 - protein, 107 aa, Homo sapiens
MDSLGAVSTRLGFDLFKELKKTNDGNIFFSPVGILTAIGMVLLGTRGATASQLEEVFHSEKETKSSRIKAEEKEVVRIKAEGKEVGRCVLQTSVELHFRCGVSGEKD

SEQ ID NO: 907068 - protein, 279 aa, Homo sapiens
MDSLGAVSTRLGFDLFKELKKTNDGNIFFSPVGILTAIGMVLLGTRGATASQLEEVFHSEKETKSSRIKAEEKEVIENTEAVHQQFQKFLTEISKLTNDYELNITNRLFGEKTYLFLQKYLDYVEKYYHASLEPVDFVNAADESRKKINSWVESKTNEKIKDLFPDGSISSSTKLVLVNMVYFKGQWDREFKKENTKEEKFWMNKSTSKSVQMMTQSHSFSFTFLEDLQAKILGIPYKNNDLSMFVLLPNDIDGLEKVNAYTSLFFLSFPKAFCLRASE

SEQ ID NO: 907069 - protein, 391 aa, Homo sapiens; identical to SEQ ID NO: 907066

SEQ ID NO: 907070 - protein, 463 aa, Homo sapiens
MDSLGAVSTRLGFDLFKELKKTNDGNIFFSPVGILTAIGMVLLGTRGATASQLEEVFHSEKETKSSRIKAEEKEVIENTEAVHQQFQKFLTEISKLTNDYELNITNRLFGEKTYLFLQKYLDYVEKYYHASLEPVDFVNAADESRKKINSWVESKTNDVETEATESLNNLPKIPQLIRGKLDANRGILTPESGLLTMNLNLSTGINEAMGKMRTSPSILPANPLSARPSEKIKDLFPDGSISSSTKLVLVNMVYFKGQWDREFKKENTKEEKFWMNKSTSKSVQMMTQSHSFSFTFLEDLQAKILGIPYKNNDLSMFVLLPNDIDGLEKIIDKISPEKLVEWTSPGHMEERKVNLHLPRFEVEDGYDLEAVLAAMGMGDAFSEHKADYSGMSSGSGLYAQKFLHSSFVAVTEEGTEAAAATGIGFTVTSAPGHENVHCNHPFLFFIRHNESNSILFFGRFSSP

SEQ ID NO: 907071 - protein, 87 aa, Homo sapiens [sequence omitted]

SEQ ID NO: 907072 - protein, 289 aa, Homo sapiens
VRWHSRNLGSSDVPGGKMSSLPRRAKVQVQDVVLKDEFSSFSELSSASEEDDKEDSAWEPQKKVPRSRKQPPPKESKPKRMPRVKKNAPQISDGSEVVVVKEELNSSVAIADTALEDRKNKLDTVQTLKTAKTKQKCAAQPHTVRRTKKLKVEEETSKASNLEGESNSSETPSTSTVWGGTCKKEENDDDFTFGQSALKKIKTETYPQGQPVKFPANANSTKEEVEMNWDMVQVLSERTNIEPWVCANIIRLFNDDNTIPFIIRYRKELINNLDADSLREVQQTLEELR

SEQ ID NO: 907073 - protein, 1151 aa, Homo sapiens
MLRRVTVAAVCATRRKLCEAGRDVAALWGIETRGRCEDSAAARPFPILAMPGRNKAKSTCSCPDLQPNGQDLGENSRVARLGADESEEEGRRGSLSNAGDPEIVKSPSDPKQYRYIKLQNGLQALLISDLSNMEGKTGNTTDDEEEEEVEEEEEDDDEDSGAEIEDDDEEGFDDEDEFDDEHDDDLDTEDNELEELEERAEARKKTTEKQSAAALCVGVGSFADPDDLPGLAHFLEHMVFMGSLKYPDENGFDAFLKKHGGSDNASTDCERTVFQFDVQRKYFKEALDRWAQFFIHPLMIRDAIDREVEAVDSEYQLARPSDANRKEMLFGSLARPGHPMGKFFWGNAETLKHEPRKNNIDTHARLREFWMRYYSSHYMTLVVQSKETLDTLEKWVTEIFSQIPNNGLPRPNFGHLTDPFDTPAFNKLYRVVPIRKIHALTITWALPPQQQHYRVKPLHYISWLVGHEGKGSILSFLRKKCWALALFGGNGETGFEQNSTYSVFSISITLTDEGYEHFYEVAYTVFLYLKMLQKLGPEKRIFEEIRKIEDNEFHYQEQTDPVEYVENMCENMQLYPLQDILTGDQLLFEYKPEVIGEALNQLVPQKANLVLLSGANEGKCDLKEKWFGTQYSIEDIENSWAELWNSNFELNPDLHLPAENKYIATDFTLKAFDCPETEYPVKIVNTPQGCLWYKKDNKFKIPKAYIRFHLISPLIQKSAANVVLFDIFVNILTHNLAEPAYEADVAQLEYKLAAGEHGLIIRVKGFNHKLPLLFQLIIDYLAEFNSTPAVFTMITEQLKKTYFNILIKPETLAKDVRLLILEYARWSMIDKYQALMDGLSLESLLSFVKEFKSQLFVEGLVQGNVTSTESMDFLKYVVDKLNFKPLEQEMPVQFQVVELPSGHHLCKVKALNKGDANSEVTVYYQSGTRSLREYTLMELLVMHMEEPCFDFLRTKQTLGYHVYPTCRNTSGILGFSVTVGTQATKYNSEVVDKKIEEFLSSFEEKIENLTEEAFNTQVTALIKLKECEDTHLGEEVDRNWNEVVTQQYLFDRLAHEIEALKSFSKSDLVNWFKAHRGPGSKMLSVHVVGYGKYELEEDGSPSSEDSNSSCEVMQLTYLPTSPLLADCIIPITDIRAFTTTLNLLPYHKIVK

SEQ ID NO: 907074 - protein, 206 aa, Homo sapiens
MEILFDFIDQEDLGYHVYPTCRNTSGILGFSVTVGTQATKYNSEVVDKKIEEFLSSFEEKIENLTEEAFNTQVTALIKLKECEDTHLGEEVDRNWNEVVTQQYLFDRLAHEIEALKSFSKSDLVNWFKAHRGPGSKMLSVHVVGYGKYELEEDGTPSSEDSNSSCEVMQLTYLPTSPLLADCIIPITDIRAFTTTLNLLPYHKIVK

SEQ ID NO: 907075 - protein, 130 aa, Homo sapiens
MLRRVTVAAVCATRRKLCEAGRELAALWGIETRGRCEDSAAARPFPILAMPGRNKAKSTCSCPDLQPNGQDLGENSRVARLGADESEEEGRRGSLSNAGDPEIVKSPSDPKQYREMISLCHPGCTAVVPS

SEQ ID NO: 907076 - protein, 540 aa, Homo sapiens
MLRRVTVAAVCATRRKLCEAGRELAALWGIETRGRCEDSAAARPFPILAMPGRNKAKSTCSCPDLQPNGQDLGENSRVARLGADESEEEGRRGSLSNAGDPEIVKSPSDPKQYRYIKLQNGLQALLISDLSNMEGKTGNTTDDEEEEEVEEEEEDDDEDSGAEIEDDDEEGFDDEDEFDDEHDDDLDTEDNELEELEERAEARKKTTEKQSAAALCVGVGSFADPDDLPGLAHFLEHMVFMGSLKYPDENGFDAFLKKHGGSDNASTDCERTVFQFDVQRKYFKEALDRWAQFFIHPLMIRDAIDREVEAVDSEYQLARPSDANRKEMLFGSLARPGHPMGKFFWGNAETLKHEPRKNNIDTHARLREFWMRYYSSHYMTLVVQSKETLDTLEKWVTEIFSQIPNNGLPRPNFGHLTDPFDTPAFNKLYRVVPIRKIHALTITWALPPQQQHYRVKPLHYISWLVGHEGKGSILSFLRKKCWALALFGGNGETGFEQNSTYSVFSISITLTDEGYEHFYEVAYTVFQYLKMLQKLGPEKR

SEQ ID NO: 907077 - protein, 786 aa, Homo sapiens
MLRRVTVAAVCATRRKLCEAGRELAALWGIETRGRCEDSAAARPFPILAMPGRNKAKSTCSCPDLQPNGQDLGENSRVARLGADESEEEGRRGSLSNAGDPEIVKSPSDPKQYRYIKLQNGLQALLISDLSNMEGKTGNTTDDEEEEEVEEEEEDDDEDSGAEIEDDDEEGFDDEDEFDDEHDDDLDTEDNELEELEERAEARKKTTEKQSAAALCVGVGSFADPDDLPGLAHFLEHMVFMGSLKYPDENGFDAFLKKHGGSDNASTDCERTVFQFDVQRKYFKEALDRWAQFFIHPLMIRDAIDREVEAVDSEYQLARPSDANRKEMLFGSLARPGHPMGKFFWGNAETLKHEPRKNNIDTHARLREFWMRYYSSHYMTLVVQSKETLDTLEKWVTEIFSQIPNNGLPRPNFGHLTDPFDTPAFNKLYRVVPIRKIHALTITWALPPQQQHYRVKPLHYISWLVGHEGKGSILSFLRKKCWALALFGGNGETGFEQNSTYSVFSISITLTDEGYEHFYEVAYTVFQYLKMLQKLGPEKRIFEEIRKIEDNEFHYQEQTDPVEYVENMCENMQLYPLQDILTGDQLLFEYKPEVIGEALNQLVPQKANLVLLSGANEGKCDLKEKWFGTQYSIEDIENSWAELWNSNFELNPDLHLPAENKYIATDFTLKAFDCPETEYPVKIVNTPQGCLWYKKDNKFKIPKAYIRFHLISPLIQKSAANVVLFDIFVNILTHNLAEPAYEADVAQLEYKLVAGEHGLIIRVKGFNHKLPRCTAFNLGICPLVYD

SEQ ID NO: 907078 - protein, 969 aa, Homo sapiens
MLRRVTVAAVCATRRKLCEAGRELAALWGIETRGRCEDSAAARPFPILAMPGRNKAKSTCSCPDLQPNGQDLGENSRVARLGADESEEEGRRGSLSNAGDPEIVKSPSDPKQYRYIKLQNGLQALLISDLSNMEGKTGNTTDDEEEEEVEEEEEDDDEDSGAEIEDDDEEGFDDEDEFDDEHDDDLDTEDNELEELEERAEARKKTTEKQSAAALCVGVGSFADPDDLPGLAHFLEHMVFMGSLKYPDENGFDAFLKKHGGSDNASTDCERTVFQFDVQRKYFKEALDRWAQFFIHPLMIRDAIDREVEAVDSEYQLARPSDANRKEMLFGSLARPGHPMGKFFWGNAETLKHEPRKNNIDTHARLREFWMRYYSSHYMTLVVQSKETLDTLEKWVTEIFSQIPNNGLPRPNFGHLTDPFDTPAFNKLYRVVPIRKIHALTITWALPPQQQHYRVKPLHYISWLVGHEGKGSILSFLRKKCWALALFGGNGETGFEQNSTYSVFSISITLTDEGYEHFYEVAYTVFQYLKMLQKLGPEKRIFEEIRKIEDNEFHYQEQTDPVEYVENMCENMQLYPLQDILTGDQLLFEYKPEVIGEALNQLVPQKANLVLLSGANEGKCDLKEKWFGTQYSIEDIENSWAELWNSNFELNPDLHLPAENKYIATDFTLKAFDCPETEYPVKIVNTPQGCLWYKKDNKFKIPKAYIRFHLISPLIQKSAANVVLFDIFVNILTHNLAEPAYEADVAQLEYKLVAGEHGLIIRVKGFNHKLPLLFQLIIDYLAEFNSTPAVFTMITEQLKKTYFNILIKPETLAKDVRLLILEYARWSMIDKYQALMDGLSLESLLSFVKEFKSQLFVEGLVQGNVTSTESMDFLKYVVDKLNFKPLEQEMPVQFQVVELPSGHHLCKVKALNKGDANSEVTVYYQSGTRSLREYTLMELLVAHGELVAYFEPADLGTMSTLPVGTHPGF

SEQ ID NO: 907079 - protein, 1180 aa, Homo sapiens
MLRRVTVAAVCATRRKLCEAGRELAALWGIETRGRCEDSAAARPFPILAMPGRNKAKSTCSCPDLQPNGQDLGENSRVARLGADESEEEGRRGSLSNAGDPEIVKSPSDPKQYRYIKLQNGLQALLISDLSNMEGKTGNTTDDEEEEEVEEEEEDDDEDSGAEIEDDDEEGFDDEDEFDDEHDDDLDTEDNELEELEERAEARKKTTEKQSAAALCVGVGSFADPDDLPGLAHFLEHMVFMGSLKYPDENGFDAFLKKHGGSDNASTDCERTVFQFDVQRKYFKEALDRWAQFFIHPLMIRDAIDREVEAVDSEYQLARPSDANRKEMLFGSLARPGHPMGKFFWGNAETLKHEPRKNNIDTHARLREFWMRYYSSHYMTLVVQSKETLDTLEKWVTEIFSQIPNNGLPRPNFGHLTDPFDTPAFNKLYRVVPIRKIHALTITWALPPQQQHYRVKPLHYISWLVGHEGKGSILSFLRKKCWALALFGGNGETGFEQNSTYSVFSISITLTDEGYEHFYEVAYTVFQYLKMLQKLGPEKRIFEEIRKIEDNEFHYQEQTDPVEYVENMCENMQLYPLQDILTGDQLLFEYKPEVIGEALNQLVPQKANLVLLSGANEGKCDLKEKWFGTQYSIEDIENSWAELWNSNFELNPDLHLPAENKYIATDFTLKAFDCPETEYPVKIVNTPQGCLWYKKDNKFKIPKAYIRFHLISPLIQKSAANVVLFDIFVNILTHNLAEPAYEADVAQLEYKLVAGEHGLIIRVKGFNHKLPLLFQLIIDYLAEFNSTPAVFTMITEQLKKTYFNILIKPETLAKDVRLLILEYARWSMIDKYQALMDGLSLESLLSFVKEFKSQLFVEGLVQGNVTSTESMDFLKYVVDKLNFKPLEQEMPVQFQVVELPSGHHLCKVKALNKGDANSEVTVYYQSGTRSLREYTLMELLVMHMEEPCFDFLRTKQTLGYHVYPTCRNTSGILGFSVTVGTQATKYNSEVVDKKIEEFLSSFEEKIENLTEEAFNTQVTALIKLKECEDTHLGEEVDRNWNEVVTQQYLFDRLAHEIEALKSFSKSDLVNWFKAHRGPGSKMLSVHVVGYGKYELEEDGTPSSEDSNSSCEVMQLTYLPTSPLLADCIIPTERASFPGTPLTAEGSLGCPSFPAGGSSCRCLGGRAGGGASSCTESTPQR

SEQ ID NO: 907080 - protein, 1084 aa, Homo sapiens
MLRRVTVAAVCATRRKLCEAGRELAALWGIETRGRCEDSAAARPFPILAMPGRNKAKSTCSCPDLQPNGQDLGENSRVARLGADESEEEGRRGSLSNAGDPEIVKSPSDPKQYRYIKLQNGLQALLISDLSNMEGKTGNTTDDEEEEEVEEEEEDDDEDSGAEIEDDDEEGFDDEDEFDDEHDDDLDTEDNELEELEERAEARKKTTEKQSAAALCVGVGSFADPDDLPGLAHFLEHMVFMGSLKYPDENGFDAFLKKHGGSDNASTDCERTVFQFDVQRKYFKEALDRWAQFFIHPLMIRDAIDREVEAVDSEYQLARPSDANRKEMLFGSLARPGHPMGKFFWGNAETLKHEPRKNNIDTHARLREFWMRYYSSHYMTLVVQSKETLDTLEKWVTEIFSQIPNNGLPRPNFGHLTDPFDTPAFNKLYRVVPIRKIHALTITWALPPQQQHYRVKPLHYISWLVGHEGKGSILSFLRKKCWALALFGGNGETGFEQNSTYSVFSISITLTDEGYEHFYEVAYTVFQYLKMLQKLGPEKRIFEEIRKIEDNEFHYQEQTDPVEYVENMCENMQLYPLQDILTGDQLLFEYKPEVIGEALNQLVPQKANLVLLSGANEGKCDLKEKWFGTQYSIEDIENSWAELWNSNFELNPDLHLPAENKYIATDFTLKAFDCPETEYPVKIVNTPQGCLWYKKDNKFKIPKAYIRFHLISPLIQKSAANVVLFDIFVNILTHNLAEPAYEADVAQLEYKLVAGEHGLIIRVKGFNHKLPLLFQLIIDYLAEFNSTPAVFTMITEQLKKTYFNILIKPETLAKDVRLLILEYARWSMIDKYQALMDGLSLESLLSFVKEFKSQLFVEGLVQGNVTSTESMDFLKYVVDKLNFKPLEQEMPVQFQVVELPSGHHLCKVKALNKGDANSEVTVYYQSGTRSLREYTLMELLVMHMEEPCFDFLRTKQTLGYHVYPTCRNTSGILGFSVTVGTQATKYNSEVVDKKIEEFLSSFEEKIENLTEEAFNTQVTALIKLKECEDTHLGEEVDRNWNEVVTQQYLFDRLAHEIEALKSFSKSDLVNWFKAHRGPGRWYPF

SEQ ID NO: 907081 - protein, 1091 aa, Homo sapiens
MLRRVTVAAVCATRRKLCEAGRELAALWGIETRGRCEDSAAARPFPILAMPGRNKAKSTCSCPDLQPNGQDLGENSRVARLGADESEEEGRRGSLSNAGDPEIVKSPSDPKQYRYIKLQNGLQALLISDLSNMEGKTGNTTDDEEEEEVEEEEEDDDEDSGAEIEDDDEEGFDDEDEFDDEHDDDLDTEDNELEELEERAEARKKTTEKQSAAALCVGVGSFADPDDLPGLAHFLEHMVFMGSLKYPDENGFDAFLKKHGGSDNASTDCERTVFQFDVQRKYFKEALDRWAQFFIHPLMIRDAIDREVEAVDSEYQLARPSDANRKEMLFGSLARPGHPMGKFFWGNAETLKHEPRKNNIDTHARLREFWMRYYSSHYMTLVVQSKETLDTLEKWVTEIFSQIPNNGLPRPNFGHLTDPFDTPAFNKLYRVVPIRKIHALTITWALPPQQQHYRVKPLHYISWLVGHEGKGSILSFLRKKCWALALFGGNGETGFEQNSTYSVFSISITLTDEGYEHFYEVAYTVFQYLKMLQKLGPEKRIFEEIRKIEDNEFHYQEQTDPVEYVENMCENMQLYPLQDILTGDQLLFEYKPEVIGEALNQLVPQKANLVLLSGANEGKCDLKEKWFGTQYSIEDIENSWAELWNSNFELNPDLHLPAENKYIATDFTLKAFDCPETEYPVKIVNTPQGCLWYKKDNKFKIPKAYIRFHLISPLIQKSAANVVLFDIFVNILTHNLAEPAYEADVAQLEYKLVAGEHGLIIRVKGFNHKLPLLFQLIIDYLAEFNSTPAVFTMITEQLKKTYFNILIKPETLAKDVRLLILEYARWSMIDKYQALMDGLSLESLLSFVKEFKSQLFVEGLVQGNVTSTESMDFLKYVVDKLNFKPLEQEMPVQFQVVELPSGHHLCKVKALNKGDANSEVTVYYQSGTRSLREYTLMELLVMHMEEPCFDFLRTKQTLGYHVYPTCRNTSGILGFSVTVGTQATKYNSEVVDKKIEEFLSSFEEKIENLTEEAFNTQVTALIKLKECEDTHLGEEVDRNWNEVVTQQYLFDRLAHEIEALKSFSKSDLVNWFKAHRGPGSKMLSVHVSMFN

SEQ ID NO: 907082 - protein, 878 aa, Homo sapiens
MLRRVTVAAVCATRRKLCEAGRELAALWGIETRGRCEDSAAARPFPILAMPGRNKAKSTCSCPDLQPNGQDLGENSRVARLGADESEEEGRRGSLSNAGDPEIVKSPSDPKQYRYIKLQNGLQALLISDLSNMEGKTGNTTDDEEEEEVEEEEEDDDEDSGAEIEDDDEEGFDDEDEFDDEHDDDLDTEDNELEELEERAEARKKTTEKQSAAALCVGVGSFADPDDLPGLAHFLEHMVFMGSLKYPDENGFDAFLKKHGGSDNASTDCERTVFQFDVQRKYFKEALDRWAQFFIHPLMIRDAIDREVEAVDSEYQLARPSDANRKEMLFGSLARPGHPMGKFFWGNAETLKHEPRKNNIDTHARLREFWMRYYSSHYMTLVVQSKETLDTLEKWVTEIFSQIPNNGLPRPNFGHLTDPFDTPAFNKLYRVVPIRKIHALTITWALPPQQQHYRVKPLHYISWLVGHEGKGSILSFLRKKCWALALFGGNGETGFEQNSTYSVFSISITLTDEGYEHFYEVAYTVFQYLKMLQKLGPEKRIFEEIRKIEDNEFHYQEQTDPVEYVENMCENMQLYPLQDILTGDQLLFEYKPEVIGEALNQLVPQKANLVLLSGANEGKCDLKEKWFGTQYSIEDIENSWAELWNSNFELNPDLHLPAENKYIATDFTLKAFDCPETEYPVKIVNTPQGCLWYKKDNKFKIPKAYIRFHLISPLIQKSAANVVLFDIFVNILTHNLAEPAYEADVAQLEYKLVAGEHGLIIRVKGFNHKLPLLFQLIIDYLAEFNSTPAVFTMITEQLKKTYFNILIKPETLAKDVRLLILEYARWSMIDKYQALMDGLSLESLLSFVKEFKSQLFVEGLVQGNVTSTVSVRCSVGQV

SEQ ID NO: 907083 - protein, 484 aa, Homo sapiens
MLRRVTVAAVCATRRKLCEAGRELAALWGIETRGRCEDSAAARPFPILAMPGRNKAKSTCSCPDLQPNGQDLGENSRVARLGADESEEEGRRGSLSNAGDPEIVKSPSDPKQYRYIKLQNGLQALLISDLSNMEGKTGNTTDDEEEEEVEEEEEDDDEDSGAEIEDDDEEGFDDEDEFDDEHDDDLDTEDNELEELEERAEARKKTTEKQSAAALCVGVGSFADPDDLPGLAHFLEHMVFMGSLKYPDENGFDAFLKKHGGSDNASTDCERTVFQFDVQRKYFKEALDRWAQFFIHPLMIRDAIDREVEAVDSEYQLARPSDANRKEMLFGSLARPGHPMGKFFWGNAETLKHEPRKNNIDTHARLREFWMRYYSSHYMTLVVQSKETLDTLEKWVTEIFSQIPNNGLPRPNFGHLTDPFDTPAFNKLYRVVPIRKIHALTITWALPPQQQHYRVKPLHYISWLVGHEGKGSILSFLRKKQVFN

SEQ ID NO: 907084 - protein, 111 aa, Homo sapiens
SGFEQNSTYSVFSISIDIDDEEGFDDEDEFDDEHDDDLDTEDNELEELEERAEARKKTTEKQQLQSLFLLWSKLTDRLWFKSTYSKMSSTLLVETRNLYGVVGAESRLGTY

SEQ ID NO: 907085 - protein, 311 aa, Homo sapiens
MLRRVTVAAVCATRRKLCEAGRELAALWGIETRGRCEDSAAARPFPILAMPGRNKAKSTCSCPDLQPNGQDLGENSRVARLGADESEEEGRRGSLSNAGDPEIVKSPSDPKQYRYIKLQNGLQALLISDLSNMEGKTGNTTDDEEEEEVEEEEEDDDEDSGAEIEDDDEEGFDDEDEFDDEHDDDLDTEDNELEELEERAEARKKTTEKQQLQSLFLLWSKLTDRLWFKSTYSKMSSTLLVETRNLYGVVGAESRSAPVQHLAGWQAEEQQGETDTVCLQRLFVLELGVSLIQMTCRGWHTFWSTWYSWVV

SEQ ID NO: 907086 - protein, 140 aa, Homo sapiens
MLRRVTVAAVCATRRKLCEAGRELAALWGIETRGRCEDSAAARPFPILAMPGRNKAKSTCSCPDLQPNGQDLGENSRVARLGADESEEEGRRGSLSNAGDPEIVKSPSDPKQYRVSICHPCWSAMAQSWLTATSSSLAQV

SEQ ID NO: 907087 - protein, 105 aa, Homo sapiens
SDEGSMNAFTGRGSPGRGQKTKVCTTPSSGHAASGKDSSSRLAVTDPTRPGATTKITTTSTYISASTLKVNKKTKGLIDGLTKFFTPSPDGRRSRGEIIDFYRSS

SEQ ID NO: 907088 - protein, 1151 aa, Homo sapiens
MLRRVTVAAVCATRRKLCEAGRELAALWGIETRGRCEDSAAARPFPILAMPGRNKAKSTCSCPDLQPNGQDLGENSRVARLGADESEEEGRRGSLSNAGDPEIVKSPSDPKQYRYIKLQNGLQALLISDLSNMEGKTGNTTDDEEEEEVEEEEEDDDEDSGAEIEDDDEEGFDDEDEFDDEHDDDLDTEDNELEELEERAEARKKTTEKQSAAALCVGVGSFADPDDLPGLAHFLEHMVFMGSLKYPDENGFDAFLKKHGGSDNASTDCERTVFQFDVQRKYFKEALDRWAQFFIHPLMIRDAIDREVEAVDSEYQLARPSDANRKEMLFGSLARPGHPMGKFFWGNAETLKHEPRKNNIDTHARLREFWMRYYSSHYMTLVVQSKETLDTLEKWVTEIFSQIPNNGLPRPNFGHLTDPFDTPAFNKLYRVVPIRKIHALTITWALPPQQQHYRVKPLHYISWLVGHEGKGSILSFLRKKCWALALFGGNGETGFEQNSTYSVFSISITLTDEGYEHFYEVAYTVFQYLKMLQKLGPEKRIFEEIRKIEDNEFHYQEQTDPVEYVENMCENMQLYPLQDILTGDQLLFEYKPEVIGEALNQLVPQKANLVLLSGANEGKCDLKEKWFGTQYSIEDIENSWAELWNSNFELNPDLHLPAENKYIATDFTLKAFDCPETEYPVKIVNTPQGCLWYKKDNKFKIPKAYIRFHLISPLIQKSAANVVLFDIFVNILTHNLAEPAYEADVAQLEYKLVAGEHGLIIRVKGFNHKLPLLFQLIIDYLAEFNSTPAVFTMITEQLKKTYFNILIKPETLAKDVRLLILEYARWSMIDKYQALMDGLSLESLLSFVKEFKSQLFVEGLVQGNVTSTESMDFLKYVVDKLNFKPLEQEMPVQFQVVELPSGHHLCKVKALNKGDANSEVTVYYQSGTRSLREYTLMELLVMHMEEPCFDFLRTKQTLGYHVYPTCRNTSGILGFSVTVGTQATKYNSEVVDKKIEEFLSSFEEKIENLTEEAFNTQVTALIKLKECEDTHLGEEVDRNWNEVVTQQYLFDRLAHEIEALKSFSKSDLVNWFKAHRGPGSKMLSVHVVGYGKYELEEDGTPSSEDSNSSCEVMQLTYLPTSPLLADCIIPITDIRAFTTTLNLLPYHKIVK

SEQ ID NO: 907089 - protein, 1091 aa, Homo sapiens; identical to SEQ ID NO: 907081

SEQ ID NO: 907090 - protein, 1032 aa, Homo sapiens
MLRRVTVAAVCATRRKLCEAGRELAALWGIETRGRCEDSAAARPFPILAMPGRNKAKSTCSCPDLQPNGQDLGENSRVARLGADESEEEGRRGSLSNAGDPEIVKSPSDPKQYRYIKLQNGLQALLISDLSNMEGKTGNTTDDEEEEEVEEEEEDDDEDSGAEIEDDDEEGFDDEDEFDDEHDDDLDTEDNELEELEERAEARKKTTEKQSAAALCVGVGSFADPDDLPGLAHFLEHMVFMGSLKYPDENGFDAFLKKHGGSDNASTDCERTVFQFDVQRKYFKEALDRWAQFFIHPLMIRDAIDREVEAVDSEYQLARPSDANRKEMLFGSLARPGHPMGKFFWGNAETLKHEPRKNNIDTHARLREFWMRYYSSHYMTLVVQSKETLDTLEKWVTEIFSQIPNNGLPRPNFGHLTDPFDTPAFNKLYRVVPIRKIHALTITWALPPQQQHYRVKPLHYISWLVGHEGKGSILSFLRKKCWALALFGGNGETGFEQNSTYSVFSISITLTDEGYEHFYEVAYTVFQYLKMLQKLGPEKRIFEEIRKIEDNEFHYQEQTDPVEYVENMCENMQLYPLQDILTGDQLLFEYKPEVIGEALNQLVPQKANLVLLSGANEGKCDLKEKWFGTQYSIEDIENSWAELWNSNFELNPDLHLPAENKYIATDFTLKAFDCPETEYPVKIVNTPQGCLWYKKDNKFKIPKAYIRFHLISPLIQKSAANVVLFDIFVNILTHNLAEPAYEADVAQLEYKLVAGEHGLIIRVKGFNHKLPLLFQLIIDYLAEFNSTPAVFTMITEQLKKTYFNILIKPETLAKDVRLLILEYARWSMIDKYQALMDGLSLESLLSFVKEFKSQLFVEGLVQGNVTSTESMDFLKYVVDKLNFKPLEQEMPVQFQVVELPSGHHLCKVKALNKGDANSEVTVYYQSGTRSLREYTLMELLVMHMEEPCFDFLRTKQTLGYHVYPTCRNTSGILGFSVTVGTQATKYNSEVVDKKIEEFLSSFEEKIENLTEEAFNTQVTALIKLKECEDTLP

SEQ ID NO: 907091 - protein, 685 aa, Homo sapiens
MLRRVTVAAVCATRRKLCEAGRELAALWGIETRGRCEDSAAARPFPILAMPGRNKAKSTCSCPDLQPNGQDLGENSRVARLGADESEEEGRRGSLSNAGDPEIVKSPSDPKQYRYIKLQNGLQALLISDLSNMEGKTGNTTDDEEEEEVEEEEEDDDEDSGAEIEDDDEEGFDDEDEFDDEHDDDLDTEDNELEELEERAEARKKTTEKQSAAALCVGVGSFADPDDLPGLAHFLEHMVFMGSLKYPDENGFDAFLKKHGGSDNASTDCERTVFQFDVQRKYFKEALDRWAQFFIHPLMIRDAIDREVEAVDSEYQLARPSDANRKEMLFGSLARPGHPMGKFFWGNAETLKHEPRKNNIDTHARLREFWMRYYSSHYMTLVVQSKETLDTLEKWVTEIFSQIPNNGLPRPNFGHLTDPFDTPAFNKLYRVVPIRKIHALTITWALPPQQQHYRVKPLHYISWLVGHEGKGSILSFLRKKCWALALFGGNGETGFEQNSTYSVFSISITLTDEGYEHFYEVAYTVFQYLKMLQKLGPEKRIFEEIRKIEDNEFHYQEQTDPVEYVENMCENMQLYPLQDILTGDQLLFEYKPEVIGEALNQLVPQKANLVLLSGANEGKCDLKEKWFGTQYSIEDIENSWAELWNSNFELNPDLHLPAENKYIATDFTLKAFDCPETEYPVKIVK

SEQ ID NO: 907092 - protein, 225 aa, Homo sapiens
MLRRVTVAAVCATRRKLCEAGRELAALWGIETRGRCEDSAAARPFPILAMPGRNKAKSTCSCPDLQPNGQDLGENSRVARLGADESEEEGRRGSLSNAGDPEIVKSPSDPKQYRYIKLQNGLQALLISDLSNMEGKTGNTTDDEEEEEVEEEEEDDDEDSGAEIEDDDEEGFDDEDEFDDEHDDDLDTEDNELEELEERAEARKKTTEKQGASHVCFLLIWEFFG

SEQ ID NO: 907093 - protein, 1411 aa, Homo sapiens
MASISEPVTFREFCPLYYLLNAIPTKIQKGFRSIVVYLTALDTNGDYIAVGSSIGMLYLYCRHLNQMRKYNFEGKTESITVVKLLSCFDDLVAAGTASGRVAVFQLVSSLPGRNKQLRRFDVTGIHKNSITALAWSPNGMKLFSGDDKGKIVYSSLDLDQGLCNSQLVLEEPSSIVQLDYSQKVLLVSTLQRSLLFYTEEKSVRQIGTQPRKSTGKFGACFIPGLCKQSDLTLYASRPGLRLWKADVHGTVQATFILKDAFAGGVKPFELHPRLESPNSGSCSLPERHLGLVSCFFQEGWVLSWNEYSIYLLDTVNQATIAGLEGSGDIVSVSCTENEIFFLKGDRNIIRISSRPEGLTSTVRDGLEMSGCSERVHVQQAEKLPGATVSETRLRGSSMASSVASEPRSRSSSLNSTDSGSGLLPPGLQATPELGKGSQPLSQRFNAISSEDFDQELVVKPIKVKRKKKKKKTEGGSRSTCHSSLESTPCSEFPGDSPQSLNTDLLSMTSSVLGSSVDQLSAESPDQESSFNGEVNGVPQENTDPETFNVLEVSGSMPDSLAEEDDIRTEMPHCHHAHGRELLNGAREDVGGSDVTGLGDEPCPADDGPNSTQLPFQEQDSSPGAHDGEDIQPIGPQSTFCEVPLLNSLTVPSSLSWAPSAEQWLPGTRADEGSPVEPSQEQDILTSMEASGHLSTNLWHAVTDDDTGQKEIPISERVLGSVGGQLTPVSALAASTHKPWLEQPPRDQTLTSSDEEDIYAHGLPSSSSETSVTELGPSCSQQDLSRLGAEDAGLLKPDQFAESWMGYSGPGYGILSLVVSEKYIWCLDYKGGLFCSALPGAGLRWQKFEDAVQQVAVSPSGALLWKIEQKSNRAFACGKVTIKGKRHWYEALPQAVFVALSDDTAWIIRTSGDLYLQTGLSVDRPCARAVKVDCPYPLSQITARNNVVWALTEQRALLYREGVSSFCPEGEQWKCDIVSERQALEPVCITLGDQQTLWALDIHGNLWFRTGIISKKPQGDDDHWWQVSITDYVVFDQCSLFQTIIHATHSVATAAQAPVEKVADKLRMAFWSQQLQCQPSLLGVNNSGVWISSGKNEFHVAKGSLIGTYWNHVVPRGTASATKWAFVLASAAPTKEGSFLWLCQSSKDLCSVSAQSAQSRPSTVQLPPEAEMRAYAACQDALWALDSLGQVFIRTLSKSCPTGMHWTRLDLSQLGAVKLTSLACGNQHIWACDSRGGVYFRVGTQPLNPSLMLPAWIMIEPPVQPAGVSLVSVHSSPNDQMLWVLDSRWNVHVRTGITEEMPVGTAWEHVPGLQACQLALSTRTVWARCPNGDLARRYGVTDKNPAGDYWKKIPGSVSCFTVTASDELWAVGPPGYLLQRLTKTFSHSHGTQKSSQAAMPHPEDLEDEWEVI

SEQ ID NO: 907094 - protein, 1411 aa, Homo sapiens; identical to SEQ ID NO: 907093

SEQ ID NO: 907095 - protein, 1267 aa, Homo sapiens [sequence omitted]

SEQ ID NO: 907096 - protein, 87 aa, Homo sapiens
WKADVHGTVQATFILKDAFAGGVKPFELHPRLESPNSGSCSLPERHLGLVSCFFQEGWVLSWNEYSIYLLDTVNQVSEGTPPYLLCL

SEQ ID NO: 907097 - protein, 1411 aa, Homo sapiens; identical to SEQ ID NO: 907093

SEQ ID NO: 907098 - protein, 56 aa, Homo sapiens
RHWYEALPQAVFVALSDDTAWIIRTSGDLYLQTGNRGPRLEACQLCRHCLCCTLLC

SEQ ID NO: 907099 - protein, 194 aa, Homo sapiens
RWERRRECTRRLPNNRQRTPLAMASNFKKANMASSSQRKRMSPKPELTEEQKQEIREAFDLFDADGTGTIDVKELKVAMRALGFEPKKEEIKKMISEIDKEGTGKMNFGDFLTVMTQKMSEKDTKEEILKAFKLFDDDETGKISFKNLKRVAKELGENLTDEELQEMIDEADRDGDGEVSEQEFLRIMKKTSLY

SEQ ID NO: 907100 - protein, 172 aa, Homo sapiens
MASNFKKANMASSSQRKRMSPKPELTEEQKQEIREAFDLFDADGTGTIDVKELKVAMRALGFEPKKEEIKKMISEIDKEGTGKMNFGDFLTVMTQKMSEKDTKEEILKAFKLFDDDETGKISFKNLKRVAKELGENLTDEELQEMIDEADRDGDGEVSEQEFLRIMKKTSLY

SEQ ID NO: 907101 - protein, 194 aa, Homo sapiens; identical to SEQ ID NO: 907099

SEQ ID NO: 907102 - protein, 202 aa, Homo sapiens
RWERRRECTRRLPNNRQRTPLAMASNFKKANMASSSQRKRMSPKPELTEEQKQEIREAFDLFDADGTGTIDVKELKVAMRALGFEPKKEEIKKMISEIDKEGTGKMNFGDFLTVMTQKMSEKDTKEEILKAFKLFDDDETGKISFKNLKRVAKELGENLTDEELQEMIDEADRDGDGEVSEQEFLRIMVTRFSACHGVKSGF

SEQ ID NO: 907103 - protein, 194 aa, Homo sapiens; identical to SEQ ID NO: 907099

SEQ ID NO: 907104 - protein, 194 aa, Homo sapiens; identical to SEQ ID NO: 907099

SEQ ID NO: 907105 - protein, 146 aa, Homo sapiens
ARSPCLGVLPSSLPAGRENWHIDVKELKVAMRALGFEPKKEEIKKMISEIDKEGTGKMNFGDFLTVMTQKMSEKDTKEEILKAFKLFDDDETGKISFKNLKRVAKELGENLTDEELQEMIDEADRDGDGEVSEQEFLRIMKKTSLY

SEQ ID NO: 907106 - protein, 108 aa, Homo sapiens
MAAAVAAAPGALGSLHAGGARLVAACSAWLCPGLRLPGSLAGRRAGPAIWAQGWVPAAGGPAPKRGYSSEMKTEDELRVRHLEEENRDRDKNMVKGSGDVNMCGVFGT

SEQ ID NO: 907107 - protein, 339 aa, Homo sapiens
MAAAVAAAPGALGSLHAGGARLVAACSAWLCPGLRLPGSLAGRRAGPAIWAQGWVPAAGGPAPKRGYSSEMKTEDELRVRHLEEENRGIVVLGINRAYGKNSLSKNLIKMLSKAVDALKSDKKVRTIIIRSEVPGIFCAGADLKERAKMSSSEVGPFVSKIRAVINDIANLPVPTIAAIDGLALGGGLELALACDIRVAASSAKMGLVETKLAIIPGGGGTQRLPRAIGMSLAKELIFSARVLDGKEAKAVGLISHVLEQNQEGDAAYRKALDLAREFLPQGPVAMRVAKLAINQGMEVDLVTGLAIEEACYAQTIPTKDRLEGLLAFKEKRPPRYKGE

SEQ ID NO: 907108 - protein, 230 aa, Homo sapiens
MLSKAVDALKSDKKVRTIIIRSEVPGIFCAGADLKERAKMSSSEVGPFVSKIRAVINDIANLPVPTIAAIDGLALGGGLELALACDIRVAASSAKMGLVETKLAIIPGGGGTQRLPRAIGMSLAKELIFSARVLDGKEAKAVGLISHVLEQNQEGDAAYRKALDLAREFLPQGPVAMRVAKLAINQGMEVDLVTGLAIEEACYAQTIPTKDRLEGLLAFKEKRPPRYKGE

SEQ ID NO: 907109 - protein, 300 aa, Homo sapiens
MAAAVAAAPGALGSLHAGGARLVAACSAWLCPGLRLPGSLAGRRAGPAIWAQGWVPAAGGPAPKRGYSSEMKTEDELRVRHLEEENRGIVVLGINRAYGKNSLSKNLIKMLSKAVDALKSDKKVRTIIIRSEVPGIFCAGADLKERAKMSSSEVGPFVSKIRAVINDIANLPVPTIAAIDGLALGGGLELALACDIRVAASSAKMGLVETKLAIIPGGGGTQRLPRAIGMSLAKELIFSARVLDGKEAKAVGLISHVLEQNQEGDAAYRKALDLAREFLPQGPVAMRVAKLAINQGMERF

SEQ ID NO: 907110 - protein, 339 aa, Homo sapiens; identical to SEQ ID NO: 907107

SEQ ID NO: 907111 - protein, 288 aa, Homo sapiens
MAAAVAAAPGALGSLHAGGARLVAACSAWLCPGLRLPGSLAGRRAGPAIWAQGWVPAAGGPAPKRGYSSEMKTEDELRVRHLEEENRGIVVLGINRAYGKNSLSKNLIKMLSKAVDALKSDKKVRTIIIRSEVPGIFCAGADLKERAKMSSSEVGPFVSKIRAVINDIANLPVPTIAAIDGLALGGGLELALACDIRVAASSAKMGLVETKLAIIPGGGGTQRLPRAIGMSLAKELIFSARVLDGKEAKAVGLISHVLEQNQEGDAAYRKALDLAREFLPQVKQIRRC

SEQ ID NO: 907112 - protein, 255 aa, Homo sapiens
MAAAVAAAPGALGSLHAGGARLVAACSAWLCPGLRLPGSLAGRRAGPAIWAQGWVPAAGGPAPKRGYSSEMKTEDELRVRHLEEENRGIVVLGINRAYGKNSLSKNLIKMLSKAVDALKSDKKVRTIIIRSEVPGIFCAGADLKERAKMSSSEVGPFVSKIRAVINDIANLPVPTIAAIDGLALGGGLELALACDIRVAASSAKMGLVETKLAIIPGGVTSSTEVLNPSKSSMKIGIIIFQTPVNIDILASSHES

SEQ ID NO: 907113 - protein, 339 aa, Homo sapiens; identical to SEQ ID NO: 907107

SEQ ID NO: 907114 - protein, 310 aa, Homo sapiens
MAAAVAAAPGALGSLHAGGARLVAACSAWLCPGLRLPGSLAGRRAGPAIWAQGWVPAAGGPAPKRGYSSEMKTEDELRVRHLEEENRGIVVLGINRAYGKNSLSKNLIKMLSKAVDALKSDKKVRTIIIRSEVPGIFCAANLPVPTIAAIDGLALGGGLELALACDIRVAASSAKMGLVETKLAIIPGGGGTQRLPRAIGMSLAKELIFSARVLDGKEAKAVGLISHVLEQNQEGDAAYRKALDLAREFLPQGPVAMRVAKLAINQGMEVDLVTGLAIEEACYAQTIPTKDRLEGLLAFKEKRPPRYKGE

SEQ ID NO: 907115 - protein, 323 aa, Homo sapiens
MAAAVAAAPGALGSLHAGGARLVAACSAWLCPGLRLPGSLAGRRAGPAIWAQGWVPAAGGPAPKRGYSSEMKTEDELRVRHLEEENRGIVVLGINRAYGKNSLSKNLIKMLSKAVDALKSDKKVRTIIIRSEVPGIFCAGADLKERAKMSSSEVGPFVSKIRAVINDIANLPVPTIAAIDGLALGGGLELALACDIRVAASSAKMGLVETKLAIIPGGGGTQRLPRAIGMSLAKELIFSARVLDGKEAKAVGLISHVLEQNQEGDAAYRKALDLAREFLPQGPVAMRVAKLAINQGMETIPTKDRLEGLLAFKEKRPPRYKGE

SEQ ID NO: 907116 - protein, 2440 aa, Homo sapiens
MSSSGYPPNQGAFSTEQSRYPPHSVQYTFPNTRHQQEFAVPDYRSSHLEVSQASQLLQQQQQQQLRRRPSLLSEFHPGSDRPQERRTSYEPFHPGPSPVDHDSLESKRPRLEQVSDSHFQRVSAAVLPLVHPLPEGLRASADAKKDPAFGGKHEAPSSPISGQPCGDDQNASPSKLSKEELIQSMDRVDREIAKVEQQILKLKKKQQQLEEEAAKPPEPEKPVSPPPVEQKHRSIVQIIYDENRKKAEEAHKIFEGLGPKVELPLYNQPSDTKVYHENIKTNQVMRKKLILFFKRRNHARKQREQKICQRYDQLMEAWEKKVDRIENNPRRKAKESKTREYYEKQFPEIRKQREQQERFQRVGQRGAGLSATIARSEHEISEIIDGLSEQENNEKQMRQLSVIPPMMFDAEQRRVKFINMNGLMEDPMKVYKDRQFMNVWTDHEKEIFKDKFIQHPKNFGLIASYLERKSVPDCVLYYYLTKKNENYKALVRRNYGKRRGRNQQIARPSQEEKVEEKEEDKAEKTEKKEEEKKDEEEKDEKEDSKENTKEKDKIDGTAEETEEREQATPRGRKTANSQGRRKGRITRSMTNEAAAASAAAAAATEEPPPPLPPPPEPISTEPVETSRWTEEEMEVAKKGLVEHGRNWAAIAKMVGTKSEAQCKNFYFNYKRRHNLDNLLQQHKQKTSRKPREERDVSQCESVASTVSAQEDEDIEASNEEENPEDSEVEAVKPSEDSPENATSRGNTEPAVELEPTTETAPSTSPSLAVPSTKPAEDESVETQVNDSISAETAEQMDVDQQEHSAEEGSVCDPPPATKADSVDVEVRVPENHASKVEGDNTKERDLDRASEKVEPRDEDLVVAQQINAQRPEPQSDNDSSATCSADEDVDGEPERQRMFPMDSKPSLLNPTGSILVSSPLKPNPLDLPQLQHRAAVIPPMVSCTPCNIPIGTPVSGYALYQRHIKAMHESALLEEQRQRQEQIDLECRSSTSPCGTSKSPNREWEVLQPAPHQVITNLPEGVRLPTTRPTRPPPPLIPSSKTTVASEKPSFIMGGSISQGTPGTYLTSHNQASYTQETPKPSVGSISLGLPRQQESAKSATLPYIKQEEFSPRSQNSQPEGLLVRAQHEGVVRGTAGAIQEGSITRGTPTSKISVESIPSLRGSITQGTPALPQTGIPTEALVKGSISRMPIEDSSPEKGREEAASKGHVIYEGKSGHILSYDNIKNAREGTRSPRTAHEISLKRSYESVEGNIKQGMSMRESPVSAPLEGLICRALPRGSPHSDLKERTVLSGSIMQGTPRATTESFEDGLKYPKQIKRESPPIRAFEGAITKGKPYDGITTIKEMGRSIHEIPRQDILTQESRKTPEVVQSTRPIIEGSISQGTPIKFDNNSGQSAIKHNVKSLITGPSKLSRGMPPLEIVPENIKVVERGKYEDVKAGETVRSRHTSVVSSGPSVLRSTLHEAPKAQLSPGIYDDTSARRTPVSYQNTMSRGSPMMNRTSDVTISSNKSTNHERKSTLTPTQRESIPAKSPVPGVDPVVSHSPFDPHHRGSTAGEVYRSHLPTHLDPAMPFHRALDPAAAAYLFQRQLSPTPGYPSQYQLYAMENTRQTILNDYITSQQMQVNLRPDVARGLSPREQPLGLPYPATRGIIDLTNMPPTILVPHPGGTSTPPMDRITYIPGTQITFPPRPYNSASMSPGHPTHLAAAASAEREREREREKERERERIAAASSDLYLRPGSEQPGRPGSHGYVRSPSPSVRTQETMLQQRPSVFQGTNGTSVITPLDPTAQLRIMPLPAGGPSISQGLPASRYNTAADALAALVDAAASAPQMDVSKTKESKHEAARLEENLRSRSAAVSEQQQLEQKTLEVEKRSVQCLYTSSAFPSGKPQPHSSVVYSEAGKDKGPPPKSRYEEELRTRGKTTITAANFIDVIITRQIASDKDARERGSQSSDSSSSLSSHRYETPSDAIEVISPASSPAPPQEKLQTYQPEVVKANQAENDPTRQYEGPLHHYRPQQESPSPQQQLPPSSQAEGMGQVPRTHRLITLADHICQIITQDFARNQVSSQTPQQPPTSTFQNSPSALVSTPVRTKTSNRYSPESQAQSVHHQRPGSRVSPENLVDKSRGSRPGKSPERSHVSSEPYEPISPPQVPVVHEKQDSLLLLSQRGAEPAEQRNDARSPGSISYLPSFFTKLENTSPMVKSKKQEIFRKLNSSGGGDSDMAAAQPGTEIFNLPAVTTSGSVSSRGHSFADPASNLGLEDIIRKALMGSFDDKVEDHGVVMSQPMGVVPGTANTSVVTSGETRREEGDPSPHSGGVCKPKLISKSNSRKSKSPIPGQGYLGTERPSSVSSVHSEGDYHRQTPGWAWEDRPSSTGSTQFPYNPLTMRMLSSTPPTPIACAPSAVNQAAPHQQNRIWEREPAPLLSAQYETLSDSDD

SEQ ID NO: 907117 - protein, 106 aa, Homo sapiens [sequence omitted]

SEQ ID NO: 907118 - protein, 2456 aa, Homo sapiens
MSSSGYPPNQGAFSTEQSRYPPHSVQYTFPNTRHQQEFAVPDYRSSHLEVSQASQLLQQQQQQQLRRRPSLLSEFHPGSDRPQERRTSYEPFHPGPSPVDHDSLESKRPRLEQVSDSHFQRVSAAVLPLVHPLPEGLRASADAKKDPAFGGKHEAPSSPISGQPCGDDQNASPSKLSKEELIQSMDRVDREIAKVEQQILKLKKKQQQLEEEAAKPPEPEKPVSPPPVEQKHRSIVQIIYDENRKKAEEAHKIFEGLGPKVELPLYNQPSDTKVYHENIKTNQVMRKKLILFFKRRNHARKQREQKICQRYDQLMEAWEKKVDRIENNPRRKAKESKTREYYEKQFPEIRKQREQQERFQRVGQRGAGLSATIARSEHEISEIIDGLSEQENNEKQMRQLSVIPPMMFDAEQRRVKFINMNGLMEDPMKVYKDRQFMNVWTDHEKEIFKDKFIQHPKNFGLIASYLERKSVPDCVLYYYLTKKNENYKALVRRNYGKRRGRNQQIARPSQEEKVEEKEEDKAEKTEKKEEEKKDEEEKDEKEDSKENTKEKDKIDGTAEETEEREQATPRGRKTANSQGRRKGRITRSMTNEAAAASAAAAAATEEPPPPLPPPPEPISTEPVETSRWTEEEMEVAKKGLVEHGRNWAAIAKMVGTKSEAQCKNFYFNYKRRHNLDNLLQQHKQKTSRKPREERDVSQCESVASTVSAQEDEDIEASNEEENPEDSEGAENSSDTESAPSPSPVEAVKPSEDSPENATSRGNTEPAVELEPTTETAPSTSPSLAVPSTKPAEDESVETQVNDSISAETAEQMDVDQQEHSAEEGSVCDPPPATKADSVDVEVRVPENHASKVEGDNTKERDLDRASEKVEPRDEDLVVAQQINAQRPEPQSDNDSSATCSADEDVDGEPERQRMFPMDSKPSLLNPTGSILVSSPLKPNPLDLPQLQHRAAVIPPMVSCTPCNIPIGTPVSGYALYQRHIKAMHESALLEEQRQRQEQIDLECRSSTSPCGTSKSPNREWEVLQPAPHQVITNLPEGVRLPTTRPTRPPPPLIPSSKTTVASEKPSFIMGGSISQGTPGTYLTSHNQASYTQETPKPSVGSISLGLPRQQESAKSATLPYIKQEEFSPRSQNSQPEGLLVRAQHEGVVRGTAGAIQEGSITRGTPTSKISVESIPSLRGSITQGTPALPQTGIPTEALVKGSISRMPIEDSSPEKGREEAASKGHVIYEGKSGHILSYDNIKNAREGTRSPRTAHEISLKRSYESVEGNIKQGMSMRESPVSAPLEGLICRALPRGSPHSDLKERTVLSGSIMQGTPRATTESFEDGLKYPKQIKRESPPIRAFEGAITKGKPYDGITTIKEMGRSIHEIPRQDILTQESRKTPEVVQSTRPIIEGSISQGTPIKFDNNSGQSAIKHNVKSLITGPSKLSRGMPPLEIVPENIKVVERGKYEDVKAGETVRSRHTSVVSSGPSVLRSTLHEAPKAQLSPGIYDDTSARRTPVSYQNTMSRGSPMMNRTSDVTISSNKSTNHERKSTLTPTQRESIPAKSPVPGVDPVVSHSPFDPHHRGSTAGEVYRSHLPTHLDPAMPFHRALDPAAAAYLFQRQLSPTPGYPSQYQLYAMENTRQTILNDYITSQQMQVNLRPDVARGLSPREQPLGLPYPATRGIIDLTNMPPTILVPHPGGTSTPPMDRITYIPGTQITFPPRPYNSASMSPGHPTHLAAAASAEREREREREKERERERIAAASSDLYLRPGSEQPGRPGSHGYVRSPSPSVRTQETMLQQRPSVFQGTNGTSVITPLDPTAQLRIMPLPAGGPSISQGLPASRYNTAADALAALVDAAASAPQMDVSKTKESKHEAARLEENLRSRSAAVSEQQQLEQKTLEVEKRSVQCLYTSSAFPSGKPQPHSSVVYSEAGKDKGPPPKSRYEEELRTRGKTTITAANFIDVIITRQIASDKDARERGSQSSDSSSSLSSHRYETPSDAIEVISPASSPAPPQEKLQTYQPEVVKANQAENDPTRQYEGPLHHYRPQQESPSPQQQLPPSSQAEGMGQVPRTHRLITLADHICQIITQDFARNQVSSQTPQQPPTSTFQNSPSALVSTPVRTKTSNRYSPESQAQSVHHQRPGSRVSPENLVDKSRGSRPGKSPERSHVSSEPYEPISPPQVPVVHEKQDSLLLLSQRGAEPAEQRNDARSPGSISYLPSFFTKLENTSPMVKSKKQEIFRKLNSSGGGDSDMAAAQPGTEIFNLPAVTTSGSVSSRGHSFADPASNLGLEDIIRKALMGSFDDKVEDHGVVMSQPMGVVPGTANTSVVTSGETRREEGDPSPHSGGVCKPKLISKSNSRKSKSPIPGQGYLGTERPSSVSSVHSEGDYHRQTPGWAWEDRPSSTGSTQFPYNPLTMRMLSSTPPTPIACAPSAVNQAAPHQQNRIWEREPAPLLSAQYETLSDSDD

SEQ ID NO: 907119 - protein, 2456 aa, Homo sapiens; identical to SEQ ID NO: 907118

SEQ ID NO: 907120 - protein, 2172 aa, Homo sapiens
MRKKLILFFKRRNHARKQREQKICQRYDQLMEAWEKKVDRIENNPRRKAKESKTREYYEKQFPEIRKQREQQERFQRVGQRGAGLSATIARSEHEISEIIDGLSEQENNEKQMRQLSVIPPMMFDAEQRRVKFINMNGLMEDPMKVYKDRQFMNVWTDHEKEIFKDKFIQHPKNFGLIASYLERKSVPDCVLYYYLTKKNENYKALVRRNYGKRRGRNQQIARPSQEEKVEEKEEDKAEKTEKKEEEKKDEEEKDEKEDSKENTKEKDKIDGTAEETEEREQATPRGRKTANSQGRRKGRITRSMTNEAAAASAAAAAATEEPPPPLPPPPEPISTEPVETSRWTEEEMEVAKKGLVEHGRNWAAIAKMVGTKSEAQCKNFYFNYKRRHNLDNLLQQHKQKTSRKPREERDVSQCESVASTVSAQEDEDIEASNEEENPEDSEGAENSSDTESAPSPSPVEAVKPSEDSPENATSRGNTEPAVELEPTTETAPSTSPSLAVPSTKPAEDESVETQVNDSISAETAEQMDVDQQEHSAEEGSVCDPPPATKADSVDVEVRVPENHASKVEGDNTKERDLDRASEKVEPRDEDLVVAQQINAQRPEPQSDNDSSATCSADEDVDGEPERQRMFPMDSKPSLLNPTGSILVSSPLKPNPLDLPQLQHRAAVIPPMVSCTPCNIPIGTPVSGYALYQRHIKAMHESALLEEQRQRQEQIDLECRSSTSPCGTSKSPNREWEVLQPAPHQVITNLPEGVRLPTTRPTRPPPPLIPSSKTTVASEKPSFIMGGSISQGTPGTYLTSHNQASYTQETPKPSVGSISLGLPRQQESAKSATLPYIKQEEFSPRSQNSQPEGLLVRAQHEGVVRGTAGAIQEGSITRGTPTSKISVESIPSLRGSITQGTPALPQTGIPTEALVKGSISRMPIEDSSPEKGREEAASKGHVIYEGKSGHILSYDNIKNAREGTRSPRTAHEISLKRSYESVEGNIKQGMSMRESPVSAPLEGLICRALPRGSPHSDLKERTVLSGSIMQGTPRATTESFEDGLKYPKQIKRESPPIRAFEGAITKGKPYDGITTIKEMGRSIHEIPRQDILTQESRKTPEVVQSTRPIIEGSISQGTPIKFDNNSGQSAIKHNVKSLITGPSKLSRGMPPLEIVPENIKVVERGKYEDVKAGETVRSRHTSVVSSGPSVLRSTLHEAPKAQLSPGIYDDTSARRTPVSYQNTMSRGSPMMNRTSDVTISSNKSTNHERKSTLTPTQRESIPAKSPVPGVDPVVSHSPFDPHHRGSTAGEVYRSHLPTHLDPAMPFHRALDPAAAAYLFQRQLSPTPGYPSQYQLYAMENTRQTILNDYITSQQMQVNLRPDVARGLSPREQPLGLPYPATRGIIDLTNMPPTILVPHPGGTSTPPMDRITYIPGTQITFPPRPYNSASMSPGHPTHLAAAASAEREREREREKERERERIAAASSDLYLRPGSEQPGRPGSHGYVRSPSPSVRTQETMLQQRPSVFQGTNGTSVITPLDPTAQLRIMPLPAGGPSISQGLPASRYNTAADALAALVDAAASAPQMDVSKTKESKHEAARLEENLRSRSAAVSEQQQLEQKTLEVEKRSVQCLYTSSAFPSGKPQPHSSVVYSEAGKDKGPPPKSRYEEELRTRGKTTITAANFIDVIITRQIASDKDARERGSQSSDSSSSLSSHRYETPSDAIEVISPASSPAPPQEKLQTYQPEVVKANQAENDPTRQYEGPLHHYRPQQESPSPQQQLPPSSQAEGMGQVPRTHRLITLADHICQIITQDFARNQVSSQTPQQPPTSTFQNSPSALVSTPVRTKTSNRYSPESQAQSVHHQRPGSRVSPENLVDKSRGSRPGKSPERSHVSSEPYEPISPPQVPVVHEKQDSLLLLSQRGAEPAEQRNDARSPGSISYLPSFFTKLENTSPMVKSKKQEIFRKLNSSGGGDSDMAAAQPGTEIFNLPAVTTSGSVSSRGHSFADPASNLGLEDIIRKALMGSFDDKVEDHGVVMSQPMGVVPGTANTSVVTSGETRREEGDPSPHSGGVCKPKLISKSNSRKSKSPIPGQGYLGTERPSSVSSVHSEGDYHRQTPGWAWEDRPSSTGSTQFPYNPLTMRMLSSTPPTPIACAPSAVNQAAPHQQNRIWEREPAPLLSAQYETLSDSDD

SEQ ID NO: 907121 - protein, 2456 aa, Homo sapiens; identical to SEQ ID NO: 907118

SEQ ID NO: 907122 - protein, 2514 aa, Homo sapiens
MSSSGYPPNQGAFSTEQSRYPPHSVQYTFPNTRHQQEFAVPDYRSSHLEVSQASQLLQQQQQQQLRRRPSLLSEFHPGSDRPQERRTSYEPFHPGPSPVDHDSLESKRPRLEQVSDSHFQRVSAAVLPLVHPLPEGLRASADAKKDPAFGGKHEAPSSPISGQPCGDDQNASPSKLSKEELIQSMDRVDREIAKVEQQILKLKKKQQQLEEEAAKPPEPEKPVSPPPVEQKHRSIVQIIYDENRKKAEEAHKIFEGLGPKVELPLYNQPSDTKVYHENIKTNQVMRKKLILFFKRRNHARKQREQKICQRYDQLMEAWEKKVDRIENNPRRKAKESKTREYYEKQFPEIRKQREQQERFQRVGQRGAGLSATIARSEHEISEIIDGLSEQENNEKQMRQLSVIPPMMFDAEQRRVKFINMNGLMEDPMKVYKDRQFMNVWTDHEKEIFKDKFIQHPKNFGLIASYLERKSVPDCVLYYYLTKKNENYKALVRRNYGKRRGRNQQIARPSQEEKVEEKEEDKAEKTEKKEEEKKDEEEKDEKEDSKENTKEKDKIDGTAEETEEREQATPRGRKTANSQGRRKGRITRSMTNEAAAASAAAAAATEEPPPPLPPPPEPISTEPVETSRWTEEEMEVAKKGLVEHGRNWAAIAKMVGTKSEAQCKNFYFNYKRRHNLDNLLQQHKQKTSRKPREERDVSQCESVASTVSAQEDEDIEASNEEENPEDSEGAENSSDTESAPSPSPVEAVKPSEDSPENATSRGNTEPAVELEPTTETAPSTSPSLAVPSTKPAEDESVETQVNDSISAETAEQMDVDQQEHSAEEGSVCDPPPATKADSVDVEVRVPENHASKVEGDNTKERDLDRASEKVEPRDEDLVVAQQINAQRPEPQSDNDSSATCSADEDVDGEPERQRMFPMDSKPSLLNPTGSILVSSPLKPNPLDLPQLQHRAAVIPPMVSCTPCNIPIGTPVSGYALYQRHIKAMHESALLEEQRQRQEQIDLECRSSTSPCGTSKSPNREWEGKSVAYMPYAEVKRALEQEAQMHNTAARSASPCRLSPREVSKAAPQPDMSAARYSVPPVLQPAPHQVITNLPEGVRLPTTRPTRPPPPLIPSSKTTVASEKPSFIMGGSISQGTPGTYLTSHNQASYTQETPKPSVGSISLGLPRQQESAKSATLPYIKQEEFSPRSQNSQPEGLLVRAQHEGVVRGTAGAIQEGSITRGTPTSKISVESIPSLRGSITQGTPALPQTGIPTEALVKGSISRMPIEDSSPEKGREEAASKGHVIYEGKSGHILSYDNIKNAREGTRSPRTAHEISLKRSYESVEGNIKQGMSMRESPVSAPLEGLICRALPRGSPHSDLKERTVLSGSIMQGTPRATTESFEDGLKYPKQIKRESPPIRAFEGAITKGKPYDGITTIKEMGRSIHEIPRQDILTQESRKTPEVVQSTRPIIEGSISQGTPIKFDNNSGQSAIKHNVKSLITGPSKLSRGMPPLEIVPENIKVVERGKYEDVKAGETVRSRHTSVVSSGPSVLRSTLHEAPKAQLSPGIYDDTSARRTPVSYQNTMSRGSPMMNRTSDVTISSNKSTNHERKSTLTPTQRESIPAKSPVPGVDPVVSHSPFDPHHRGSTAGEVYRSHLPTHLDPAMPFHRALDPAAAAYLFQRQLSPTPGYPSQYQLYAMENTRQTILNDYITSQQMQVNLRPDVARGLSPREQPLGLPYPATRGIIDLTNMPPTILVPHPGGTSTPPMDRITYIPGTQITFPPRPYNSASMSPGHPTHLAAAASAEREREREREKERERERIAAASSDLYLRPGSEQPGRPGSHGYVRSPSPSVRTQETMLQQRPSVFQGTNGTSVITPLDPTAQLRIMPLPAGGPSISQGLPASRYNTAADALAALVDAAASAPQMDVSKTKESKHEAARLEENLRSRSAAVSEQQQLEQKTLEVEKRSVQCLYTSSAFPSGKPQPHSSVVYSEAGKDKGPPPKSRYEEELRTRGKTTITAANFIDVIITRQIASDKDARERGSQSSDSSSSLSSHRYETPSDAIEVISPASSPAPPQEKLQTYQPEVVKANQAENDPTRQYEGPLHHYRPQQESPSPQQQLPPSSQAEGMGQVPRTHRLITLADHICQIITQDFARNQVSSQTPQQPPTSTFQNSPSALVSTPVRTKTSNRYSPESQAQSVHHQRPGSRVSPENLVDKSRGSRPGKSPERSHVSSEPYEPISPPQVPVVHEKQDSLLLLSQRGAEPAEQRNDARSPGSISYLPSFFTKLENTSPMVKSKKQEIFRKLNSSGGGDSDMAAAQPGTEIFNLPAVTTSGSVSSRGHSFADPASNLGLEDIIRKALMGSFDDKVEDHGVVMSQPMGVVPGTANTSVVTSGETRREEGDPSPHSGGVCKPKLISKSNSRKSKSPIPGQGYLGTERPSSVSSVHSEGDYHRQTPGWAWEDRPSSTGSTQFPYNPLTMRMLSSTPPTPIACAPSAVNQAAPHQQNRIWEREPAPLLSAQYETLSDSDD

SEQ ID NO: 907123 - protein, 2456 aa, Homo sapiens; identical to SEQ ID NO: 907118

SEQ ID NO: 907124 - protein, 2526 aa, Homo sapiens
MSSSGYPPNQGAFSTEQSRYPPHSVQYTFPNTRHQQEFAVPDYRSSHLEVSQASQLLQQQQQQQLRRRPSLLSEFHPGSDRPQERRTSYEPFHPGPSPVDHDSLESKRPRLEQVSDSHFQRVSAAVLPLVHPLPEGLRASADAKKDPAFGGKHEAPSSPISGQPCGDDQNASPSKLSKEELIQSMDRVDREIAKVEQQILKLKKKQQQLEEEAAKPPEPEKPVSPPPVEQKHRSIVQIIYDENRKKAEEAHKIFEGLGPKVELPLYNQPSDTKVYHENIKTNQVMRKKLILFFKRRNHARKQREQKICQRYDQLMEAWEKKVDRIENNPRRKAKESKTREYYEKQFPEIRKQREQQERFQRVGQRGAGLSATIARSEHEISEIIDGLSEQENNEKQMRQLSVIPPMMFDAEQRRVKFINMNGLMEDPMKVYKDRQFMNVWTDHEKEIFKDKFIQHPKNFGLIASYLERKSVPDCVLYYYLTKKNENYKALVRRNYGKRRGRNQQIARPSQEEKVEEKEEDKAEKTEKKEEEKKDEEEKDEKEDSKENTKEKDKIDGTAEETEEREQATPRGRKTANSQGRRKGRITRSMTNEAAAASAAAAAATEEPPPPLPPPPEPISTEPVETSRWTEEEMEVAKKGLVEHGRNWAAIAKMVGTKSEAQCKNFYFNYKRRHNLDNLLQQHKQKTSRKPREERDVSQCESVASTVSAQEDEDIEASNEEENPEDSEGAENSSDTESAPSPSPVEAVKPSEDSPENATSRGNTEPAVELEPTTETAPSTSPSLAVPSTKPAEDESVETQVNDSISAETAEQMDVDQQEHSAEEGSVCDPPPATKADSVDVEVRVPENHASKVEGDNTKERDLDRASEKVEPRDEDLVVAQQINAQRPEPQSDNDSSATCSADEDVDGEPERQRMFPMDSKPSLLNPTGSILVSSPLKPNPLDLPQLQHRAAVIPPMVSCTPCNIPIGTPVSGYALYQRHIKAMHESALLEEQRQRQEQIDLECRSSTSPCGTSKSPNREWEVLQPAPHQVITNLPEGVRLPTTRPTRPPPPLIPSSKTTVASEKPSFIMGGSISQGTPGTYLTSHNQASYTQETPKPSVGSISLGLPRQQESAKSATLPYIKQEEFSPRSQNSQPEGLLVRAQHEGVVRGTAGAIQEGSITRGTPTSKISVESIPSLRGSITQGTPALPQTGIPTEALVKGSISRMPIEDSSPEKGREEAASKGHVIYEGKSGHILSYDNIKNAREGTRSPRTAHEISLKRSYESVEGNIKQGMSMRESPVSAPLEGLICRALPRGSPHSDLKERTVLSGSIMQGTPRATTESFEDGLKYPKQIKRESPPIRAFEGAITKGKPYDGITTIKEMGRSIHEIPRQDILTQESRKTPEVVQSTRPIIEGSISQGTPIKFDNNSGQSAIKHNVKSLITGPSKLSRGMPPLEIVPENIKVVERGKYEDVKAGETVRSRHTSVVSSGPSVLRSTLHEAPKAQLSPGIYDDTSARRTPVSYQNTMSRGSPMMNRTSDVTISSNKSTNHERKSTLTPTQRESIPAKSPVPGVDPVVSHSPFDPHHRGSTAGEVYRSHLPTHLDPAMPFHRALDPAAAAYLFQRQLSPTPGYPSQYQLYAMENTRQTILNDYITSQQMQVNLRPDVARGLSPREQPLGLPYPATRGIIDLTNMPPTILVPHPGGTSTPPMDRITYIPGTQITFPPRPYNSASMSPGHPTHLAAAASAEREREREREKERERERIAAASSDLYLRPGSEQPGRPGSHGYVRSPSPSVRTQETMLQQRPSVFQGTNGTSVITPLDPTAQLRIMSVSCTYFDKKCLLHIHFKICDCNSLSIVMLFCPCHEGFILLLLQFVLPSPHHIPSKWSSLHRAVIWFYLQPLPAGGPSISQGLPASRYNTAADALAALVDAAASAPQMDVSKTKESKHEAARLEENLRSRSAAVSEQQQLEQKTLEVEKRSVQCLYTSSAFPSGKPQPHSSVVYSEAGKDKGPPPKSRYEEELRTRGKTTITAANFIDVIITRQIASDKDARERGSQSSDSSSSLSSHRYETPSDAIEVISPASSPAPPQEKLQTYQPEVVKANQAENDPTRQYEGPLHHYRPQQESPSPQQQLPPSSQAEGMGQVPRTHRLITLADHICQIITQDFARNQVSSQTPQQPPTSTFQNSPSALVSTPVRTKTSNRYSPESQAQSVHHQRPGSRVSPENLVDKSRGSRPGKSPERSHVSSEPYEPISPPQVPVVHEKQDSLLLLSQRGAEPAEQRNDARSPGSISYLPSFFTKLENTSPMVKSKKQEIFRKLNSSGGGDSDMAAAQPGTEIFNLPAVTTSGSVSSRGHSFADPASNLGLEDIIRKALMGSFDDKVEDHGVVMSQPMGVVPGTANTSVVTSGETRREEGDPSPHSGGVCKPKLISKSNSRKSKSPIPGQGYLGTERPSSVSSVHSEGDYHRQTPGWAWEDRPSSTGSTQFPYNPLTMRMLSSTPPTPIACAPSAVNQAAPHQQNRIWEREPAPLLSAQYETLSDSDD

SEQ ID NO: 907125 - protein, 2456 aa, Homo sapiens; identical to SEQ ID NO: 907118

SEQ ID NO: 907126 - protein, 1050 aa, Homo sapiens
KLYVLVERLVLIRQSVLTGPSKLSRGMPPLEIVPENIKVVERGKYEDVKAGETVRSRHTSVVSSGPSVLRSTLHEAPKAQLSPGIYDDTSARRTPVSYQNTMSRGSPMMNRTSDVTISSNKSTNHERKSTLTPTQRESIPAKSPVPGVDPVVSHSPFDPHHRGSTAGEVYRSHLPTHLDPAMPFHRALDPAAAAYLFQRQLSPTPGYPSQYQLYAMENTRQTILNDYITSQQMQVNLRPDVARGLSPREQPLGLPYPATRGIIDLTNMPPTILVPHPGGTSTPPMDRITYIPGTQITFPPRPYNSASMSPGHPTHLAAAASAEREREREREKERERERIAAASSDLYLRPGSEQPGRPGSHGYVRSPSPSVRTQETMLQQRPSVFQGTNGTSVITPLDPTAQLRIMPLPAGGPSISQGLPASRYNTAADALAALVDAAASAPQMDVSKTKESKHEAARLEENLRSRSAAVSEQQQLEQKTLEVEKRSVQCLYTSSAFPSGKPQPHSSVVYSEAGKDKGPPPKSRYEEELRTRGKTTITAANFIDVIITRQIASDKDARERGSQSSDSSSSLSSHRYETPSDAIEVISPASSPAPPQEKLQTYQPEVVKANQAENDPTRQYEGPLHHYRPQQESPSPQQQLPPSSQAEGMGQVPRTHRLITLADHICQIITQDFARNQVSSQTPQQPPTSTFQNSPSALVSTPVRTKTSNRYSPESQAQSVHHQRPGSRVSPENLVDKSRGSRPGKSPERSHVSSEPYEPISPPQVPVVHEKQDSLLLLSQRGAEPAEQRNDARSPGSISYLPSFFTKLENTSPMVKSKKQEIFRKLNSSGGGDSDMAAAQPGTEIFNLPAVTTSGSVSSRGHSFADPASNLGLEDIIRKALMGSFDDKVEDHGVVMSQPMGVVPGTANTSVVTSGETRREEGDPSPHSGGVCKPKLISKSNSRKSKSPIPGQGYLGTERPSSVSSVHSEGDYHRQTPGWAWEDRPSSTGSTQFPYNPLTMRMLSSTPPTPIACAPSAVNQAAPHQQNRIWEREPAPLLSAQYETLSDSDD

SEQ ID NO: 907127 - protein, 455 aa, Homo sapiens
MSEKHRHSWSKTSMCSLLDDPTRQYEGPLHHYRPQQESPSPQQQLPPSSQAEGMGQVPRTHRLITLADHICQIITQDFARNQVSSQTPQQPPTSTFQNSPSALVSTPVRTKTSNRYSPESQAQSVHHQRPGSRVSPENLVDKSRGSRPGKSPERSHVSSEPYEPISPPQVPVVHEKQDSLLLLSQRGAEPAEQRNDARSPGSISYLPSFFTKLENTSPMVKSKKQEIFRKLNSSGGGDSDMAAAQPGTEIFNLPAVTTSGSVSSRGHSFADPASNLGLEDIIRKALMGSFDDKVEDHGVVMSQPMGVVPGTANTSVVTSGETRREEGDPSPHSGGVCKPKLISKSNSRKSKSPIPGQGYLGTERPSSVSSVHSEGDYHRQTPGWAWEDRPSSTGSTQFPYNPLTMRMLSSTPPTPIACAPSAVNQAAPHQQNRIWEREPAPLLSAQYETLSDSDD

SEQ ID NO: 907128 - protein, 390 aa, Homo sapiens
FISHSQQIITQDFARNQVSSQTPQQPPTSTFQNSPSALVSTPVRTKTSNRYSPESQAQSVHHQRPGSRVSPENLVDKSRGSRPGKSPERSHVSSEPYEPISPPQVPVVHEKQDSLLLLSQRGAEPAEQRNDARSPGSISYLPSFFTKLENTSPMVKSKKQEIFRKLNSSGGGDSDMAAAQPGTEIFNLPAVTTSGSVSSRGHSFADPASNLGLEDIIRKALMGSFDDKVEDHGVVMSQPMGVVPGTANTSVVTSGETRREEGDPSPHSGGVCKPKLISKSNSRKSKSPIPGQGYLGTERPSSVSSVHSEGDYHRQTPGWAWEDRPSSTGSTQFPYNPLTMRMLSSTPPTPIACAPSAVNQAAPHQQNRIWEREPAPLLSAQYETLSDSDD

SEQ ID NO: 907129 - protein, 2380 aa, Homo sapiens
MSSSGYPPNQGAFSTEQSRYPPHSVQYTFPNTRHQQEFAVPDYRSSHLEVSQASQLLQQQQQQQLRRRPSLLSEFHPGSDRPQERRTSYEPFHPGPSPVDHDSLESKRPRLEQVSDSHFQRVSAAVLPLVHPLPEGLRASADAKKDPAFGGKHEAPSSPISGQPCGDDQNASPSKLSKEELIQSMDRVDREIAKVEQQILKLKKKQQQLEEEAAKPPEPEKPVSPPPVEQKHRSIVQIIYDENRKKAEEAHKIFEGLGPKVELPLYNQPSDTKVYHENIKTNQVMRKKLILFFKRRNHARKQREQKICQRYDQLMEAWEKKVDRIENNPRRKAKESKTREYYEKQFPEIRKQREQQERFQRVGQRGAGLSATIARSEHEISEIIDGLSEQENNEKQMRQLSVIPPMMFDAEQRRVKFINMNGLMEDPMKVYKDRQFMNVWTDHEKEIFKDKFIQHPKNFGLIASYLERKSVPDCVLYYYLTKKNENYKALVRRNYGKRRGRNQQIARPSQEEKVEEKEEDKAEKTEKKEEEKKDEEEKDEKEDSKENTKEKDKIDGTAEETEEREQATPRGRKTANSQGRRKGRITRSMTNEAAAASAAAAAATEEPPPPLPPPPEPISTEPVETSRWTEEEMEVAKKGLVEHGRNWAAIAKMVGTKSEAQCKNFYFNYKRRHNLDNLLQQHKQKTSRKPREERDVSQCESVASTVSAQEDEDIEASNEEENPEDSEGAENSSDTESAPSPSPVEAVKPSEDSPENATSRGNTEPAVELEPTTETAPSTSPSLAVPSTKPAEDESVETQVNDSISAETAEQMDVDQQEHSAEEGSVCDPPPATKADSVDVEVRVPENHASKVEGDNTKERDLDRASEKVEPRDEDLVVAQQINAQRPEPQSDNDSSATCSADEDVDGEPERQRMFPMDSKPSLLNPTGSILVSSPLKPNPLDLPQLQHRAAVIPPMVSCTPCNIPIGTPVSGYALYQRHIKAMHESALLEEQRQRQEQIDLECRSSTSPCGTSKSPNREWEVLQPAPHQVITNLPEGVRLPTTRPTRPPPPLIPSSKTTVASEKPSFIMGGSISQGTPGTYLTSHNQASYTQETPKPSVGSISLGLPRQQESAKSATLPYIKQEEFSPRSQNSQPEGLLVRAQHEGVVRGTAGAIQEGSITRGTPTSKISVESIPSLRGSITQGTPALPQTGIPTEALVKGSISRMPIEDSSPEKGREEAASKGHVIYEGKSGHILSYDNIKNAREGTRSPRTAHEISLKRSYESVEGNIKQGMSMRESPVSAPLEGLICRALPRGSPHSDLKERTVLSGSIMQGTPRATTESFEDGLKYPKQIKRESPPIRAFEGAITKGKPYDGITTIKEMGRSIHEIPRQDILTQESRKTPEVVQSTRPIIEGSISQGTPIKFDNNSGQSAIKHNVKSLITGPSKLSRGMPPLEIVPENIKVVERGKYEDVKAGETVRSRHTSVVSSGPSVLRSTLHEAPKAQLSPGIYDDTSARRTPVSYQNTMSRGSPMMNRTSDVTISSNKSTNHERKSTLTPTQRESIPAKSPVPGVDPVVSHSPFDPHHRGSTAGEVYRSHLPTHLDPAMPFHRALDPAAAAYLFQRQLSPTPGYPSQYQLYAMENTRQTILNDYITSQQMQVNLRPDVARGLSPREQPLGLPYPATRGIIDLTNMPPTILVPHPGGTSTPPMDRITYIPGTQITFPPRPYNSASMSPGHPTHLAAAASAEREREREREKERERERIAAASSDLYLRPGSEQPGRPGSHGYVRSPSPSVRTQETMLQQRPSVFQGTNGTSVITPLDPTAQLRIMPLPAGGPSISQGLPASRYNTAADALAALVDAAASAPQMDVSKTKESKHEAARLEENLRSRSAAVSEQQQLEQKTLEVEKRSVQCLYTSSAFPSGKPQPHSSVVYSEAGKDKGPPPKSRYEEELRTRGKTTITAANFIDVIITRQIASDKDARERGSQSSDSSSSLSSHRYETPSDAIEVISPASSPAPPQEKLQTYQPEVVKANQAENDPTRQYEGPLHHYRPQQESPSPQQQLPPSSQAEGMGQVPRTHRLITLADHICQIITQDFARNQVSSQTPQQPPTSTFQNSPSALVSTPVRTKTSNRYSPESQAQSVHHQRPGSRVSPENLVDKSRGSRPGKSPERSHVSSEPYEPISPPQVPVVHEKQDSLLLLSQRGAEPAEQRNDARSPGSISYLPSFFTKLENTSPMVKSKKQEIFRKLNSSGGGDSDMAAAQPGTEIFNLPAVTTSGSVSSRGHSFADPASNLGLEDIIRKALMGSFDDKVEDHGVVMSQPMGVVPGTANTSVVTSGETRREEGDPSPHSGTAFILVLFCCFSPKKPVYFPNSDASLRHFIYVFMCSESPLRVSVT

SEQ ID NO: 907130 - protein, 1934 aa, Homo sapiens
MSSSGYPPNQGAFSTEQSRYPPHSVQYTFPNTRHQQEFAVPDYRSSHLEVSQASQLLQQQQQQQLRRRPSLLSEFHPGSDRPQERRTSYEPFHPGPSPVDHDSLESKRPRLEQVSDSHFQRVSAAVLPLVHPLPEGLRASADAKKDPAFGGKHEAPSSPISGQPCGDDQNASPSKLSKEELIQSMDRVDREIAKVEQQILKLKKKQQQLEEEAAKPPEPEKPVSPPPVEQKHRSIVQIIYDENRKKAEEAHKIFEGLGPKVELPLYNQPSDTKVYHENIKTNQVMRKKLILFFKRRNHARKQREQKICQRYDQLMEAWEKKVDRIENNPRRKAKESKTREYYEKQFPEIRKQREQQERFQRVGQRGAGLSATIARSEHEISEIIDGLSEQENNEKQMRQLSVIPPMMFDAEQRRVKFINMNGLMEDPMKVYKDRQFMNVWTDHEKEIFKDKFIQHPKNFGLIASYLERKSVPDCVLYYYLTKKNENYKALVRRNYGKRRGRNQQIARPSQEEKVEEKEEDKAEKTEKKEEEKKDEEEKDEKEDSKENTKEKDKIDGTAEETEEREQATPRGRKTANSQGRRKGRITRSMTNEAAAASAAAAAATEEPPPPLPPPPEPISTEPVETSRWTEEEMEVAKKGLVEHGRNWAAIAKMVGTKSEAQCKNFYFNYKRRHNLDNLLQQHKQKTSRKPREERDVSQCESVASTVSAQEDEDIEASNEEENPEDSEGAENSSDTESAPSPSPVEAVKPSEDSPENATSRGNTEPAVELEPTTETAPSTSPSLAVPSTKPAEDESVETQVNDSISAETAEQMDVDQQEHSAEEGSVCDPPPATKADSVDVEVRVPENHASKVEGDNTKERDLDRASEKVEPRDEDLVVAQQINAQRPEPQSDNDSSATCSADEDVDGEPERQRMFPMDSKPSLLNPTGSILVSSPLKPNPLDLPQLQHRAAVIPPMVSCTPCNIPIGTPVSGYALYQRHIKAMHESALLEEQRQRQEQIDLECRSSTSPCGTSKSPNREWEVLQPAPHQVITNLPEGVRLPTTRPTRPPPPLIPSSKTTVASEKPSFIMGGSISQGTPGTYLTSHNQASYTQETPKPSVGSISLGLPRQQESAKSATLPYIKQEEFSPRSQNSQPEGLLVRAQHEGVVRGTAGAIQEGSITRGTPTSKISVESIPSLRGSITQGTPALPQTGIPTEALVKGSISRMPIEDSSPEKGREEAASKGHVIYEGKSGHILSYDNIKNAREGTRSPRTAHEISLKRSYESVEGNIKQGMSMRESPVSAPLEGLICRALPRGSPHSDLKERTVLSGSIMQGTPRATTESFEDGLKYPKQIKRESPPIRAFEGAITKGKPYDGITTIKEMGRSIHEIPRQDILTQESRKTPEVVQSTRPIIEGSISQGTPIKFDNNSGQSAIKHNVKSLITGPSKLSRGMPPLEIVPENIKVVERGKYEDVKAGETVRSRHTSVVSSGPSVLRSTLHEAPKAQLSPGIYDDTSARRTPVSYQNTMSRGSPMMNRTSDVTISSNKSTNHERKSTLTPTQRESIPAKSPVPGVDPVVSHSPFDPHHRGSTAGEVYRSHLPTHLDPAMPFHRALDPAAAAYLFQRQLSPTPGYPSQYQLYAMENTRQTILNDYITSQQMQVNLRPDVARGLSPREQPLGLPYPATRGIIDLTNMPPTILVPHPGGTSTPPMDRITYIPGTQITFPPRPYNSASMSPGHPTHLAAAASAEREREREREKERERERIAAASSDLYLRPGSEQPGRPGSHGYVRSPSPSVRTQETMLQQRPSVFQGTNGTSVITPLDPTAQLRIMSVSCTYFDKKCLLHIHFKICDCNSLSIVMLFCPCHEGFILLLLQFVLPSPHHIPSKWSSLHRAVIWFYLQATACWGPFNKPRPASLPLQHCCGCPGCSCGCCSFCTPDGCVQNKREPAWARW

SEQ ID NO: 907131 - protein, 1535 aa, Homo sapiens
MSSSGYPPNQGAFSTEQSRYPPHSVQYTFPNTRHQQEFAVPDYRSSHLEVSQASQLLQQQQQQQLRRRPSLLSEFHPGSDRPQERRTSYEPFHPGPSPVDHDSLESKRPRLEQVSDSHFQRVSAAVLPLVHPLPEGLRASADAKKDPAFGGKHEAPSSPISGQPCGDDQNASPSKLSKEELIQSMDRVDREIAKVEQQILKLKKKQQQLEEEAAKPPEPEKPVSPPPVEQKHRSIVQIIYDENRKKAEEAHKIFEGLGPKVELPLYNQPSDTKVYHENIKTNQVMRKKLILFFKRRNHARKQREQKICQRYDQLMEAWEKKVDRIENNPRRKAKESKTREYYEKQFPEIRKQREQQERFQRVGQRGAGLSATIARSEHEISEIIDGLSEQENNEKQMRQLSVIPPMMFDAEQRRVKFINMNGLMEDPMKVYKDRQFMNVWTDHEKEIFKDKFIQHPKNFGLIASYLERKSVPDCVLYYYLTKKNENYKALVRRNYGKRRGRNQQIARPSQEEKVEEKEEDKAEKTEKKEEEKKDEEEKDEKEDSKENTKEKDKIDGTAEETEEREQATPRGRKTANSQGRRKGRITRSMTNEAAAASAAAAAATEEPPPPLPPPPEPISTEPVETSRWTEEEMEVAKKGLVEHGRNWAAIAKMVGTKSEAQCKNFYFNYKRRHNLDNLLQQHKQKTSRKPREERDVSQCESVASTVSAQEDEDIEASNEEENPEDSEGAENSSDTESAPSPSPVEAVKPSEDSPENATSRGNTEPAVELEPTTETAPSTSPSLAVPSTKPAEDESVETQVNDSISAETAEQMDVDQQEHSAEEGSVCDPPPATKADSVDVEVRVPENHASKVEGDNTKERDLDRASEKVEPRDEDLVVAQQINAQRPEPQSDNDSSATCSADEDVDGEPERQRMFPMDSKPSLLNPTGSILVSSPLKPNPLDLPQLQHRAAVIPPMVSCTPCNIPIGTPVSGYALYQRHIKAMHESALLEEQRQRQEQIDLECRSSTSPCGTSKSPNREWEVLQPAPHQVITNLPEGVRLPTTRPTRPPPPLIPSSKTTVASEKPSFIMGGSISQGTPGTYLTSHNQASYTQETPKPSVGSISLGLPRQQESAKSATLPYIKQEEFSPRSQNSQPEGLLVRAQHEGVVRGTAGAIQEGSITRGTPTSKISVESIPSLRGSITQGTPALPQTGIPTEALVKGSISRMPIEDSSPEKGREEAASKGHVIYEGKSGHILSYDNIKNAREGTRSPRTAHEISLKRSYESVEGNIKQGMSMRESPVSAPLEGLICRALPRGSPHSDLKERTVLSGSIMQGTPRATTESFEDGLKYPKQIKRESPPIRAFEGAITKGKPYDGITTIKEMGRSIHEIPRQDILTQESRKTPEVVQSTRPIIEGSISQGTPIKFDNNSGQSAIKHNVKSLITGPSKLSRGMPPLEIVPENIKVVERGKYEDVKAGETVRSRHTSVVSSGPSVLRSTLHEAPKAQLSPGIYDDTSARRTPVSYQNTMSRGSPMMNRTSDGMLLLLLGLILFIAF

SEQ ID NO: 907132 - protein, 1257 aa, Homo sapiens
MSSSGYPPNQGAFSTEQSRYPPHSVQYTFPNTRHQQEFAVPDYRSSHLEVSQASQLLQQQQQQQLRRRPSLLSEFHPGSDRPQERRTSYEPFHPGPSPVDHDSLESKRPRLEQVSDSHFQRVSAAVLPLVHPLPEGLRASADAKKDPAFGGKHEAPSSPISGQPCGDDQNASPSKLSKEELIQSMDRVDREIAKVEQQILKLKKKQQQLEEEAAKPPEPEKPVSPPPVEQKHRSIVQIIYDENRKKAEEAHKIFEGLGPKVELPLYNQPSDTKVYHENIKTNQVMRKKLILFFKRRNHARKQREQKICQRYDQLMEAWEKKVDRIENNPRRKAKESKTREYYEKQFPEIRKQREQQERFQRVGQRGAGLSATIARSEHEISEIIDGLSEQENNEKQMRQLSVIPPMMFDAEQRRVKFINMNGLMEDPMKVYKDRQFMNVWTDHEKEIFKDKFIQHPKNFGLIASYLERKSVPDCVLYYYLTKKNENYKALVRRNYGKRRGRNQQIARPSQEEKVEEKEEDKAEKTEKKEEEKKDEEEKDEKEDSKENTKEKDKIDGTAEETEEREQATPRGRKTANSQGRRKGRITRSMTNEAAAASAAAAAATEEPPPPLPPPPEPISTEPVETSRWTEEEMEVAKKGLVEHGRNWAAIAKMVGTKSEAQCKNFYFNYKRRHNLDNLLQQHKQKTSRKPREERDVSQCESVASTVSAQEDEDIEASNEEENPEDSEGAENSSDTESAPSPSPVEAVKPSEDSPENATSRGNTEPAVELEPTTETAPSTSPSLAVPSTKPAEDESVETQVNDSISAETAEQMDVDQQEHSAEEGSVCDPPPATKADSVDVEVRVPENHASKVEGDNTKERDLDRASEKVEPRDEDLVVAQQINAQRPEPQSDNDSSATCSADEDVDGEPERQRMFPMDSKPSLLNPTGSILVSSPLKPNPLDLPQLQHRAAVIPPMVSCTPCNIPIGTPVSGYALYQRHIKAMHESALLEEQRQRQEQIDLECRSSTSPCGTSKSPNREWEVLQPAPHQVITNLPEGVRLPTTRPTRPPPPLIPSSKTTVASEKPSFIMGGSISQGTPGTYLTSHNQASYTQETPKPSVGSISLGLPRQQESAKSATLPYIKQEEFSPRSQNSQPEGLLVRAQHEGVVRGTAGAIQEGSITRGTPTSKISVESIPSLRGSITQGTPALPQTGIPTEALVKGSISRMPIEDSSPEKGREEAASKGHVIYEGKSGHILSYDSKYCMYAPKPVLQYVLKT

SEQ ID NO: 907133 - protein, 1065 aa, Homo sapiens
MSSSGYPPNQGAFSTEQSRYPPHSVQYTFPNTRHQQEFAVPDYRSSHLEVSQASQLLQQQQQQQLRRRPSLLSEFHPGSDRPQERRTSYEPFHPGPSPVDHDSLESKRPRLEQVSDSHFQRVSAAVLPLVHPLPEGLRASADAKKDPAFGGKHEAPSSPISGQPCGDDQNASPSKLSKEELIQSMDRVDREIAKVEQQILKLKKKQQQLEEEAAKPPEPEKPVSPPPVEQKHRSIVQIIYDENRKKAEEAHKIFEGLGPKVELPLYNQPSDTKVYHENIKTNQVMRKKLILFFKRRNHARKQREQKICQRYDQLMEAWEKKVDRIENNPRRKAKESKTREYYEKQFPEIRKQREQQERFQRVGQRGAGLSATIARSEHEISEIIDGLSEQENNEKQMRQLSVIPPMMFDAEQRRVKFINMNGLMEDPMKVYKDRQFMNVWTDHEKEIFKDKFIQHPKNFGLIASYLERKSVPDCVLYYYLTKKNENYKALVRRNYGKRRGRNQQIARPSQEEKVEEKEEDKAEKTEKKEEEKKDEEEKDEKEDSKENTKEKDKIDGTAEETEEREQATPRGRKTANSQGRRKGRITRSMTNEAAAASAAAAAATEEPPPPLPPPPEPISTEPVETSRWTEEEMEVAKKGLVEHGRNWAAIAKMVGTKSEAQCKNFYFNYKRRHNLDNLLQQHKQKTSRKPREERDVSQCESVASTVSAQEDEDIEASNEEENPEDSEGAENSSDTESAPSPSPVEAVKPSEDSPENATSRGNTEPAVELEPTTETAPSTSPSLAVPSTKPAEDESVETQVNDSISAETAEQMDVDQQEHSAEEGSVCDPPPATKADSVDVEVRVPENHASKVEGDNTKERDLDRASEKVEPRDEDLVVAQQINAQRPEPQSDNDSSATCSADEDVDGEPERQRMFPMDSKPSLLNPTGSILVSSPLKPNPLDLPQLQHRAAVIPPMVSCTPCNIPIGTPVSGYALYQRHIKAMHESALLEEQRQRQEQIDLECRSSTSPCGTSKSPNREWEVLQPAPHQVITNLPEGVRLPTTRPTRPPPPLIPSSKSNVGSVPL

SEQ ID NO: 907134 - protein, 898 aa, Homo sapiens
MSSSGYPPNQGAFSTEQSRYPPHSVQYTFPNTRHQQEFAVPDYRSSHLEVSQASQLLQQQQQQQLRRRPSLLSEFHPGSDRPQERRTSYEPFHPGPSPVDHDSLESKRPRLEQVSDSHFQRVSAAVLPLVHPLPEGLRASADAKKDPAFGGKHEAPSSPISGQPCGDDQNASPSKLSKEELIQSMDRVDREIAKVEQQILKLKKKQQQLEEEAAKPPEPEKPVSPPPVEQKHRSIVQIIYDENRKKAEEAHKIFEGLGPKVELPLYNQPSDTKVYHENIKTNQVMRKKLILFFKRRNHARKQREQKICQRYDQLMEAWEKKVDRIENNPRRKAKESKTREYYEKQFPEIRKQREQQERFQRVGQRGAGLSATIARSEHEISEIIDGLSEQENNEKQMRQLSVIPPMMFDAEQRRVKFINMNGLMEDPMKVYKDRQFMNVWTDHEKEIFKDKFIQHPKNFGLIASYLERKSVPDCVLYYYLTKKNENYKALVRRNYGKRRGRNQQIARPSQEEKVEEKEEDKAEKTEKKEEEKKDEEEKDEKEDSKENTKEKDKIDGTAEETEEREQATPRGRKTANSQGRRKGRITRSMTNEAAAASAAAAAATEEPPPPLPPPPEPISTEPVETSRWTEEEMEVAKKGLVEHGRNWAAIAKMVGTKSEAQCKNFYFNYKRRHNLDNLLQQHKQKTSRKPREERDVSQCESVASTVSAQEDEDIEASNEEENPEDSEGAENSSDTESAPSPSPVEAVKPSEDSPENATSRGNTEPAVELEPTTETAPSTSPSLAVPSTKPAEDESVETQVNDSISAETAEQMDVDQQEHSAEEGSVCDPPPATKADSVDVEVRVPENHASKVEGDNTKERDLDRASEKVEPRDEDLVVAQQINAQRPEPQSDNDSSGE

SEQ ID NO: 907135 - protein, 585 aa, Homo sapiens
MSSSGYPPNQGAFSTEQSRYPPHSVQYTFPNTRHQQEFAVPDYRSSHLEVSQASQLLQQQQQQQLRRRPSLLSEFHPGSDRPQERRTSYEPFHPGPSPVDHDSLESKRPRLEQVSDSHFQRVSAAVLPLVHPLPEGLRASADAKKDPAFGGKHEAPSSPISGQPCGDDQNASPSKLSKEELIQSMDRVDREIAKVEQQILKLKKKQQQLEEEAAKPPEPEKPVSPPPVEQKHRSIVQIIYDENRKKAEEAHKIFEGLGPKVELPLYNQPSDTKVYHENIKTNQVMRKKLILFFKRRNHARKQREQKICQRYDQLMEAWEKKVDRIENNPRRKAKESKTREYYEKQFPEIRKQREQQERFQRVGQRGAGLSATIARSEHEISEIIDGLSEQENNEKQMRQLSVIPPMMFDAEQRRVKFINMNGLMEDPMKVYKDRQFMNVWTDHEKEIFKDKFIQHPKNFGLIASYLERKSVPDCVLYYYLTKKNENYKALVRRNYGKRRGRNQQIARPSQEEKVEEKEEDKAEKTEKKEEEKKDEEEKDEKEDSKENTKEKYEEKEEDKAEKTEKKEEEKKDEEEKDEKEDSKKK

SEQ ID NO: 907136 - protein, 281 aa, Homo sapiens
MSSSGYPPNQGAFSTEQSRYPPHSVQYTFPNTRHQQEFAVPDYRSSHLEVSQASQLLQQQQQQQLRRRPSLLSEFHPGSDRPQERRTSYEPFHPGPSPVDHDSLESKRPRLEQVSDSHFQRVSAAVLPLVHPLPEGLRASADAKKDPAFGGKHEAPSSPISGQPCGDDQNASPSKLSKEELIQSMDRVDREIAKVEQQILKLKKKQQQLEEEAAKPPEPEKPVSPPPVEQKHRSIVQIIYDENRKKAEEAHKIFEGLGPKVELPLYNQPSDTKVYHENIKT

SEQ ID NO: 907137 - protein, 70 aa, Homo sapiens
RSVIGGADSVDVEVRVPENHASKVEGDNTKERDLDRASEKVEPRDEDLVVAQQINAQRPEPQSDNDSSGE

SEQ ID NO: 907138 - protein, 152 aa, Homo sapiens
VESRWRPRWRSSSRGGGGGWSERPTRRAERGPGVGPRAVAASHSSGRGARRLPRLASSRVSLLLPRLECNGTISAHRNLCLLGSSDSPASASRVAGITGMCHHAWLIFIFSVETGFHHVGQAGLELSTSGDPPASASQSAGITGVSHRTRPI

SEQ ID NO: 907139 - protein, 2456 aa, Homo sapiens; identical to SEQ ID NO: 907118

SEQ ID NO: 907140 - protein, 2198 aa, Homo sapiens
MIKDCPLYNQPSDTKVYHENIKTNQVMRKKLILFFKRRNHARKQREQKICQRYDQLMEAWEKKVDRIENNPRRKAKESKTREYYEKQFPEIRKQREQQERFQRVGQRGAGLSATIARSEHEISEIIDGLSEQENNEKQMRQLSVIPPMMFDAEQRRVKFINMNGLMEDPMKVYKDRQFMNVWTDHEKEIFKDKFIQHPKNFGLIASYLERKSVPDCVLYYYLTKKNENYKALVRRNYGKRRGRNQQIARPSQEEKVEEKEEDKAEKTEKKEEEKKDEEEKDEKEDSKENTKEKDKIDGTAEETEEREQATPRGRKTANSQGRRKGRITRSMTNEAAAASAAAAAATEEPPPPLPPPPEPISTEPVETSRWTEEEMEVAKKGLVEHGRNWAAIAKMVGTKSEAQCKNFYFNYKRRHNLDNLLQQHKQKTSRKPREERDVSQCESVASTVSAQEDEDIEASNEEENPEDSEGAENSSDTESAPSPSPVEAVKPSEDSPENATSRGNTEPAVELEPTTETAPSTSPSLAVPSTKPAEDESVETQVNDSISAETAEQMDVDQQEHSAEEGSVCDPPPATKADSVDVEVRVPENHASKVEGDNTKERDLDRASEKVEPRDEDLVVAQQINAQRPEPQSDNDSSATCSADEDVDGEPERQRMFPMDSKPSLLNPTGSILVSSPLKPNPLDLPQLQHRAAVIPPMVSCTPCNIPIGTPVSGYALYQRHIKAMHESALLEEQRQRQEQIDLECRSSTSPCGTSKSPNREWEVLQPAPHQVITNLPEGVRLPTTRPTRPPPPLIPSSKTTVASEKPSFIMGGSISQGTPGTYLTSHNQASYTQETPKPSVGSISLGLPRQQESAKSATLPYIKQEEFSPRSQNSQPEGLLVRAQHEGVVRGTAGAIQEGSITRGTPTSKISVESIPSLRGSITQGTPALPQTGIPTEALVKGSISRMPIEDSSPEKGREEAASKGHVIYEGKSGHILSYDNIKNAREGTRSPRTAHEISLKRSYESVEGNIKQGMSMRESPVSAPLEGLICRALPRGSPHSDLKERTVLSGSIMQGTPRATTESFEDGLKYPKQIKRESPPIRAFEGAITKGKPYDGITTIKEMGRSIHEIPRQDILTQESRKTPEVVQSTRPIIEGSISQGTPIKFDNNSGQSAIKHNVKSLITGPSKLSRGMPPLEIVPENIKVVERGKYEDVKAGETVRSRHTSVVSSGPSVLRSTLHEAPKAQLSPGIYDDTSARRTPVSYQNTMSRGSPMMNRTSDVTISSNKSTNHERKSTLTPTQRESIPAKSPVPGVDPVVSHSPFDPHHRGSTAGEVYRSHLPTHLDPAMPFHRALDPAAAAYLFQRQLSPTPGYPSQYQLYAMENTRQTILNDYITSQQMQVNLRPDVARGLSPREQPLGLPYPATRGIIDLTNMPPTILVPHPGGTSTPPMDRITYIPGTQITFPPRPYNSASMSPGHPTHLAAAASAEREREREREKERERERIAAASSDLYLRPGSEQPGRPGSHGYVRSPSPSVRTQETMLQQRPSVFQGTNGTSVITPLDPTAQLRIMPLPAGGPSISQGLPASRYNTAADALAALVDAAASAPQMDVSKTKESKHEAARLEENLRSRSAAVSEQQQLEQKTLEVEKRSVQCLYTSSAFPSGKPQPHSSVVYSEAGKDKGPPPKSRYEEELRTRGKTTITAANFIDVIITRQIASDKDARERGSQSSDSSSSLSSHRYETPSDAIEVISPASSPAPPQEKLQTYQPEVVKANQAENDPTRQYEGPLHHYRPQQESPSPQQQLPPSSQAEGMGQVPRTHRLITLADHICQIITQDFARNQVSSQTPQQPPTSTFQNSPSALVSTPVRTKTSNRYSPESQAQSVHHQRPGSRVSPENLVDKSRGSRPGKSPERSHVSSEPYEPISPPQVPVVHEKQDSLLLLSQRGAEPAEQRNDARSPGSISYLPSFFTKLENTSPMVKSKKQEIFRKLNSSGGGDSDMAAAQPGTEIFNLPAVTTSGSVSSRGHSFADPASNLGLEDIIRKALMGSFDDKVEDHGVVMSQPMGVVPGTANTSVVTSGETRREEGDPSPHSGGVCKPKLISKSNSRKSKSPIPGQGYLGTERPSSVSSVHSEGDYHRQTPGWAWEDRPSSTGSTQFPYNPLTMRMLSSTPPTPIACAPSAVNQAAPHQQNRIWEREPAPLLSAQYETLSDSDD

SEQ ID NO: 907141 - protein, 2456 aa, Homo sapiens; identical to SEQ ID NO: 907118

SEQ ID NO: 907142 - protein, 1645 aa, Homo sapiens [sequence omitted]

SEQ ID NO: 907143 - protein, 1616 aa, Homo sapiens
GDIVTVGECRPLSKTVRFNVLKVTKAAGTKKQFQKFEAGHRPAPHIVQRLSQTLNYATCSADEDVDGEPERQRMFPMDSKPSLLNPTGSILVSSPLKPNPLDLPQLQHRAAVIPPMVSCTPCNIPIGTPVSGYALYQRHIKAMHESALLEEQRQRQEQIDLECRSSTSPCGTSKSPNREWEVLQPAPHQVITNLPEGVRLPTTRPTRPPPPLIPSSKTTVASEKPSFIMGGSISQGTPGTYLTSHNQASYTQETPKPSVGSISLGLPRQQESAKSATLPYIKQEEFSPRSQNSQPEGLLVRAQHEGVVRGTAGAIQEGSITRGTPTSKISVESIPSLRGSITQGTPALPQTGIPTEALVKGSISRMPIEDSSPEKGREEAASKGHVIYEGKSGHILSYDNIKNAREGTRSPRTAHEISLKRSYESVEGNIKQGMSMRESPVSAPLEGLICRALPRGSPHSDLKERTVLSGSIMQGTPRATTESFEDGLKYPKQIKRESPPIRAFEGAITKGKPYDGITTIKEMGRSIHEIPRQDILTQESRKTPEVVQSTRPIIEGSISQGTPIKFDNNSGQSAIKHNVKSLITGPSKLSRGMPPLEIVPENIKVVERGKYEDVKAGETVRSRHTSVVSSGPSVLRSTLHEAPKAQLSPGIYDDTSARRTPVSYQNTMSRGSPMMNRTSDVTISSNKSTNHERKSTLTPTQRESIPAKSPVPGVDPVVSHSPFDPHHRGSTAGEVYRSHLPTHLDPAMPFHRALDPAAAAYLFQRQLSPTPGYPSQYQLYAMENTRQTILNDYITSQQMQVNLRPDVARGLSPREQPLGLPYPATRGIIDLTNMPPTILVPHPGGTSTPPMDRITYIPGTQITFPPRPYNSASMSPGHPTHLAAAASAEREREREREKERERERIAAASSDLYLRPGSEQPGRPGSHGYVRSPSPSVRTQETMLQQRPSVFQGTNGTSVITPLDPTAQLRIMPLPAGGPSISQGLPASRYNTAADALAALVDAAASAPQMDVSKTKESKHEAARLEENLRSRSAAVSEQQQLEQKTLEVEKRSVQCLYTSSAFPSGKPQPHSSVVYSEAGKDKGPPPKSRYEEELRTRGKTTITAANFIDVIITRQIASDKDARERGSQSSDSSSSLSSHRYETPSDAIEVISPASSPAPPQEKLQTYQPEVVKANQAENDPTRQYEGPLHHYRPQQESPSPQQQLPPSSQAEGMGQVPRTHRLITLADHICQIITQDFARNQVSSQTPQQPPTSTFQNSPSALVSTPVRTKTSNRYSPESQAQSVHHQRPGSRVSPENLVDKSRGSRPGKSPERSHVSSEPYEPISPPQVPVVHEKQDSLLLLSQRGAEPAEQRNDARSPGSISYLPSFFTKLENTSPMVKSKKQEIFRKLNSSGGGDSDMAAAQPGTEIFNLPAVTTSGSVSSRGHSFADPASNLGLEDIIRKALMGSFDDKVEDHGVVMSQPMGVVPGTANTSVVTSGETRREEGDPSPHSGGVCKPKLISKSNSRKSKSPIPGQGYLGTERPSSVSSVHSEGDYHRQTPGWAWEDRPSSTGSTQFPYNPLTMRMLSSTPPTPIACAPSAVNQAAPHQQNRIWEREPAPLLSAQYETLSDSDD

SEQ ID NO: 907144 - protein, 2293 aa, Homo sapiens
MSSSGYPPNQGAFSTEQSRYPPHSVQYTFPNTRHQQEFAVPDYRSSHLEVSQASQLLQQQQQQQLRRRPSLLSEFHPGSDRPQERRTSYEPFHPGPSPVDHDSLESKRPRLEQVSDSHFQRVSAAVLPLVHPLPEGLRASADAKKDPAFGGKHEAPSSPISGQPCGDDQNASPSKLSKEELIQSMDRVDREIAKVEQQILKLKKKQQQLEEEAAKPPEPEKPVSPPPVEQKHRSIVQIIYDENRKKAEEAHKIFEGLGPKVELPLYNQPSDTKVYHENIKTNQVMRKKLILFFKRRNHARKQREQKICQRYDQLMEAWEKKVDRIENNPRRKAKESKTREYYEKQFPEIRKQREQQERFQRVGQRGAGLSATIARSEHEISEIIDGLSEQENNEKQMRQLSVIPPMMFDAEQRRVKFINMNGLMEDPMKVYKDRQFMNVWTDHEKEIFKDKFIQHPKNFGLIASYLERKSVPDCVLYYYLTKKNENYKALVRRNYGKRRGRNQQIARPSQEEKVEEKEEDKAEKTEKKEEEKKDEEEKDEKEDSKENTKEKDKIDGTAEETEEREQATPRGRKTANSQGRRKGRITRSMTNEAAAASAAAAAATEEPPPPLPPPPEPISTEPVETSRWTEEEMEVAKKGLVEHGRNWAAIAKMVGTKSEAQCKNFYFNYKRRHNLDNLLQQHKQKTSRKPREERDVSQCESVASTVSAQEDEDIEASNEEENPEDSEGAENSSDTESAPSPSPVEAVKPSEDSPENATSRGNTEPAVELEPTTETAPSTSPSLAVPSTKPAEDESVETQVNDSISAETAEQMDVDQQEHSAEEGSVCDPPPATKADSVDVEVRVPENHASKVEGDNTKERDLDRASEKVEPRDEDLVVAQQINAQRPEPQSDNDSSATCSADEDVDGEPERQRMFPMDSKPSLLNPTGSILVSSPLKPNPLDLPQLQHRAAVIPPMVSCTPCNIPIGTPVSGYALYQRHIKAMHESALLEEQRQRQEQIDLECRSSTSPCGTSKSPNREWEVLQPAPHQVITNLPEGVRLPTTRPTRPPPPLIPSSKTTVASEKPSFIMGGSISQGTPGTYLTSHNQASYTQETPKPSVGSISLGLPRQQESAKSATLPYIKQEEFSPRSQNSQPEGLLVRAQHEGVVRGTAGAIQEGSITRGTPTSKISVESIPSLRGSITQGTPALPQTGIPTEALVKGSISRMPIEDSSPEKGREEAASKGHVIYEGKSGHILSYDNIKNAREGTRSPRTAHEISLKRSYESVEGNIKQGMSMRESPVSAPLEGLICRALPRGSPHSDLKERTVLSGSIMQGTPRATTESFEDGLKYPKQIKRESPPIRAFEGAITKGKPYDGITTIKEMGRSIHEIPRQDILTQESRKTPEVVQSTRPIIEGSISQGTPIKFDNNSGQSAIKHNVKSLITGPSKLSRGMPPLEIVPENIKVVERGKYEDVKAGETVRSRHTSVVSSGPSVLRSTLHEAPKAQLSPGIYDDTSARRTPVSYQNTMSRGSPMMNRTSDVTISSNKSTNHERKSTLTPTQRESIPAKSPVPGVDPVVSHSPFDPHHRGSTAGEVYRSHLPTHLDPAMPFHRALDPAAAAYLFQRQLSPTPGYPSQYQLYAMENTRQTILNDYITSQQMQVNLRPDVARGLSPREQPLGLPYPATRGIIDLTNMPPTILVPHPGGTSTPPMDRITYIPGTQITFPPRPYNSASMSPGHPTHLAAAASAEREREREREKERERERIAAASSDLYLRPGSEQPGRPGSHGYVRSPSPSVRTQETMLQQRPSVFQGTNGTSVITPLDPTAQLRIMPLPAGGPSISQGLPASRYNTAADALAALVDAAASAPQMDVSKTKESKHEAARLEENLRSRSAAVSEQQQLEQKTLEVEKRSVQCLYTSSAFPSGKPQPHSSVVYSEAGKDKGPPPKSRYEEELRTRGKTTITAANFIDVIITRQIASDKDARERGSQSSDSSSSLSSHRYETPSDAIEVISPASSPAPPQEKLQTYQPEVVKANQAENDPTRQYEGPLHHYRPQQESPSPQQQLPPSSQAEGMGQVPRTHRLITLADHICQIITQDFARNQVSSQTPQQPPTSTFQNSPSALVSTPVRTKTSNRYSPESQAQSVHHQRPGSRVSPENLVDKSRGSRPGKSPERSHVSSEPYEPISPPQVPVVHEKQDSLLLLSQRGAEPAEQRNDARSPGSISYLPSFFTKLENTSPMVKSKKQEIQLLSQELRSLICQQLLRQAQLALEAILLLILPVILGWKTLSGRLSWEALMTKLRIMELSCPSLWE

SEQ ID NO: 907145 - protein, 835 aa, Homo sapiens
MENTRQTILNDYITSQQMQVNLRPDVARGLSPREQPLGLPYPATRGIIDLTNMPPTILVPHPGGTSTPPMDRITYIPGTQITFPPRPYNSASMSPGHPTHLAAAASAEREREREREKERERERIAAASSDLYLRPGSEQPGRPGSHGYVRSPSPSVRTQETMLQQRPSVFQGTNGTSVITPLDPTAQLRIMPLPAGGPSISQGLPASRYNTAADALAALVDAAASAPQMDVSKTKESKHEAARLEENLRSRSAAVSEQQQLEQKTLEVEKRSVQCLYTSSAFPSGKPQPHSSVVYSEAGKDKGPPPKSRYEEELRTRGKTTITAANFIDVIITRQIASDKDARERGSQSSDSSSSLSSHRYETPSDAIEVISPASSPAPPQEKLQTYQPEVVKANQAENDPTRQYEGPLHHYRPQQESPSPQQQLPPSSQAEGMGQVPRTHRLITLADHICQIITQDFARNQVSSQTPQQPPTSTFQNSPSALVSTPVRTKTSNRYSPESQAQSVHHQRPGSRVSPENLVDKSRGSRPGKSPERSHVSSEPYEPISPPQVPVVHEKQDSLLLLSQRGAEPAEQRNDARSPGSISYLPSFFTKLENTSPMVKSKKQEIFRKLNSSGGGDSDMAAAQPGTEIFNLPAVTTSGSVSSRGHSFADPASNLGLEDIIRKALMGSFDDKVEDHGVVMSQPMGVVPGTANTSVVTSGETRREEGDPSPHSGGVCKPKLISKSNSRKSKSPIPGQGYLGTERPSSVSSVHSEGDYHRQTPGWAWEDRPSSTGSTQFPYNPLTMRMLSSTPPTPIACAPSAVNQAAPHQQNRIWEREPAPLLSAQYETLSDSDD

SEQ ID NO: 907146 - protein, 345 aa, Homo sapiens
GASVLGDAVPEESRASASKTGSRVSPENLVDKSRGSRPGKSPERSHVSSEPYEPISPPQVPVVHEKQDSLLLLSQRGAEPAEQRNDARSPGSISYLPSFFTKLENTSPMVKSKKQEIFRKLNSSGGGDSDMAAAQPGTEIFNLPAVTTSGSVSSRGHSFADPASNLGLEDIIRKALMGSFDDKVEDHGVVMSQPMGVVPGTANTSVVTSGETRREEGDPSPHSGGVCKPKLISKSNSRKSKSPIPGQGYLGTERPSSVSSVHSEGDYHRQTPGWAWEDRPSSTGSTQFPYNPLTMRMLSSTPPTPIACAPSAVNQAAPHQQNRIWEREPAPLLSAQYETLSDSDD

SEQ ID NO: 907147 - protein, 217 aa, Homo sapiens
MHVCFLIGLSEISGNVFDSLSGSVSSRGHSFADPASNLGLEDIIRKALMGSFDDKVEDHGVVMSQPMGVVPGTANTSVVTSGETRREEGDPSPHSGGVCKPKLISKSNSRKSKSPIPGQGYLGTERPSSVSSVHSEGDYHRQTPGWAWEDRPSSTGSTQFPYNPLTMRMLSSTPPTPIACAPSAVNQAAPHQQNRIWEREPAPLLSAQYETLSDSDD

SEQ ID NO: 907148 - protein, 1601 aa, Homo sapiens
MSSSGYPPNQGAFSTEQSRYPPHSVQYTFPNTRHQQEFAVPDYRSSHLEVSQASQLLQQQQQQQLRRRPSLLSEFHPGSDRPQERRTSYEPFHPGPSPVDHDSLESKRPRLEQVSDSHFQRVSAAVLPLVHPLPEGLRASADAKKDPAFGGKHEAPSSPISGQPCGDDQNASPSKLSKEELIQSMDRVDREIAKVEQQILKLKKKQQQLEEEAAKPPEPEKPVSPPPVEQKHRSIVQIIYDENRKKAEEAHKIFEGLGPKVELPLYNQPSDTKVYHENIKTNQVMRKKLILFFKRRNHARKQREQKICQRYDQLMEAWEKKVDRIENNPRRKAKESKTREYYEKQFPEIRKQREQQERFQRVGQRGAGLSATIARSEHEISEIIDGLSEQENNEKQMRQLSVIPPMMFDAEQRRVKFINMNGLMEDPMKVYKDRQFMNVWTDHEKEIFKDKFIQHPKNFGLIASYLERKSVPDCVLYYYLTKKNENYKALVRRNYGKRRGRNQQIARPSQEEKVEEKEEDKAEKTEKKEEEKKDEEEKDEKEDSKENTKEKDKIDGTAEETEEREQATPRGRKTANSQGRRKGRITRSMTNEAAAASAAAAAATEEPPPPLPPPPEPISTEPVETSRWTEEEMEVAKKGLVEHGRNWAAIAKMVGTKSEAQCKNFYFNYKRRHNLDNLLQQHKQKTSRKPREERDVSQCESVASTVSAQEDEDIEASNEEENPEDSEGAENSSDTESAPSPSPVEAVKPSEDSPENATSRGNTEPAVELEPTTETAPSTSPSLAVPSTKPAEDESVETQVNDSISAETAEQMDVDQQEHSAEEGSVCDPPPATKADSVDVEVRVPENHASKVEGDNTKERDLDRASEKVEPRDEDLVVAQQINAQRPEPQSDNDSSATCSADEDVDGEPERQRMFPMDSKPSLLNPTGSILVSSPLKPNPLDLPQLQHRAAVIPPMVSCTPCNIPIGTPVSGYALYQRHIKAMHESALLEEQRQRQEQIDLECRSSTSPCGTSKSPNREWEVLQPAPHQVITNLPEGVRLPTTRPTRPPPPLIPSSKTTVASEKPSFIMGGSISQGTPGTYLTSHNQASYTQETPKPSVGSISLGLPRQQESAKSATLPYIKQEEFSPRSQNSQPEGLLVRAQHEGVVRGTAGAIQEGSITRGTPTSKISVESIPSLRGSITQGTPALPQTGIPTEALVKGSISRMPIEDSSPEKGREEAASKGHVIYEGKSGHILSYDNIKNAREGTRSPRTAHEISLKRSYESVEGNIKQGMSMRESPVSAPLEGLICRALPRGSPHSDLKERTVLSGSIMQGTPRATTESFEDGLKYPKQIKRESPPIRAFEGAITKGKPYDGITTIKEMGRSIHEIPRQDILTQESRKTPEVVQSTRPIIEGSISQGTPIKFDNNSGQSAIKHNVKSLITGPSKLSRGMPPLEIVPENIKVVERGKYEDVKAGETVRSRHTSVVSSGPSVLRSTLHEAPKAQLSPGIYDDTSARRTPVSYQNTMSRGSPMMNRTSDVTISSNKSTNHERKSTLTPTQRESIPAKSPVPGVDPVVSHSPFDPHHRGSTAGEVYRSHLPTHLDPAMPFHRALDPGKHKI

SEQ ID NO: 907149 - protein, 1234 aa, Homo sapiens
MSSSGYPPNQGAFSTEQSRYPPHSVQYTFPNTRHQQEFAVPDYRSSHLEVSQASQLLQQQQQQQLRRRPSLLSEFHPGSDRPQERRTSYEPFHPGPSPVDHDSLESKRPRLEQVSDSHFQRVSAAVLPLVHPLPEGLRASADAKKDPAFGGKHEAPSSPISGQPCGDDQNASPSKLSKEELIQSMDRVDREIAKVEQQILKLKKKQQQLEEEAAKPPEPEKPVSPPPVEQKHRSIVQIIYDENRKKAEEAHKIFEGLGPKVELPLYNQPSDTKVYHENIKTNQVMRKKLILFFKRRNHARKQREQKICQRYDQLMEAWEKKVDRIENNPRRKAKESKTREYYEKQFPEIRKQREQQERFQRVGQRGAGLSATIARSEHEISEIIDGLSEQENNEKQMRQLSVIPPMMFDAEQRRVKFINMNGLMEDPMKVYKDRQFMNVWTDHEKEIFKDKFIQHPKNFGLIASYLERKSVPDCVLYYYLTKKNENYKALVRRNYGKRRGRNQQIARPSQEEKVEEKEEDKAEKTEKKEEEKKDEEEKDEKEDSKENTKEKDKIDGTAEETEEREQATPRGRKTANSQGRRKGRITRSMTNEAAAASAAAAAATEEPPPPLPPPPEPISTEPVETSRWTEEEMEVAKKGLVEHGRNWAAIAKMVGTKSEAQCKNFYFNYKRRHNLDNLLQQHKQKTSRKPREERDVSQCESVASTVSAQEDEDIEASNEEENPEDSEGAENSSDTESAPSPSPVEAVKPSEDSPENATSRGNTEPAVELEPTTETAPSTSPSLAVPSTKPAEDESVETQVNDSISAETAEQMDVDQQEHSAEEGSVCDPPPATKADSVDVEVRVPENHASKVEGDNTKERDLDRASEKVEPRDEDLVVAQQINAQRPEPQSDNDSSATCSADEDVDGEPERQRMFPMDSKPSLLNPTGSILVSSPLKPNPLDLPQLQHRAAVIPPMVSCTPCNIPIGTPVSGYALYQRHIKAMHESALLEEQRQRQEQIDLECRSSTSPCGTSKSPNREWEVLQPAPHQVITNLPEGVRLPTTRPTRPPPPLIPSSKTTVASEKPSFIMGGSISQGTPGTYLTSHNQASYTQETPKPSVGSISLGLPRQQESAKSATLPYIKQEEFSPRSQNSQPEGLLVRAQHEGVVRGTAGAIQEGSITRGTPTSKISVESIPSLRGSITQGTPALPLTNRPSGREFWLRGENSSCLEISNRDYNRDLQHDFMPLEEKYFLV

SEQ ID NO: 907150 - protein, 1023 aa, Homo sapiens
MSSSGYPPNQGAFSTEQSRYPPHSVQYTFPNTRHQQEFAVPDYRSSHLEVSQASQLLQQQQQQQLRRRPSLLSEFHPGSDRPQERRTSYEPFHPGPSPVDHDSLESKRPRLEQVSDSHFQRVSAAVLPLVHPLPEGLRASADAKKDPAFGGKHEAPSSPISGQPCGDDQNASPSKLSKEELIQSMDRVDREIAKVEQQILKLKKKQQQLEEEAAKPPEPEKPVSPPPVEQKHRSIVQIIYDENRKKAEEAHKIFEGLGPKVELPLYNQPSDTKVYHENIKTNQVMRKKLILFFKRRNHARKQREQKICQRYDQLMEAWEKKVDRIENNPRRKAKESKTREYYEKQFPEIRKQREQQERFQRVGQRGAGLSATIARSEHEISEIIDGLSEQENNEKQMRQLSVIPPMMFDAEQRRVKFINMNGLMEDPMKVYKDRQFMNVWTDHEKEIFKDKFIQHPKNFGLIASYLERKSVPDCVLYYYLTKKNENYKALVRRNYGKRRGRNQQIARPSQEEKVEEKEEDKAEKTEKKEEEKKDEEEKDEKEDSKENTKEKDKIDGTAEETEEREQATPRGRKTANSQGRRKGRITRSMTNEAAAASAAAAAATEEPPPPLPPPPEPISTEPVETSRWTEEEMEVAKKGLVEHGRNWAAIAKMVGTKSEAQCKNFYFNYKRRHNLDNLLQQHKQKTSRKPREERDVSQCESVASTVSAQEDEDIEASNEEENPEDSEGAENSSDTESAPSPSPVEAVKPSEDSPENATSRGNTEPAVELEPTTETAPSTSPSLAVPSTKPAEDESVETQVNDSISAETAEQMDVDQQEHSAEEGSVCDPPPATKADSVDVEVRVPENHASKVEGDNTKERDLDRASEKVEPRDEDLVVAQQINAQRPEPQSDNDSSATCSADEDVDGEPERQRMFPMDSKPSLLNPTGSILVSSPLKPNPLDLPQLQHRAAVIPPMVSCTPCNIPIGTPVSGYALYQRHIKAMHESALLEEQRQRQEQIDLECRSSTSPCGTSKSPNREWEGR

SEQ ID NO: 907151 - protein, 732 aa, Homo sapiens
MSSSGYPPNQGAFSTEQSRYPPHSVQYTFPNTRHQQEFAVPDYRSSHLEVSQASQLLQQQQQQQLRRRPSLLSEFHPGSDRPQERRTSYEPFHPGPSPVDHDSLESKRPRLEQVSDSHFQRVSAAVLPLVHPLPEGLRASADAKKDPAFGGKHEAPSSPISGQPCGDDQNASPSKLSKEELIQSMDRVDREIAKVEQQILKLKKKQQQLEEEAAKPPEPEKPVSPPPVEQKHRSIVQIIYDENRKKAEEAHKIFEGLGPKVELPLYNQPSDTKVYHENIKTNQVMRKKLILFFKRRNHARKQREQKICQRYDQLMEAWEKKVDRIENNPRRKAKESKTREYYEKQFPEIRKQREQQERFQRVGQRGAGLSATIARSEHEISEIIDGLSEQENNEKQMRQLSVIPPMMFDAEQRRVKFINMNGLMEDPMKVYKDRQFMNVWTDHEKEIFKDKFIQHPKNFGLIASYLERKSVPDCVLYYYLTKKNENYKALVRRNYGKRRGRNQQIARPSQEEKVEEKEEDKAEKTEKKEEEKKDEEEKDEKEDSKENTKEKDKIDGTAEETEEREQATPRGRKTANSQGRRKGRITRSMTNEAAAASAAAAAATEEPPPPLPPPPEPISTEPVETSRWTEEEMEVAKKGLVEHGRNWAAIAKMVGTKSEAQCKNFYFNYKRRHNLDNLLQQHKQKTSRKPREERDVSQCESVASTVSAQEDEDIEASNEEENPEDSEGISKF

SEQ ID NO: 907152 - protein, 141 aa, Homo sapiens
MHVCFLIGLSEISGNVFDSLSGSVSSRGHSFADPASNLGLEDIIRKALMGSFDDKVEDHGVVMSQPMGVVPGTANTSVVTSGETRREEGDPSPHSGTAFILVLFCCFSPKKPVYFPNSDASLRHFIYVFMCSESPLRVSVT

SEQ ID NO: 907153 - protein, 528 aa, Homo sapiens
MFGAAGRQPIGAPAAGNSWHFSRTMEELVHDLVSALEESSEQARGGFAETGDHSRSISCPLKRQARKRRGRKRRSYNVHHPWETGHCLSEGSDSSLEEPSKDYRENHNNNKKDHSDSDDQMLVAKRRPSSNLNNNVRGKRPLWHESDFAVDNVGNRTLRRRRKVKRMAVDLPQDISNKRTMTQPPEGCRDQDMDSDRAYQYQEFTKNKVKKRKLKIIRQGPKIQDEGVVLESEETNQTNKDKMECEEQKVSDELMSESDSSSLSSTDAGLFTNDEGRQGDDEQSDWFYEKESGGACGITGVVPWWEKEDPTELDKNVPDPVFESILTGSFPLMSHPSRRGFQARLSRLHGMSSKNIKKSGGTPTSMVPIPGPVGNKRMVHFSPDSHHHDHWFSPGARTEHDQHQLLRDNRAERGHKKNCSVRTASRQTSMHLGSLCTGDIKRRRKAAPLPGPTTAGFVGENAQPILENNIGNRMLQNMGWTPGSGLGRDGKGISEPIQAMQRPKGLGLGFPLPKSTSATTTPNAGKSA

SEQ ID NO: 907154 - protein, 376 aa, Homo sapiens
MFGAAGRQPIGAPAAGNSWHFSRTMEELVHDLVSALEESSEQARGGFAETGDHSRSISCPLKRQARKRRGRKRRSYNVHHPWETGHCLSEGSDSSLEEPSKDYRENHNNNKKDHSDSDDQMLVAKRRPSSNLNNNVRGKRPLWHESDFAVDNVGNRTLRRRRKVKRMAVDLPQDISNKRTMTQPPEGCRDQDMDSDRAYQYQEFTKNKVKKRKLKIIRQGPKIQDEGVVLESEETNQTNKDKMECEEQKVSDELMSESDSSSLSSTDAGLFTNDEGRQGDDEQSDWFYEKESGGACGITGVVPWWEKEDPTELDKNVPDPVFESILTGSFPLMSHPSRRGFQARLSRLHGMSSKNIKKSGGTPTSMATNWTSEIPL

SEQ ID NO: 907155 - protein, 418 aa, Homo sapiens
MFGAAGRQPIGAPAAGNSWHFSRTMEELVHDLVSALEESSEQARGGFAETGDHSRSISCPLKRQARKRRGRKRRSYNVHHPWETGHCLSEGSDSSLEEPSKDYRENHNNNKKDHSDSDDQMLVAKRRPSSNLNNNVRGKRPLWHESDFAVDNVGNRTLRRRRKVKRMAVDLPQDISNKRTMTQPPEGCRDQDMDSDRAYQYQEFTKNKVKKRKLKIIRQGPKIQDEGVVLESEETNQTNKDKMECEEQKVSDELMSESDSSSLSSTDAGLFTNDEGRQGDDEQSDWFYEKESGGACGITGVVPWWEKEDPTELDKNVPDPVFESILTGSFPLMSHPSRRGFQARLSRLHGMSSKNIKKSGGTPTSMVPIPGPVGNKRMVHFSPDSHHHDHWFSPGARTEHDQVTNKGIVSSFGLSPAI

SEQ ID NO: 907156 - protein, 419 aa, Homo sapiens
MFGAAGRQPIGAPAAGNSWHFSRTMEELVHDLVSALEESSEQARGGFAETGDHSRSISCPLKRQARKRRGRKRRSYNVHHPWETGHCLSEGSDSSLEEPSKDYRENHNNNKKDHSDSDDQMLVAKRRPSSNLNNNVRGKRPLWHESDFAVDNVGNRTLRRRRKVKRMAVDLPQDISNKRTMTQPPEGCRDQDMDSDRAYQYQEFTKNKVKKRKLKIIRQGPKIQDEGVVLESEETNQTNKDKMECEEQKVSDELMSESDSSSLSSTDAGLFTNDEGRQGDDEQSDWFYEKESGGACGITGVVPWWEKEDPTELDKNVPDPVFESILTGSFPLMSHPSRRGFQARLSRLHGMSSKNIKKSGGTPTSMVPIPGPVGNKRMVHFSPDSHHHDHWFSPGARTEHDQVRTIVIQKEVTQPLSSI

SEQ ID NO: 907157 - protein, 116 aa, Homo sapiens
MFGAAGRQPIGAPAAGNSWHFSRTMEELVHDLVSALEESSEQARGGFAETGDHSRSISCPLKRQARKRRGRKRRSYNVHHPWETGHCLSEGSDSSLEEQSQKKKVENNQTRTKNPR

SEQ ID NO: 907158 - protein, 528 aa, Homo sapiens; identical to SEQ ID NO: 907153

SEQ ID NO: 907159 - protein, 286 aa, Homo sapiens
MECEEQKVSDELMSESDSSSLSSTDAGLFTNDEGRQGDDEQSDWFYEKESGGACGITGVVPWWEKEDPTELDKNVPDPVFESILTGSFPLMSHPSRRGFQARLSRLHGMSSKNIKKSGGTPTSMVPIPGPVGNKRMVHFSPDSHHHDHWFSPGARTEHDQHQLLRDNRAERGHKKNCSVRTASRQTSMHLGSLCTGDIKRRRKAAPLPGPTTAGFVGENAQPILENNIGNRMLQNMGWTPGSGLGRDGKGISEPIQAMQRPKGLGLGFPLPKSTSATTTPNAGKSA

SEQ ID NO: 907160 - protein, 258 aa, Homo sapiens
MFGAAGRQPIGAPAAGNSWHFSRTMEELVHDLVSALEESSEQARGGFAETGDHSRSISCPLKRQARKRRGRKRRSYNVHHPWETGHCLSEGSDSSLEEPSKDYRENHNNNKKDHSDSDDQMLVAKRRPSSNLNNNVRGKRPLWHESDFAVDNVGNRTLRRRRKVKRMAVDLPQDISNKRTMTQPPEGCRDQDMDSDRAYQYQEFTKNKVKKRKLKIIRQGPKIQDEGVVLESEETNQTNKDKMECEEQKVSDELMSER

SEQ ID NO: 907161 - protein, 219 aa, Homo sapiens
MNNGGKAEKENTPSEANLQEEEVRTLFVSGLPLDIKPRELYLLFRPFKGYEGSLIKLTSKQPVGFVSFDSRSEAEAAKNALNGIRFDPEIPQTLRLEFAKANTKMAKNKLVGTPNPSTPLPNTVPQFIAREPYELTVPALYPSSPEVWAPYPLYPAELAPALPPPAFTYPASLHAQCFSPEAKPNTPVFCPLLQQIRFVSGNVFVTYQPTADQQRELPC

SEQ ID NO: 907162 - protein, 196 aa, Homo sapiens
MNNGGKAEKENTPSEANLQEEEVRTLFVSGLPLDIKPRELYLLFRPFKGYEGSLIKLTSKQPVGFVSFDSRSEAEAAKNALNGIRFDPEIPQTLRLEFAKANTKMAKNKLVGTPNPSTPLPNTVPQFIAREPYELTVPALYPSSPEVWAPYPLYPAELAPALPPPAFTYPASLHAQMRWLPPSEATSQGWKSRQFC

SEQ ID NO: 907163 - protein, 234 aa, Homo sapiens
GRTSGCAAHTGRHCGGGRSESPGPEPAVGSARAPRATVRTLFVSGLPLDIKPRELYLLFRPFKGYEGSLIKLTSKQPVGFVSFDSRSEAEAAKNALNGIRFDPEIPQTLRLEFAKANTKMAKNKLVGTPNPSTPLPNTVPQFIAREPYELTVPALYPSSPEVWAPYPLYPAELAPALPPPAFTYPASLHAQCFSPEAKPNTPVFCPLLQQIRFVSGNVFVTYQPTADQQRELPC

SEQ ID NO: 907164 - protein, 204 aa, Homo sapiens
MNNGGKAEKENTPSEANLQEEEVRTLFVSGLPLDIKPRELYLLFRPFKGYEGSLIKLTSKQPVGFVSFDSRSEAEAAKNALNGIRFDPEIPQTLRLEFAKANTKMAKNKLVGTPNPSTPLPNTVPQFIAREPYELTVPALYPSSPEVWAPYPLYPAELAPALPPPAFTYPASLHAQLCEGQTVRRSHPLSAPSPDSASLAWFPV

SEQ ID NO: 907165 - protein, 201 aa, Homo sapiens
MNNGGKAEKENTPSEANLQEEEVRTLFVSGLPLDIKPRELYLLFRPFKGYEGSLIKLTSKQPVGFVSFDSRSEAEAAKNALNGIRFDPEIPQTLRLEFAKANTKMAKNKLVGTPNPSTPLPNTVPQFIAREPYELTVPALYPSSPEVWAPYPLYPAELAPALPHALAPSLRGYFSGLEVPSVLLNTMSQVCDGGCNLSCGY

SEQ ID NO: 907166 - protein, 260 aa, Homo sapiens
GAGGRRGAGPGRGGGRRFRHGPCPGRSPTVWPGEGGSRERVFLCPRASAGPKLRNSKDFSETFVRTLFVSGLPLDIKPRELYLLFRPFKGYEGSLIKLTSKQPVGFVSFDSRSEAEAAKNALNGIRFDPEIPQTLRLEFAKANTKMAKNKLVGTPNPSTPLPNTVPQFIAREPYELTVPALYPSSPEVWAPYPLYPAELAPALPPPAFTYPASLHAQCFSPEAKPNTPVFCPLLQQIRFVSGNVFVTYQPTADQQRELPC

SEQ ID NO: 907167 - protein, 215 aa, Homo sapiens
QYSCCLLLVLLSDSVPFQVRTLFVSGLPLDIKPRELYLLFRPFKGYEGSLIKLTSKQPVGFVSFDSRSEAEAAKNALNGIRFDPEIPQTLRLEFAKANTKMAKNKLVGTPNPSTPLPNTVPQFIAREPYELTVPALYPSSPEVWAPYPLYPAELAPALPPPAFTYPASLHAQCFSPEAKPNTPVFCPLLQQIRFVSGNVFVTYQPTADQQRELPC

SEQ ID NO: 907168 - protein, 203 aa, Homo sapiens
LNLFFQVRTLFVSGLPLDIKPRELYLLFRPFKGYEGSLIKLTSKQPVGFVSFDSRSEAEAAKNALNGIRFDPEIPQTLRLEFAKANTKMAKNKLVGTPNPSTPLPNTVPQFIAREPYELTVPALYPSSPEVWAPYPLYPAELAPALPPPAFTYPASLHAQCFSPEAKPNTPVFCPLLQQIRFVSGNVFVTYQPTADQQRELPC

SEQ ID NO: 907169 - protein, 219 aa, Homo sapiens; identical to SEQ ID NO: 907161

SEQ ID NO: 907170 - protein, 219 aa, Homo sapiens; identical to SEQ ID NO: 907161

SEQ ID NO: 907171 - protein, 224 aa, Homo sapiens
MNNGGKAEKENTPSEANLQEEEVRTLFVSGLPLDIKPRELYLLFRPFKGYEGSLIKLTSKQPVGFVSFDSRSEAEAAKNALNGIRFDPEIPQTLRLEFAKANTKMAKNKLVGTPNPSTPLPNTVPQFIAREPYELTVPALYPSSPEVWAPYPLYPAELAPALPPPAFTYPASLHAQVIDTHRPGLHSLHHQSFQTWFPRAHHTTNTYPANRSTLKRLMIPSKSS

SEQ ID NO: 907172 - protein, 224 aa, Homo sapiens; identical to SEQ ID NO: 907171

SEQ ID NO: 907173 - protein, 179 aa, Homo sapiens
MNNGGKAEKENTPSEANLQEEEVRTLFVSGLPLDIKPRELYLLFRPFKGYEGSLIKLTSKQPVGFVSFDSRSEAEAAKNALNGIRFDPEIPQTLRLEFAKANTKMAKNKLVGTPNPSTPLPNTVPQFIAREPYELTVPALYPSSPEVWAPYPLYPAELAPALPPPAFTYPASLHAQETL

SEQ ID NO: 907174 - protein, 143 aa, Homo sapiens
MNNGGKAEKENTPSEANLQEEEVRTLFVSGLPLDIKPRELYLLFRPFKGYEGSLIKLTSKQPVGFVSFDSRSEAEAAKNALNGIRFDPEIPQTLRLEFAKANTKMAKNKLVGTPNPSTPLPNTVPQFIAREPLGGANEHGERQ

SEQ ID NO: 907175 - protein, 145 aa, Homo sapiens
MNNGGKAEKENTPSEANLQEEEVRTLFVSGLPLDIKPRELYLLFRPFKGYEGSLIKLTSKQPVGFVSFDSRSEAEAAKNALNGIRFDPEIPQTLRLEFAKANTKMAKNKLVGTPNPSTPLPNTFANAERKSIFTFSSMFVLQHFH

SEQ ID NO: 907176 - protein, 202 aa, Homo sapiens
MNNGGKAEKENTPSEANLQEEEVRTLFVSGLPLDIKPRELYLLFRPFKGYEGSLIKLTSKQPVGFVSFDSRSEAEAAKNALNGIRFDPEIPQTLRLEFAKANTKMAKNKLVGTPNPSTPLPNTGSIAYDEAYYCSVRLVPCISYATDQATDTSLERGTLGTQEDLGTRFTYIALSIRMHACHEQSRRRFYSMRAKRPEHTFV

SEQ ID NO: 907177 - protein, 196 aa, Homo sapiens; identical to SEQ ID NO: 907162

SEQ ID NO: 907178 - protein, 237 aa, Homo sapiens
SEPKLSKRDVVYKTVKTVKRGGFIMSEIEEKKLRWPEMIQVRTLFVSGLPLDIKPRELYLLFRPFKGYEGSLIKLTSKQPVGFVSFDSRSEAEAAKNALNGIRFDPEIPQTLRLEFAKANTKMAKNKLVGTPNPSTPLPNTVPQFIAREPYELTVPALYPSSPEVWAPYPLYPAELAPALPPPAFTYPASLHAQCFSPEAKPNTPVFCPLLQQIRFVSGNVFVTYQPTADQQRELPC

SEQ ID NO: 907179 - protein, 147 aa, Homo sapiens
RGPRIRDEEKGIRFDPEIPQTLRLEFAKANTKMAKNKLVGTPNPSTPLPNTVPQFIAREPYELTVPALYPSSPEVWAPYPLYPAELAPALPPPAFTYPASLHAQCFSPEAKPNTPVFCPLLQQIRFVSGNVFVTYQPTADQQRELPC

SEQ ID NO: 907180 - protein, 123 aa, Homo sapiens
PSCHSGVRLDQADESLKTGCTLVPNPAGTCASENVRAVCESWSERLGQGFLLAVTCTESRTMPSTVQLSSPGSPPPPVSPVKHRHVLASSGLSAPTHTQAAPVTPLRSTLTQCTQTHHPLLCV

SEQ ID NO: 907181 - protein, 115 aa, Homo sapiens
MAKNKLVGTPNPSTPLPNTVPQFIAREPYELTVPALYPSSPEVWAPYPLYPAELAPALPPPAFTYPASLHAQCFSPEAKPNTPVFCPLLQQIRFVSGNVFVTYQPTADQQRELPC

SEQ ID NO: 907182 - protein, 219 aa, Homo sapiens; identical to SEQ ID NO: 907161

SEQ ID NO: 907183 - protein, 219 aa, Homo sapiens; identical to SEQ ID NO: 907161

SEQ ID NO: 907184 - protein, 196 aa, Homo sapiens; identical to SEQ ID NO: 907162

SEQ ID NO: 907185 - protein, 179 aa, Homo sapiens; identical to SEQ ID NO: 907173

SEQ ID NO: 907186 - protein, 196 aa, Homo sapiens; identical to SEQ ID NO: 907162

SEQ ID NO: 907187 - protein, 136 aa, Homo sapiens
MNNGGKAEKENTPSEANLQEEEVRTLFVSGLPLDIKPRELYLLFRPFKGYEGSLIKLTSKQPVGFVSFDSRSEAEAAKNALNGIRFDPEIPQTLRLEFAKANTKMAKNKLVGTPNPSTPLPNTVPQFIAREPLFLS

SEQ ID NO: 907188 - protein, 123 aa, Homo sapiens; identical to SEQ ID NO: 907180

SEQ ID NO: 907189 - protein, 1145 aa, Homo sapiens
MTMYLWLKLLAFGFAFLDTEVFVTGQSPTPSPTDAYLNASETTTLSPSGSAVISTTTIATTPSKPTCDEKYANITVDYLYNKETKLFTAKLNVNENVECGNNTCTNNEVHNLTECKNASVSISHNSCTAPDKTLILDVPPGVEKFQLHDCTQVEKADTTICLKWKNIETFTCDTQNITYRFQCGNMIFDNKEIKLENLEPEHEYKCDSEILYNNHKFTNASKIIKTDFGSPGEPQIIFCRSEAAHQGVITWNPPQRSFHNFTLCYIKETEKDCLNLDKNLIKYDLQNLKPYTKYVLSLHAYIIAKVQRNGSAAMCHFTTKSAPPSQVWNMTVSMTSDNSMHVKCRPPRDRNGPHERYHLEVEAGNTLVRNESHKNCDFRVKDLQYSTDYTFKAYFHNGDYPGEPFILHHSTSYNSKALIAFLAFLIIVTSIALLVVLYKIYDLHKKRSCNLDEQQELVERDDEKQLMNVEPIHADILLETYKRKIADEGRLFLAEFQSIPRVFSKFPIKEARKPFNQNKNRYVDILPYDYNRVELSEINGDAGSNYINASYIDGFKEPRKYIAAQGPRDETVDDFWRMIWEQKATVIVMVTRCEEGNRNKCAEYWPSMEEGTRAFGDVVVKINQHKRCPDYIIQKLNIVNKKEKATGREVTHIQFTSWPDHGVPEDPHLLLKLRRRVNAFSNFFSGPIVVHCSAGVGRTGTYIGIDAMLEGLEAENKVDVYGYVVKLRRQRCLMVQVEAQYILIHQALVEYNQFGETEVNLSELHPYLHNMKKRDPPSEPSPLEAEFQRLPSYRSWRTQHIGNQEENKSKNRNSNVIPYDYNRVPLKHELEMSKESEHDSDESSDDDSDSEEPSKYINASFIMSYWKPEVMIAAQGPLKETIGDFWQMIFQRKVKVIVMLTELKHGDQEICAQYWGEGKQTYGDIEVDLKDTDKSSTYTLRVFELRHSKRKDSRTVYQYQYTNWSVEQLPAEPKELISMIQVVKQKLPQKNSSEGNKHHKSTPLLIHCRDGSQQTGIFCALLNLLESAETEEVVDIFQVVKALRKARPGMVSTFEQYQFLYDVIASTYPAQNGQVKKNNHQEDKIEFDNEVDKVKQDANCVNPLGAPEKLPEAKEQAEGSEPTSGTEGPEHSVNGPASPALNQGS

SEQ ID NO: 907190 - protein, 103 aa, Homo sapiens
MQPSNRRLYRLNRRAPCILCTPPLLSSPDSLALPSIYQFSRLRLHTSCLSPSPPPCDPQKVLQHAHEIIPVGIPVLYVPYRPEPFTSPRETDSRAKPNTFPHW

SEQ ID NO: 907191 - protein, 144 aa, Homo sapiens
VAPWTIICYLPSRRLLSRSNLLRVYRPLHRALSVCAVTRPNQVARAIHNPPSSPSHVQPPLFVPPSPRSITNSLFSLTGPFSHAFQALQKLFPNANGNFNGGNPRDFFGTEGPNFLAFTKKGSQGKAQHLPPLMPTLMPLKQPL

SEQ ID NO: 907192 - protein, 112 aa, Homo sapiens
MPTATIATLLALPLYIHNDQIFPNTVLPYPHLFSCLFFVLYSVGDALYHFILVLLFLFVYRAGFDKRTVNKKVLRDIYSRARNASLPPQQLDTCLSTNHGTQACIYDLTSSQ

SEQ ID NO: 907193 - protein, 105 aa, Homo sapiens
  misc_feature (22)..(22): Xaa can be any naturally occurring amino acid
VFYCTSPYQQKEKFRNTQHLLXGLNSTYPAQNGQVKKNNHQEDKIEFDNEVDKVKQDANCVNPLGAPEKLPEAKEQAEGSEPTSGTEGPEHSVNGPASPALNQGS

SEQ ID NO: 907194 - protein, 228 aa, Homo sapiens
MTAKCRGGCTKALEYLKSVPSGKMIGGEQSGSCLKYNEAKTHNNPQKGSVRRTVGINQLDGKSQGFFMSIEGPGLFKLSKRKESQVEAHNLPPLNAYHNACKTTTMSPSGSGVISTATIATTPSKPTCDEKYANITVDYLYNKETKLFTAKLNVNENVECGNNTCTNNEVHNLTECKNASVSISHNSCTAPDKTLILDVPPGVEKFQLHDCTQVEKAGGRSLISAPYR

SEQ ID NO: 907195 - protein, 310 aa, Homo sapiens
  misc_feature (294)..(294): Xaa can be any naturally occurring amino acid
FSRRLLPHHANHLYEPSHKHPPYSWTLNLPTAALTQTFIMTTYPNHSPHTLPAPPPNNKFATRAYASITTIQERPRFLLTPCRRSLTTGRLNIYTRTKNTSVDQKERSFTTVTINPLTLTPPKIFFYKPLEELTQRALPMGFLDHKGRSLSPVQSRVYHGKAPTPCPREAHLNAYETTTMSPSGSAVISTATIATTPSKPTCDEKYANITVDYLYNKETKLFTAKLNVNENVECGNNTCTNNEVHNLTECKNASVSISHNSCTAPDKTLILDVPPGVEKFQLHDCTQVEKAVQXRATPLLLLLYSPLPQH

SEQ ID NO: 907196 - protein, 188 aa, Homo sapiens
MSTVVYRYVQTPAISIIKMMDSDQDTTCAMRHPGVEKFQLHDCTQVEKADTTICLKWKNIETFTCDTQNITYRFQCGNMIFDNKEIKLENLEPEHEYKCDSEILYNNHKFTNASKIIKTDFGSPGEPQIIFCRSEAAHQGVITWNPPQRSFHNFTLCYIKETEKDCLNLDKNLMRQVSFLVSSEGYDN

SEQ ID NO: 907197 - protein, 1306 aa, Homo sapiens
MTMYLWLKLLAFGFAFLDTEVFVTGQSPTPSPTGLTTAKMPSVPLSSDPLPTHTTAFSPASTFERENDFSETTTSLSPDNTSTQVSPDSLDNASAFNTTGVSSVQTPHLPTHADSQTPSAGTDTQTFSGSAANAKLNPTPGSNAISDVPGERSTASTFPTDPVSPLTTTLSLAHHSSAALPARTSNTTITANTSDAYLNASETTTLSPSGSAVISTTTIATTPSKPTCDEKYANITVDYLYNKETKLFTAKLNVNENVECGNNTCTNNEVHNLTECKNASVSISHNSCTAPDKTLILDVPPGVEKFQLHDCTQVEKADTTICLKWKNIETFTCDTQNITYRFQCGNMIFDNKEIKLENLEPEHEYKCDSEILYNNHKFTNASKIIKTDFGSPGEPQIIFCRSEAAHQGVITWNPPQRSFHNFTLCYIKETEKDCLNLDKNLIKYDLQNLKPYTKYVLSLHAYIIAKVQRNGSAAMCHFTTKSAPPSQVWNMTVSMTSDNSMHVKCRPPRDRNGPHERYHLEVEAGNTLVRNESHKNCDFRVKDLQYSTDYTFKAYFHNGDYPGEPFILHHSTSYNSKALIAFLAFLIIVTSIALLVVLYKIYDLHKKRSCNLDEQQELVERDDEKQLMNVEPIHADILLETYKRKIADEGRLFLAEFQSIPRVFSKFPIKEARKPFNQNKNRYVDILPYDYNRVELSEINGDAGSNYINASYIDGFKEPRKYIAAQGPRDETVDDFWRMIWEQKATVIVMVTRCEEGNRNKCAEYWPSMEEGTRAFGDVVVKINQHKRCPDYIIQKLNIVNKKEKATGREVTHIQFTSWPDHGVPEDPHLLLKLRRRVNAFSNFFSGPIVVHCSAGVGRTGTYIGIDAMLEGLEAENKVDVYGYVVKLRRQRCLMVQVEAQYILIHQALVEYNQFGETEVNLSELHPYLHNMKKRDPPSEPSPLEAEFQRLPSYRSWRTQHIGNQEENKSKNRNSNVIPYDYNRVPLKHELEMSKESEHDSDESSDDDSDSEEPSKYINASFIMSYWKPEVMIAAQGPLKETIGDFWQMIFQRKVKVIVMLTELKHGDQEICAQYWGEGKQTYGDIEVDLKDTDKSSTYTLRVFELRHSKRKDSRTVYQYQYTNWSVEQLPAEPKELISMIQVVKQKLPQKNSSEGNKHHKSTPLLIHCRDGSQQTGIFCALLNLLESAETEEVVDIFQVVKALRKARPGMVSTFEQYQFLYDVIASTYPAQNGQVKKNNHQEDKIEFDNEVDKVKQDANCVNPLGAPEKLPEAKEQAEGSEPTSGTEGPEHSVNGPASPALNQGS

SEQ ID NO: 907198 - protein, 1306 aa, Homo sapiens; identical to SEQ ID NO: 907197

SEQ ID NO: 907199 - protein, 1258 aa, Homo sapiens
MTMYLWLKLLAFGFAFLDTEVFVTGQSPTPSPTGLTTAKMPSVPLSSDPLPTHTTAFSPASTFERENDFSETTTSLSPDNTSTQVSPDSLDNASAFNTTGVSSVQTPHLPTHADSQTPSAGTDTQTFSGSAANAKLNPTPGSNAISDAYLNASETTTLSPSGSAVISTTTIATTPSKPTCDEKYANITVDYLYNKETKLFTAKLNVNENVECGNNTCTNNEVHNLTECKNASVSISHNSCTAPDKTLILDVPPGVEKFQLHDCTQVEKADTTICLKWKNIETFTCDTQNITYRFQCGNMIFDNKEIKLENLEPEHEYKCDSEILYNNHKFTNASKIIKTDFGSPGEPQIIFCRSEAAHQGVITWNPPQRSFHNFTLCYIKETEKDCLNLDKNLIKYDLQNLKPYTKYVLSLHAYIIAKVQRNGSAAMCHFTTKSAPPSQVWNMTVSMTSDNSMHVKCRPPRDRNGPHERYHLEVEAGNTLVRNESHKNCDFRVKDLQYSTDYTFKAYFHNGDYPGEPFILHHSTSYNSKALIAFLAFLIIVTSIALLVVLYKIYDLHKKRSCNLDEQQELVERDDEKQLMNVEPIHADILLETYKRKIADEGRLFLAEFQSIPRVFSKFPIKEARKPFNQNKNRYVDILPYDYNRVELSEINGDAGSNYINASYIDGFKEPRKYIAAQGPRDETVDDFWRMIWEQKATVIVMVTRCEEGNRNKCAEYWPSMEEGTRAFGDVVVKINQHKRCPDYIIQKLNIVNKKEKATGREVTHIQFTSWPDHGVPEDPHLLLKLRRRVNAFSNFFSGPIVVHCSAGVGRTGTYIGIDAMLEGLEAENKVDVYGYVVKLRRQRCLMVQVEAQYILIHQALVEYNQFGETEVNLSELHPYLHNMKKRDPPSEPSPLEAEFQRLPSYRSWRTQHIGNQEENKSKNRNSNVIPYDYNRVPLKHELEMSKESEHDSDESSDDDSDSEEPSKYINASFIMSYWKPEVMIAAQGPLKETIGDFWQMIFQRKVKVIVMLTELKHGDQEICAQYWGEGKQTYGDIEVDLKDTDKSSTYTLRVFELRHSKRKDSRTVYQYQYTNWSVEQLPAEPKELISMIQVVKQKLPQKNSSEGNKHHKSTPLLIHCRDGSQQTGIFCALLNLLESAETEEVVDIFQVVKALRKARPGMVSTFEQYQFLYDVIASTYPAQNGQVKKNNHQEDKIEFDNEVDKVKQDANCVNPLGAPEKLPEAKEQAEGSEPTSGTEGPEHSVNGPASPALNQGS

SEQ ID NO: 907200 - protein, 1264 aa, Homo sapiens
  misc_feature (31)..(31): Xaa can be any naturally occurring amino acid
APTSAHHGQPVAPRTSKYRPAHRHLHRTPRXTPLHSHSAPSLRVTRSTMTQTRRSLNAPRTLSSRISASSSILRVNLVLSSPDLRPTTTTGLVHRSIFDHRSSIALENVFFRWPLAKIARGNIQGVVLAIKAGACHCPKKGIPGQSPTPSPTDAYLNASETTTLSPSGSAVISTTTIATTPSKPTCDEKYANITVDYLYNKETKLFTAKLNVNENVECGNNTCTNNEVHNLTECKNASVSISHNSCTAPDKTLILDVPPGVEKFQLHDCTQVEKADTTICLKWKNIETFTCDTQNITYRFQCGNMIFDNKEIKLENLEPEHEYKCDSEILYNNHKFTNASKIIKTDFGSPGEPQIIFCRSEAAHQGVITWNPPQRSFHNFTLCYIKETEKDCLNLDKNLIKYDLQNLKPYTKYVLSLHAYIIAKVQRNGSAAMCHFTTKSAPPSQVWNMTVSMTSDNSMHVKCRPPRDRNGPHERYHLEVEAGNTLVRNESHKNCDFRVKDLQYSTDYTFKAYFHNGDYPGEPFILHHSTSYNSKALIAFLAFLIIVTSIALLVVLYKIYDLHKKRSCNLDEQQELVERDDEKQLMNVEPIHADILLETYKRKIADEGRLFLAEFQSIPRVFSKFPIKEARKPFNQNKNRYVDILPYDYNRVELSEINGDAGSNYINASYIDGFKEPRKYIAAQGPRDETVDDFWRMIWEQKATVIVMVTRCEEGNRNKCAEYWPSMEEGTRAFGDVVVKINQHKRCPDYIIQKLNIVNKKEKATGREVTHIQFTSWPDHGVPEDPHLLLKLRRRVNAFSNFFSGPIVVHCSAGVGRTGTYIGIDAMLEGLEAENKVDVYGYVVKLRRQRCLMVQVEAQYILIHQALVEYNQFGETEVNLSELHPYLHNMKKRDPPSEPSPLEAEFQRLPSYRSWRTQHIGNQEENKSKNRNSNVIPYDYNRVPLKHELEMSKESEHDSDESSDDDSDSEEPSKYINASFIMSYWKPEVMIAAQGPLKETIGDFWQMIFQRKVKVIVMLTELKHGDQEICAQYWGEGKQTYGDIEVDLKDTDKSSTYTLRVFELRHSKRKDSRTVYQYQYTNWSVEQLPAEPKELISMIQVVKQKLPQKNSSEGNKHHKSTPLLIHCRDGSQQTGIFCALLNLLESAETEEVVDIFQVVKALRKARPGMVSTFEQYQFLYDVIASTYPAQNGQVKKNNHQEDKIEFDNEVDKVKQDANCVNPLGAPEKLPEAKEQAEGSEPTSGTEGPEHSVNGPASPALNQGS

SEQ ID NO: 907201 - protein, 1359 aa, Homo sapiens
  misc_feature (31)..(31): Xaa can be any naturally occurring amino acid
APTSAHHGQPVAPRTSKYRPAHRHLHRTPRXTPLHSHSAPSLRVTRSTMTQTRRSLNAPRTLSSRISASSSILRVNLVLSSPDLRPTTTTGLVHRSIFDHRSSIALENVFFRWPLAKIARGNIQGVVLAIKAGACHCPKKGIPGQSPTPSPTGVSSVQTPHLPTHADSQTPSAGTDTQTFSGSAANAKLNPTPGSNAISDVPGERSTASTFPTDPVSPLTTTLSLAHHSSAALPARTSNTTITANTSDAYLNASETTTLSPSGSAVISTTTIATTPSKPTCDEKYANITVDYLYNKETKLFTAKLNVNENVECGNNTCTNNEVHNLTECKNASVSISHNSCTAPDKTLILDVPPGVEKFQLHDCTQVEKADTTICLKWKNIETFTCDTQNITYRFQCGNMIFDNKEIKLENLEPEHEYKCDSEILYNNHKFTNASKIIKTDFGSPGEPQIIFCRSEAAHQGVITWNPPQRSFHNFTLCYIKETEKDCLNLDKNLIKYDLQNLKPYTKYVLSLHAYIIAKVQRNGSAAMCHFTTKSAPPSQVWNMTVSMTSDNSMHVKCRPPRDRNGPHERYHLEVEAGNTLVRNESHKNCDFRVKDLQYSTDYTFKAYFHNGDYPGEPFILHHSTSYNSKALIAFLAFLIIVTSIALLVVLYKIYDLHKKRSCNLDEQQELVERDDEKQLMNVEPIHADILLETYKRKIADEGRLFLAEFQSIPRVFSKFPIKEARKPFNQNKNRYVDILPYDYNRVELSEINGDAGSNYINASYIDGFKEPRKYIAAQGPRDETVDDFWRMIWEQKATVIVMVTRCEEGNRNKCAEYWPSMEEGTRAFGDVVVKINQHKRCPDYIIQKLNIVNKKEKATGREVTHIQFTSWPDHGVPEDPHLLLKLRRRVNAFSNFFSGPIVVHCSAGVGRTGTYIGIDAMLEGLEAENKVDVYGYVVKLRRQRCLMVQVEAQYILIHQALVEYNQFGETEVNLSELHPYLHNMKKRDPPSEPSPLEAEFQRLPSYRSWRTQHIGNQEENKSKNRNSNVIPYDYNRVPLKHELEMSKESEHDSDESSDDDSDSEEPSKYINASFIMSYWKPEVMIAAQGPLKETIGDFWQMIFQRKVKVIVMLTELKHGDQEICAQYWGEGKQTYGDIEVDLKDTDKSSTYTLRVFELRHSKRKDSRTVYQYQYTNWSVEQLPAEPKELISMIQVVKQKLPQKNSSEGNKHHKSTPLLIHCRDGSQQTGIFCALLNLLESAETEEVVDIFQVVKALRKARPGMVSTFEQYQFLYDVIASTYPAQNGQVKKNNHQEDKIEFDNEVDKVKQDANCVNPLGAPEKLPEAKEQAEGSEPTSGTEGPEHSVNGPASPALNQGS

SEQ ID NO: 907202 - protein, 1101 aa, Homo sapiens
MSPSGSGVISTATIATTPSKPTCDEKYANITVDYLYNKETKLFTAKLNVNENVECGNNTCTNNEVHNLTECKNASVSISHNSCTAPDKTLILDVPPGVEKFQLHDCTQVEKADTTICLKWKNIETFTCDTQNITYRFQCGNMIFDNKEIKLENLEPEHEYKCDSEILYNNHKFTNASKIIKTDFGSPGEPQIIFCRSEAAHQGVITWNPPQRSFHNFTLCYIKETEKDCLNLDKNLIKYDLQNLKPYTKYVLSLHAYIIAKVQRNGSAAMCHFTTKSAPPSQVWNMTVSMTSDNSMHVKCRPPRDRNGPHERYHLEVEAGNTLVRNESHKNCDFRVKDLQYSTDYTFKAYFHNGDYPGEPFILHHSTSYNSKALIAFLAFLIIVTSIALLVVLYKIYDLHKKRSCNLDEQQELVERDDEKQLMNVEPIHADILLETYKRKIADEGRLFLAEFQSIPRVFSKFPIKEARKPFNQNKNRYVDILPYDYNRVELSEINGDAGSNYINASYIDGFKEPRKYIAAQGPRDETVDDFWRMIWEQKATVIVMVTRCEEGNRNKCAEYWPSMEEGTRAFGDVVVKINQHKRCPDYIIQKLNIVNKKEKATGREVTHIQFTSWPDHGVPEDPHLLLKLRRRVNAFSNFFSGPIVVHCSAGVGRTGTYIGIDAMLEGLEAENKVDVYGYVVKLRRQRCLMVQVEAQYILIHQALVEYNQFGETEVNLSELHPYLHNMKKRDPPSEPSPLEAEFQRLPSYRSWRTQHIGNQEENKSKNRNSNVIPYDYNRVPLKHELEMSKESEHDSDESSDDDSDSEEPSKYINASFIMSYWKPEVMIAAQGPLKETIGDFWQMIFQRKVKVIVMLTELKHGDQEICAQYWGEGKQTYGDIEVDLKDTDKSSTYTLRVFELRHSKRKDSRTVYQYQYTNWSVEQLPAEPKELISMIQVVKQKLPQKNSSEGNKHHKSTPLLIHCRDGSQQTGIFCALLNLLESAETEEVVDIFQVVKALRKARPGMVSTFEQYQFLYDVIASTYPAQNGQVKKNNHQEDKIEFDNEVDKVKQDANCVNPLGAPEKLPEAKEQAEGSEPTSGTEGPEHSVNGPASPALNQGS

SEQ ID NO: 907203 - protein, 1050 aa, Homo sapiens
MNGDPNCAKAIKGNTVTEGKKAVRFPYIINHGPARVKTLRLQVPPGVEKFQLHDCTQVEKADTTICLKWKNIETFTCDTQNITYRFQCGNMIFDNKEIKLENLEPEHEYKCDSEILYNNHKFTNASKIIKTDFGSPGEPQIIFCRSEAAHQGVITWNPPQRSFHNFTLCYIKETEKDCLNLDKNLIKYDLQNLKPYTKYVLSLHAYIIAKVQRNGSAAMCHFTTKSAPPSQVWNMTVSMTSDNSMHVKCRPPRDRNGPHERYHLEVEAGNTLVRNESHKNCDFRVKDLQYSTDYTFKAYFHNGDYPGEPFILHHSTSYNSKALIAFLAFLIIVTSIALLVVLYKIYDLHKKRSCNLDEQQELVERDDEKQLMNVEPIHADILLETYKRKIADEGRLFLAEFQSIPRVFSKFPIKEARKPFNQNKNRYVDILPYDYNRVELSEINGDAGSNYINASYIDGFKEPRKYIAAQGPRDETVDDFWRMIWEQKATVIVMVTRCEEGNRNKCAEYWPSMEEGTRAFGDVVVKINQHKRCPDYIIQKLNIVNKKEKATGREVTHIQFTSWPDHGVPEDPHLLLKLRRRVNAFSNFFSGPIVVHCSAGVGRTGTYIGIDAMLEGLEAENKVDVYGYVVKLRRQRCLMVQVEAQYILIHQALVEYNQFGETEVNLSELHPYLHNMKKRDPPSEPSPLEAEFQRLPSYRSWRTQHIGNQEENKSKNRNSNVIPYDYNRVPLKHELEMSKESEHDSDESSDDDSDSEEPSKYINASFIMSYWKPEVMIAAQGPLKETIGDFWQMIFQRKVKVIVMLTELKHGDQEICAQYWGEGKQTYGDIEVDLKDTDKSSTYTLRVFELRHSKRKDSRTVYQYQYTNWSVEQLPAEPKELISMIQVVKQKLPQKNSSEGNKHHKSTPLLIHCRDGSQQTGIFCALLNLLESAETEEVVDIFQVVKALRKARPGMVSTFEQYQFLYDVIASTYPAQNGQVKKNNHQEDKIEFDNEVDKVKQDANCVNPLGAPEKLPEAKEQAEGSEPTSGTEGPEHSVNGPASPALNQGS

SEQ ID NO: 907204 - protein, 832 aa, Homo sapiens [sequence omitted]

SEQ ID NO: 907205 - protein, 838 aa, Homo sapiens
MEATPNVSFPQSQRVPPSQVWNMTVSMTSDNSMHVKCRPPRDRNGPHERYHLEVEAGNTLVRNESHKNCDFRVKDLQYSTDYTFKAYFHNGDYPGEPFILHHSTSYNSKALIAFLAFLIIVTSIALLVVLYKIYDLHKKRSCNLDEQQELVERDDEKQLMNVEPIHADILLETYKRKIADEGRLFLAEFQSIPRVFSKFPIKEARKPFNQNKNRYVDILPYDYNRVELSEINGDAGSNYINASYIDGFKEPRKYIAAQGPRDETVDDFWRMIWEQKATVIVMVTRCEEGNRNKCAEYWPSMEEGTRAFGDVVVKINQHKRCPDYIIQKLNIVNKKEKATGREVTHIQFTSWPDHGVPEDPHLLLKLRRRVNAFSNFFSGPIVVHCSAGVGRTGTYIGIDAMLEGLEAENKVDVYGYVVKLRRQRCLMVQVEAQYILIHQALVEYNQFGETEVNLSELHPYLHNMKKRDPPSEPSPLEAEFQRLPSYRSWRTQHIGNQEENKSKNRNSNVIPYDYNRVPLKHELEMSKESEHDSDESSDDDSDSEEPSKYINASFIMSYWKPEVMIAAQGPLKETIGDFWQMIFQRKVKVIVMLTELKHGDQEICAQYWGEGKQTYGDIEVDLKDTDKSSTYTLRVFELRHSKRKDSRTVYQYQYTNWSVEQLPAEPKELISMIQVVKQKLPQKNSSEGNKHHKSTPLLIHCRDGSQQTGIFCALLNLLESAETEEVVDIFQVVKALRKARPGMVSTFEQYQFLYDVIASTYPAQNGQVKKNNHQEDKIEFDNEVDKVKQDANCVNPLGAPEKLPEAKEQAEGSEPTSGTEGPEHSVNGPASPALNQGS

SEQ ID NO: 907206 - protein, 855 aa, Homo sapiens
MPDQALCPEPPPCEQDSTEKAFTWAFSPQRGPYTPVRENDRSPGDPDNSMHVKCRPPRDRNGPHERYHLEVEAGNTLVRNESHKNCDFRVKDLQYSTDYTFKAYFHNGDYPGEPFILHHSTSYNSKALIAFLAFLIIVTSIALLVVLYKIYDLHKKRSCNLDEQQELVERDDEKQLMNVEPIHADILLETYKRKIADEGRLFLAEFQSIPRVFSKFPIKEARKPFNQNKNRYVDILPYDYNRVELSEINGDAGSNYINASYIDGFKEPRKYIAAQGPRDETVDDFWRMIWEQKATVIVMVTRCEEGNRNKCAEYWPSMEEGTRAFGDVVVKINQHKRCPDYIIQKLNIVNKKEKATGREVTHIQFTSWPDHGVPEDPHLLLKLRRRVNAFSNFFSGPIVVHCSAGVGRTGTYIGIDAMLEGLEAENKVDVYGYVVKLRRQRCLMVQVEAQYILIHQALVEYNQFGETEVNLSELHPYLHNMKKRDPPSEPSPLEAEFQRLPSYRSWRTQHIGNQEENKSKNRNSNVIPYDYNRVPLKHELEMSKESEHDSDESSDDDSDSEEPSKYINASFIMSYWKPEVMIAAQGPLKETIGDFWQMIFQRKVKVIVMLTELKHGDQEICAQYWGEGKQTYGDIEVDLKDTDKSSTYTLRVFELRHSKRKDSRTVYQYQYTNWSVEQLPAEPKELISMIQVVKQKLPQKNSSEGNKHHKSTPLLIHCRDGSQQTGIFCALLNLLESAETEEVVDIFQVVKALRKARPGMVSTFEQYQFLYDVIASTYPAQNGQVKKNNHQEDKIEFDNEVDKVKQDANCVNPLGAPEKLPEAKEQAEGSEPTSGTEGPEHSVNGPASPALNQGS

SEQ ID NO: 907207 - protein, 438 aa, Homo sapiens
MLEGLEAENKVDVYGYVVKLRRQRCLMVQVEAQYILIHQALVEYNQFGETEVNLSELHPYLHNMKKRDPPSEPSPLEAEFQRLPSYRSWRTQHIGNQEENKSKNRNSNVIPYDYNRVPLKHELEMSKESEHDSDESSDDDSDSEEPSKYINASFIMSYWKPEVMIAAQGPLKETIGDFWQMIFQRKVKVIVMLTELKHGDQEICAQYWGEGKQTYGDIEVDLKDTDKSSTYTLRVFELRHSKRKDSRTVYQYQYTNWSVEQLPAEPKELISMIQVVKQKLPQKNSSEGNKHHKSTPLLIHCRDGSQQTGIFCALLNLLESAETEEVVDIFQVVKALRKARPGMVSTFEQYQFLYDVIASTYPAQNGQVKKNNHQEDKIEFDNEVDKVKQDANCVNPLGAPEKLPEAKEQAEGSEPTSGTEGPEHSVNGPASPALNQGS

SEQ ID NO: 907208 - protein, 419 aa, Homo sapiens
  misc_feature (11)..(11): Xaa can be any naturally occurring amino acid
AAAERLREDRXKAQYILIHQALVEYNQFGETEVNLSELHPYLHNMKKRDPPSEPSPLEAEFQRLPSYRSWRTQHIGNQEENKSKNRNSNVIPYDYNRVPLKHELEMSKESEHDSDESSDDDSDSEEPSKYINASFIMSYWKPEVMIAAQGPLKETIGDFWQMIFQRKVKVIVMLTELKHGDQEICAQYWGEGKQTYGDIEVDLKDTDKSSTYTLRVFELRHSKRKDSRTVYQYQYTNWSVEQLPAEPKELISMIQVVKQKLPQKNSSEGNKHHKSTPLLIHCRDGSQQTGIFCALLNLLESAETEEVVDIFQVVKALRKARPGMVSTFEQYQFLYDVIASTYPAQNGQVKKNNHQEDKIEFDNEVDKVKQDANCVNPLGAPEKLPEAKEQAEGSEPTSGTEGPEHSVNGPASPALNQGS

SEQ ID NO: 907209 - protein, 283 aa, Homo sapiens
MTMYLWLKLLAFGFAFLDTEVFVTGQSPTPSPTGVSSVQTPHLPTHADSQTPSAGTDTQTFSGSAANAKLNPTPGSNAISDVPGERSTASTFPTDPVSPLTTTLSLAHHSSAALPARTSNTTITANTSDAYLNASETTTLSPSGSAVISTTTIATTPSKPTCDEKYANITVDYLYNKETKLFTAKLNVNENVECGNNTCTNNEVHNLTECKNASVSISHNSCTAPDKTLILDVPPGVEKFQLHDCTQVEKADTTICLKWKNIETFTCDTQNITYRFQCGKNIT

SEQ ID NO: 907210 - protein, 305 aa, Homo sapiens
ENAHKHDRGTIRRAYPLYPPTNRSTFPLQTETHYSAAILVFLVPSREPRWNYSSFLPKRAAPSLSPKTIPGLVSPLPPRGFSSTKPSTFHNIQNAKPPLGILLAHLPRSPPANAKLNPTPAGNVMSDAYLNASETTTLSPSGSAVISTTTIATTPSKPTCDEKYANITVDYLYNKETKLFTAKLNVNENVECGNNTCTNNEVHNLTECKNASVSISHNSCTAPDKTLILDVPPGVEKFQLHDCTQVEKADTTICLKWKNIETFTCDTQNITYRFQCGNMIFDNKERSARHPPSLVSLHASAVIIK

SEQ ID NO: 907211 - protein, 151 aa, Homo sapiens
MTMYLWLKLLAFGFAFLDTEVFVTGQSPTPSPTGLTTAKMPSVPLSSDPLPTHTTAFSPASTFERENDFSETTTSLSPDNTSTQVSPDSLDNASAFNTTGVSSVQTPHLPTHADSQTPSAGTDTQTFSGSAANAKLNPTPGSNAISGLRVL

SEQ ID NO: 907212 - protein, 82 aa, Homo sapiens
SHAAHAPTHAAAPPRPVYFGAPSAPPRRFSIARQTPHTIRTPAGHQVRVIGHDPTAWNPPKGFSPIPLGYSPVRRSSDLFCR

SEQ ID NO: 907213 - protein, 101 aa, Homo sapiens
YLRSVCVPIAHFARRHGLYSLLPRPAISGQHAGLVVLILFVACALVMAYDLPLQTSQMFFRTPFAFTPAVDPVIFFDHKGPSPSSVQKKDSRAKPNTFPHW

SEQ ID NO: 907214 - protein, 248 aa, Homo sapiens
  misc_feature (1)..(1): Xaa can be any naturally occurring amino acid
  misc_feature (6)..(6): Xaa can be any naturally occurring amino acid
  misc_feature (13)..(13): Xaa can be any naturally occurring amino acid
  misc_feature (20)..(20): Xaa can be any naturally occurring amino acid
  misc_feature (236)..(236): Xaa can be any naturally occurring amino acid
  misc_feature (240)..(240): Xaa can be any naturally occurring amino acid
  misc_feature (244)..(244): Xaa can be any naturally occurring amino acid
XAINLXKVSSAPXAKAGMKXHGLSQLKGPPSQVWNMTVSMTSDNSMHVKCRPPRDRNGPHERYHLEVEAGNTLVRNESHKNCDFRVKDLQYSTDYTFKAYFHNGDYPGEPFILHHSTSYNSKALIAFLAFLIIVTSIALLVVLYKIYDLHKKRSCNLDEQQELVERDDEKQLMNVEPIHADILLETYKRKIADEGRLFLAEFQSIPRVFSKFPIKEARKPFNQNKNRYVDILPYDXNRVXNLKXRSER

SEQ ID NO: 907215 - protein, 307 aa, Homo sapiens
RTEVLSRYVNVAALTYRLLAYPCTSGLIRVAPVAVLVRAVNSIYRCTLLNNLLPLCFGLPQYGNVFHQALGYRTYRHAHLSLVFQSTAELYICVGKHVYVRINRKDEPVPLSKNEYSRLHGADTFPHVMQPLMPVKAATMSPSGSGVISTATIATTPSKPTCDEKYANITVDYLYNKETKLFTAKLNVNENVECGNNTCTNNEVHNLTECKNASVSISHNSCTAPDKTLILDVPPGVEKFQLHDCTQVEKADTTICLKWKNIETFTCDTQNITYRFQCGNMIFDNKERSARHPPSLVSLHASAVIIK

SEQ ID NO: 907216 - protein, 315 aa, Homo sapiens
PTSCITALNPERCTYNQLEKVRLHRRLLATLDYCLVRRALYRWRNIINCHILYPRTRLTDLDGPNYSTTHNTIYKQNLVLMSLDYRYPPLVSNTPSAKYKRMNKYRYGVELKPSLDTEPLRHISTDEVNSVPYQEKSLLIAIVMYQVFFNIWMHAVIVCPIRKRPQEKTTHLSTLKPDIISVRPTTMSPYGRAIIPSATRVMIPSNPTWNEKYANITVDYLYNKETKLFTAKLNVNENVECGNNTCTNNEVHNLTECKNASVSISHNSCTAPDKTLILDVPPGVEKFQLHDCTQVEKAGAKSRGVPYPRPNTEKN

SEQ ID NO: 907217 - protein, 107 aa, Homo sapiens
MVGSLNGFNVKIHNPVLSANEGVEFSASKVDSQLHGDITNGVVENDGGEIMGVAFSVSGKMGFENNALHTSTWDINYKHVNGTTERLCGRVVTYSSTIGDTPSKPTM

SEQ ID NO: 907218 - protein, 1306 aa, Homo sapiens; identical to SEQ ID NO: 907197

SEQ ID NO: 907219 - protein, 1306 aa, Homo sapiens; identical to SEQ ID NO: 907197

SEQ ID NO: 907220 - protein, 1240 aa, Homo sapiens
MTMYLWLKLLAFGFAFLDTEVFVTGQSPTPSPTGVSSVQTPHLPTHADSQTPSAGTDTQTFSGSAANAKLNPTPGSNAISDVPGERSTASTFPTDPVSPLTTTLSLAHHSSAALPARTSNTTITANTSDAYLNASETTTLSPSGSAVISTTTIATTPSKPTCDEKYANITVDYLYNKETKLFTAKLNVNENVECGNNTCTNNEVHNLTECKNASVSISHNSCTAPDKTLILDVPPGVEKFQLHDCTQVEKADTTICLKWKNIETFTCDTQNITYRFQCGNMIFDNKEIKLENLEPEHEYKCDSEILYNNHKFTNASKIIKTDFGSPGEPQIIFCRSEAAHQGVITWNPPQRSFHNFTLCYIKETEKDCLNLDKNLIKYDLQNLKPYTKYVLSLHAYIIAKVQRNGSAAMCHFTTKSAPPSQVWNMTVSMTSDNSMHVKCRPPRDRNGPHERYHLEVEAGNTLVRNESHKNCDFRVKDLQYSTDYTFKAYFHNGDYPGEPFILHHSTSYNSKALIAFLAFLIIVTSIALLVVLYKIYDLHKKRSCNLDEQQELVERDDEKQLMNVEPIHADILLETYKRKIADEGRLFLAEFQSIPRVFSKFPIKEARKPFNQNKNRYVDILPYDYNRVELSEINGDAGSNYINASYIDGFKEPRKYIAAQGPRDETVDDFWRMIWEQKATVIVMVTRCEEGNRNKCAEYWPSMEEGTRAFGDVVVKINQHKRCPDYIIQKLNIVNKKEKATGREVTHIQFTSWPDHGVPEDPHLLLKLRRRVNAFSNFFSGPIVVHCSAGVGRTGTYIGIDAMLEGLEAENKVDVYGYVVKLRRQRCLMVQVEAQYILIHQALVEYNQFGETEVNLSELHPYLHNMKKRDPPSEPSPLEAEFQRLPSYRSWRTQHIGNQEENKSKNRNSNVIPYDYNRVPLKHELEMSKESEHDSDESSDDDSDSEEPSKYINASFIMSYWKPEVMIAAQGPLKETIGDFWQMIFQRKVKVIVMLTELKHGDQEICAQYWGEGKQTYGDIEVDLKDTDKSSTYTLRVFELRHSKRKDSRTVYQYQYTNWSVEQLPAEPKELISMIQVVKQKLPQKNSSEGNKHHKSTPLLIHCRDGSQQTGIFCALLNLLESAETEEVVDIFQVVKALRKARPGMVSTFEQYQFLYDVIASTYPAQNGQVKKNNHQEDKIEFDNEVDKVKQDANCVNPLGAPEKLPEAKEQAEGSEPTSGTEGPEHSVNGPASPALNQGS

SEQ ID NO: 907221 - protein, 1166 aa, Homo sapiens [sequence omitted]

SEQ ID NO: 907222 - protein, 1214 aa, Homo sapiens
RLAATARNRNSRRCVRITSAKLPRQTRPRTPDSPANNGPLSSLYDVYPCEPPPSPTGVFLAMSHHPPPYPDPKTPFLALARGHTTASRPIYDHLLPRPAIFFKGLPLSFEIPTMSPSGSAVISTATIATTPSKPTCDEKYANITVDYLYNKETKLFTAKLNVNENVECGNNTCTNNEVHNLTECKNASVSISHNSCTAPDKTLILDVPPGVEKFQLHDCTQVEKADTTICLKWKNIETFTCDTQNITYRFQCGNMIFDNKEIKLENLEPEHEYKCDSEILYNNHKFTNASKIIKTDFGSPGEPQIIFCRSEAAHQGVITWNPPQRSFHNFTLCYIKETEKDCLNLDKNLIKYDLQNLKPYTKYVLSLHAYIIAKVQRNGSAAMCHFTTKSAPPSQVWNMTVSMTSDNSMHVKCRPPRDRNGPHERYHLEVEAGNTLVRNESHKNCDFRVKDLQYSTDYTFKAYFHNGDYPGEPFILHHSTSYNSKALIAFLAFLIIVTSIALLVVLYKIYDLHKKRSCNLDEQQELVERDDEKQLMNVEPIHADILLETYKRKIADEGRLFLAEFQSIPRVFSKFPIKEARKPFNQNKNRYVDILPYDYNRVELSEINGDAGSNYINASYIDGFKEPRKYIAAQGPRDETVDDFWRMIWEQKATVIVMVTRCEEGNRNKCAEYWPSMEEGTRAFGDVVVKINQHKRCPDYIIQKLNIVNKKEKATGREVTHIQFTSWPDHGVPEDPHLLLKLRRRVNAFSNFFSGPIVVHCSAGVGRTGTYIGIDAMLEGLEAENKVDVYGYVVKLRRQRCLMVQVEAQYILIHQALVEYNQFGETEVNLSELHPYLHNMKKRDPPSEPSPLEAEFQRLPSYRSWRTQHIGNQEENKSKNRNSNVIPYDYNRVPLKHELEMSKESEHDSDESSDDDSDSEEPSKYINASFIMSYWKPEVMIAAQGPLKETIGDFWQMIFQRKVKVIVMLTELKHGDQEICAQYWGEGKQTYGDIEVDLKDTDKSSTYTLRVFELRHSKRKDSRTVYQYQYTNWSVEQLPAEPKELISMIQVVKQKLPQKNSSEGNKHHKSTPLLIHCRDGSQQTGIFCALLNLLESAETEEVVDIFQVVKALRKARPGMVSTFEQYQFLYDVIASTYPAQNGQVKKNNHQEDKIEFDNEVDKVKQDANCVNPLGAPEKLPEAKEQAEGSEPTSGTEGPEHSVNGPASPALNQGS

SEQ ID NO: 907223 - protein, 849 aa, Homo sapiens
MFIIQRFTLQKSTVMKGSMGISNLKVSPSQVWNMTVSMTSDNSMHVKCRPPRDRNGPHERYHLEVEAGNTLVRNESHKNCDFRVKDLQYSTDYTFKAYFHNGDYPGEPFILHHSTSYNSKALIAFLAFLIIVTSIALLVVLYKIYDLHKKRSCNLDEQQELVERDDEKQLMNVEPIHADILLETYKRKIADEGRLFLAEFQSIPRVFSKFPIKEARKPFNQNKNRYVDILPYDYNRVELSEINGDAGSNYINASYIDGFKEPRKYIAAQGPRDETVDDFWRMIWEQKATVIVMVTRCEEGNRNKCAEYWPSMEEGTRAFGDVVVKINQHKRCPDYIIQKLNIVNKKEKATGREVTHIQFTSWPDHGVPEDPHLLLKLRRRVNAFSNFFSGPIVVHCSAGVGRTGTYIGIDAMLEGLEAENKVDVYGYVVKLRRQRCLMVQVEAQYILIHQALVEYNQFGETEVNLSELHPYLHNMKKRDPPSEPSPLEAEFQRLPSYRSWRTQHIGNQEENKSKNRNSNVIPYDYNRVPLKHELEMSKESEHDSDESSDDDSDSEEPSKYINASFIMSYWKPEVMIAAQGPLKETIGDFWQMIFQRKVKVIVMLTELKHGDQEICAQYWGEGKQTYGDIEVDLKDTDKSSTYTLRVFELRHSKRKDSRTVYQYQYTNWSVEQLPAEPKELISMIQVVKQKLPQKNSSEGNKHHKSTPLLIHCRDGSQQTGIFCALLNLLESAETEEVVDIFQVVKALRKARPGMVSTFEQYQFLYDVIASTYPAQNGQVKKNNHQEDKIEFDNEVDKVKQDANCVNPLGAPEKLPEAKEQAEGSEPTSGTEGPEHSVNGPASPALNQGS

SEQ ID NO: 907224 - protein, 851 aa, Homo sapiens
  misc_feature (1)..(1): Xaa can be any naturally occurring amino acid
  misc_feature (6)..(6): Xaa can be any naturally occurring amino acid
  misc_feature (13)..(13): Xaa can be any naturally occurring amino acid
  misc_feature (20)..(20): Xaa can be any naturally occurring amino acid
XAINLXKVSSAPXAKAGMKXHGLSQLKGPPSQVWNMTVSMTSDNSMHVKCRPPRDRNGPHERYHLEVEAGNTLVRNESHKNCDFRVKDLQYSTDYTFKAYFHNGDYPGEPFILHHSTSYNSKALIAFLAFLIIVTSIALLVVLYKIYDLHKKRSCNLDEQQELVERDDEKQLMNVEPIHADILLETYKRKIADEGRLFLAEFQSIPRVFSKFPIKEARKPFNQNKNRYVDILPYDYNRVELSEINGDAGSNYINASYIDGFKEPRKYIAAQGPRDETVDDFWRMIWEQKATVIVMVTRCEEGNRNKCAEYWPSMEEGTRAFGDVVVKINQHKRCPDYIIQKLNIVNKKEKATGREVTHIQFTSWPDHGVPEDPHLLLKLRRRVNAFSNFFSGPIVVHCSAGVGRTGTYIGIDAMLEGLEAENKVDVYGYVVKLRRQRCLMVQVEAQYILIHQALVEYNQFGETEVNLSELHPYLHNMKKRDPPSEPSPLEAEFQRLPSYRSWRTQHIGNQEENKSKNRNSNVIPYDYNRVPLKHELEMSKESEHDSDESSDDDSDSEEPSKYINASFIMSYWKPEVMIAAQGPLKETIGDFWQMIFQRKVKVIVMLTELKHGDQEICAQYWGEGKQTYGDIEVDLKDTDKSSTYTLRVFELRHSKRKDSRTVYQYQYTNWSVEQLPAEPKELISMIQVVKQKLPQKNSSEGNKHHKSTPLLIHCRDGSQQTGIFCALLNLLESAETEEVVDIFQVVKALRKARPGMVSTFEQYQFLYDVIASTYPAQNGQVKKNNHQEDKIEFDNEVDKVKQDANCVNPLGAPEKLPEAKEQAEGSEPTSGTEGPEHSVNGPASPALNQGS

SEQ ID NO: 907225 - protein, 868 aa, Homo sapiens
MYNARSIALENDNRIGNRFFCRRLIRAKVTYNIGPKWAIPNYNAPPKPGGDTWCSLVQQVRGEGGKVKASQGLLGPPRAYQFGELKLKILGLRIVCIRIANSLKKILNFDSSTFKAYFHNGDYPGEPFILHHSTSYNSKALIAFLAFLIIVTSIALLVVLYKIYDLHKKRSCNLDEQQELVERDDEKQLMNVEPIHADILLETYKRKIADEGRLFLAEFQSIPRVFSKFPIKEARKPFNQNKNRYVDILPYDYNRVELSEINGDAGSNYINASYIDGFKEPRKYIAAQGPRDETVDDFWRMIWEQKATVIVMVTRCEEGNRNKCAEYWPSMEEGTRAFGDVVVKINQHKRCPDYIIQKLNIVNKKEKATGREVTHIQFTSWPDHGVPEDPHLLLKLRRRVNAFSNFFSGPIVVHCSAGVGRTGTYIGIDAMLEGLEAENKVDVYGYVVKLRRQRCLMVQVEAQYILIHQALVEYNQFGETEVNLSELHPYLHNMKKRDPPSEPSPLEAEFQRLPSYRSWRTQHIGNQEENKSKNRNSNVIPYDYNRVPLKHELEMSKESEHDSDESSDDDSDSEEPSKYINASFIMSYWKPEVMIAAQGPLKETIGDFWQMIFQRKVKVIVMLTELKHGDQEICAQYWGEGKQTYGDIEVDLKDTDKSSTYTLRVFELRHSKRKDSRTVYQYQYTNWSVEQLPAEPKELISMIQVVKQKLPQKNSSEGNKHHKSTPLLIHCRDGSQQTGIFCALLNLLESAETEEVVDIFQVVKALRKARPGMVSTFEQYQFLYDVIASTYPAQNGQVKKNNHQEDKIEFDNEVDKVKQDANCVNPLGAPEKLPEAKEQAEGSEPTSGTEGPEHSVNGPASPALNQGS

SEQ ID NO: 907226 - protein, 103 aa, Homo sapiens
  misc_feature (31)..(31): Xaa can be any naturally occurring amino acid
APTSAHHGQPVAPRTSKYRPAHRHLHRTPRXTPLHSHSAPSLRVTRSTMTQTRRSLNAPRTLSSRISASSSILRVNLVLSSPDLRPTTTTGLVHRSISTTGHP

SEQ ID NO: 907227 - protein, 250 aa, Homo sapiens
MTMYLWLKLLAFGFAFLDTEVFVTGQSPTPSPTGVSSVQTPHLPTHADSQTPSAGTDTQTFSGSAANAKLNPTPGSNAISDVPGERSTASTFPTDPVSPLTTTLSLAHHSSAALPARTSNTTITANTSDAYLNASETTTLSPSGSAVISTTTIATTPSKPTCDEKYANITVDYLYNKETKLFTAKLNVNENVECGNNTCTNNEVHNLTECKNASVSISHNSCTAPDKTLILDVPPGKYQFISFNKFIKTV

SEQ ID NO: 907228 - protein, 103 aa, Homo sapiens; identical to SEQ ID NO: 907226
  misc_feature (31)..(31): Xaa can be any naturally occurring amino acid

SEQ ID NO: 907229 - protein, 446 aa, Homo sapiens
MREIVHIQAGQCGNQIGAKFWEVISDEHGIDPTGSYHGDSDLQLERINVYYNEATGNKYVPRAILVDLEPGTMDSVRSGPFGQIFRPDNFVFGQSGAGNNWAKGHYTEGAELVDSVLDVVRKESESCDCLQGFQLTHSLGGGTGSGMGTLLISKIREEYPDRIMNTFSVMPSPKVSDTVVEPYNATLSVHQLVENTDETYCIDNEALYDICFRTLKLTTPTYGDLNHLVSATMSGVTTCLRFPGQLNADLRKLGRVNMVPFPRLHFFMPGFAPLTSRGSQQYRALTVPELTQQMFDSKNMMAACDPRHGRYLTVAAIFRGRMSMKEVDEQMLNVQNKNSSYFVEWIPNNVKTAVCDIPPRGLKMSATFIGNSTAIQELFKRISEQFTAMFRRKAFLHWYTGEGMDEMEFTEAESNMNDLVSEYQQYQDATADEQGEFEEEEGEDEA

SEQ ID NO: 907230 - protein, 446 aa, Homo sapiens; identical to SEQ ID NO: 907229

SEQ ID NO: 907231 - protein, 445 aa, Homo sapiens
MREIVHIQAGQCGNQIGAKFWEVISDEHGIDPTGSYHGDSDLQLERINVYYNEATGNKYVPRAILVDLEPGTMDSVRSGPFGQIFRPDNFVFGQSGAGNNWAKGHYTEGAELVDSVLDVVRKESESCDCLQGFQLTHSLGGGTGSGMGTLLISKIREEYPDRIMNTFSVMPSPKVSDTVVEPYNATLSVHQLVENTDETYCIDNEALYDICFRTLKLTTPTYGDLNHLVSATMSGVTTCLRFPGQLNADLRKLGRVNMVPFPRLHFFMPGFAPLTSRGSQQYRALTVPELTQQMFDSKNMMAACDPRHGRYLTVAAIFRGRMSMKEVDEQMLNVQNKNSSYFVEWIPNNVKTAVCDIPPRGLKMSATFIGNSTAIQELFKRISEQFTAMFRRKAFLHWYTGEGMDEMEFTEAESNMNDLVSEYQQYQDATADEQGEFEEEEGEDD

SEQ ID NO: 907232 - protein, 445 aa, Homo sapiens; identical to SEQ ID NO: 907231

SEQ ID NO: 907233 - protein, 374 aa, Homo sapiens
MDSVRSGPFGQIFRPDNFVFGQSGAGNNWAKGHYTEGAELVDSVLDVVRKESESCDCLQGFQLTHSLGGGTGSGMGTLLISKIREEYPDRIMNTFSVMPSPKVSDTVVEPYNATLSVHQLVENTDETYCIDNEALYDICFRTLKLTTPTYGDLNHLVSATMSGVTTCLRFPGQLNADLRKLGRVNMVPFPRLHFFMPGFAPLTSRGSQQYRALTVPELTQQMFDSKNMMAACDPRHGRYLTVAAIFRGRMSMKEVDEQMLNVQNKNSSYFVEWIPNNVKTAVCDIPPRGLKMSATFIGNSTAIQELFKRISEQFTAMFRRKAFLHWYTGEGMDEMEFTEAESNMNDLVSEYQQYQDATADEQGEFEEEEGEDEA

SEQ ID NO: 907234 - protein, 431 aa, Homo sapiens
MREIVHIQAGQCGNQIGAKFWEVISDEHGIDPTGSYHGDSDLQLERINVYYNEATGNKYVPRAILVDLEPGTMDSVRSGPFGQIFRPDNFVFGQSGAGNNWAKGHYTEGAELVDSVLDVVRKESESCDCLQGFQLTHSLGGGTGSGMGTLLISKIREEYPDRIMNTFSVMPLSVHQLVENTDETYCIDNEALYDICFRTLKLTTPTYGDLNHLVSATMSGVTTCLRFPGQLNADLRKLGRVNMVPFPRLHFFMPGFAPLTSRGSQQYRALTVPELTQQMFDSKNMMAACDPRHGRYLTVAAIFRGRMSMKEVDEQMLNVQNKNSSYFVEWIPNNVKTAVCDIPPRGLKMSATFIGNSTAIQELFKRISEQFTAMFRRKAFLHWYTGEGMDEMEFTEAESNMNDLVSEYQQYQDATADEQGEFEEEEGEDEA

SEQ ID NO: 907235 - protein, 125 aa, Homo sapiens
AHLTPSSASSWTDLRGRSLHAHSWRTDEVSVRAAVSAPSSAASKLELEEALRTILLILLYATVPGNGDELRTYSGVSKYERRLQVMESTEALSNMNDLVSEYQQYQDATADEQGEFEEEEGEDEA

SEQ ID NO: 907236 - protein, 446 aa, Homo sapiens; identical to SEQ ID NO: 907229

SEQ ID NO: 907237 - protein, 380 aa, Homo sapiens
MREIVHIQAGQCGNQIGAKFWEVISDEHGIDPTGSYHGDSDLQLERINVYYNEATGNKYVPRAILVDLEPGTMDSVRSGPFGQIFRPDNFVFGQSGAGNNWAKGHYTEGAELVDSVLDVVRKESESCDCLQGFQLTHSLGGGTGSGMGTLLISKIREEYPDRIMNTFSVMPSPKVSDTVVEPYNATLSVHQLVENTDETYCIDNEALYDICFRTLKLTTPTYGDLNHLVSATMSGVTTCLRFPGQLNADLRKLGRVNMVPFPRLHFFMPGFAPLTSRGSQQYRALTVPELTQQMFDSKNMMAACDRPGVLRGGIFGRCHEGGHDVRGEQTGIWEGPKTEKRGIAPAKLASRKRQGRLEEDRGHDGGKDGKTVQAQEKSQW

SEQ ID NO: 907238 - protein, 374 aa, Homo sapiens; identical to SEQ ID NO: 907233

SEQ ID NO: 907239 - protein, 425 aa, Homo sapiens
MREIVHIQAGQCGNQIGAKFWEVISDEHGIDPTGSYHGDSDLQLERINVYYNEATGNKYVPRAILVDLEPGTMDSVRSGPFGQIFRPDNFVFGQSGAGNNWAKGHYTEGAELVDSVLDVVRKESESCDCLQGFQLTHSLGGGTGSGMGTLLISKIREEYPDRIMNTFSVMPSPKVSDTVVEPYNATLSVHQLVENTDETYCIDLNHLVSATMSGVTTCLRFPGQLNADLRKLGRVNMVPFPRLHFFMPGFAPLTSRGSQQYRALTVPELTQQMFDSKNMMAACDPRHGRYLTVAAIFRGRMSMKEVDEQMLNVQNKNSSYFVEWIPNNVKTAVCDIPPRGLKMSATFIGNSTAIQELFKRISEQFTAMFRRKAFLHWYTGEGMDEMEFTEAESNMNDLVSEYQQYQDATADEQGEFEEEEGEDEA

SEQ ID NO: 907240 - protein, 171 aa, Homo sapiens
MEVRVRIAYLTQRDDAGRNRKVTLTRVWDESSEQLKVVVGSRHRGRAVNTTIGSSTGSSAVFSASVMEHAVVLAWYSVCDRVRLKKVGRDRSVIWDQSRAHLDDDERGERRQRHGEEEKLRRSRRAVETESRNAVAASKREQRDARNDEGDGNQCGHHDCRGEMKQQETKR

SEQ ID NO: 907241 - protein, 171 aa, Homo sapiens
MEVRVRIAYLTQRDDAGRNRKVTLTRVWDESSEQLKVVVGSRHRGRAVNTTIGSETGSSAVFSASVMEHAVVLAWYSVCDRVRLKKVGRDRSVIWDQSRAHLDDDERGERRQRHGEEEKLRRSRRAVETESRNAVAASKREQRDARNDEGDGNQCGHHDCRGRMKQQETKR

SEQ ID NO: 907242 - protein, 138 aa, Homo sapiens
PPPPPPPPAAPHRPARPRKLRLGTRPGVQRCDEGVGGGISPWVRLAFSLPCLLELQRKFEMAGGKAGKDSGKAKTKAVSRSQRAGLQFPVGRIHRHLKSRTTSHGRVGATAAVYSAAILGVPHRRYEYLNWQEMHQKT

SEQ ID NO: 907243 - protein, 138 aa, Homo sapiens; identical to SEQ ID NO: 907242

SEQ ID NO: 907244 - protein, 138 aa, Homo sapiens; identical to SEQ ID NO: 907242

SEQ ID NO: 907245 - protein, 138 aa, Homo sapiens; identical to SEQ ID NO: 907242

SEQ ID NO: 907246 - protein, 171 aa, Homo sapiens
MEVRVRIAYLTQRDDAGRNRKVTLTRVWDESSEQLKVVVGSRHRGRAVNTTIGSETGSSAVFSASVMEHAVVLAWYSVCDRVRLKKVGRDRSVIWDQSRAHLDDDERGERRQRHGEEEKLRRSRRAVETESRNAVAASKREQRDARNDEGDGNQCGHHDCRGEMKQQETKR

SEQ ID NO: 907247 - protein, 171 aa, Homo sapiens; identical to SEQ ID NO: 907240

SEQ ID NO: 907248 - protein, 175 aa, Homo sapiens
MIAEEVRVRIAYLTQRDDAGRNRKVTLTRVWDESSEQLKVVVGSRHRGRAVNTTIGSRRVSSAVFSASVMEHAVVLAWYSVCDRVRLKKVGRDRSVIWDQSRAHLDDDERGERRQRHGEEEKLRRSRRAVETESRNAVAASKREQRDARNDEGDGNQCGHHDCRGEMKQQETKRG

SEQ ID NO: 907249 - protein, 171 aa, Homo sapiens; identical to SEQ ID NO: 907246

SEQ ID NO: 907250 - protein, 175 aa, Homo sapiens; identical to SEQ ID NO: 907248

SEQ ID NO: 907251 - protein, 132 aa, Homo sapiens
  misc_feature (119)..(119): Xaa can be any naturally occurring amino acid
MAGGKAGKDSGKAKTKAVSRSQRAGLQAPRGPSLKTPKNKDNQSWTSDRYCQLLQYSHPRRPNRTKTLTPGACKKRFKLSETHPKKVINSDPPPIKIPPLKNQTTTTKWERRKKPPSHXATNTAQTRKNREY

SEQ ID NO: 907252 - protein, 171 aa, Homo sapiens; identical to SEQ ID NO: 907246

SEQ ID NO: 907253 - protein, 138 aa, Homo sapiens; identical to SEQ ID NO: 907242

SEQ ID NO: 907254 - protein, 171 aa, Homo sapiens; identical to SEQ ID NO: 907246

SEQ ID NO: 907255 - protein, 138 aa, Homo sapiens; identical to SEQ ID NO: 907242

SEQ ID NO: 907256 - protein, 136 aa, Homo sapiens
ARRGANGRGRPCGAPRAGDPGRVRGRARGGTRRGGGWARRLGNSIFSVPPPLAGVCAPQAGGKAGKDSGKAKTKAVSRSQRAGLQFPVGRIHRHLKSRTTSHGRVGATAAVYSAAILGVPHRRYEYLNWQEMHQKT

SEQ ID NO: 907257 - protein, 171 aa, Homo sapiens
MEVRVRIAYLTQRDDAGRNRKVTLTRVWDESSEQLKVVVGSRHRGRAVNTTIGSQTGSSAVFSASVMEHAVVLAWYSVCDRVRLKKVGRDRSVIWDQSRAHLDDDERGERRQRHGEEEKLRRSRRAVETESRNAVAASKREQRDARNDEGDGNQCGHHDCRGEMKQQETKR

SEQ ID NO: 907258 - protein, 171 aa, Homo sapiens; identical to SEQ ID NO: 907246

SEQ ID NO: 907259 - protein, 171 aa, Homo sapiens; identical to SEQ ID NO: 907246

SEQ ID NO: 907260 - protein, 43 aa, Homo sapiens
  misc_feature (22)..(22): Xaa can be any naturally occurring amino acid
  misc_feature (24)..(24): Xaa can be any naturally occurring amino acid
  misc_feature (36)..(36): Xaa can be any naturally occurring amino acid
MNECGILSSRLQCAGGGVIPHXHXSLIGKYSTAVHXVSPVTDL

SEQ ID NO: 907261 - protein, 171 aa, Homo sapiens; identical to SEQ ID NO: 907246

SEQ ID NO: 907262 - protein, 903 aa, Homo sapiens
MAIQFRSLFPLALPGMLALLGWWWFFSRKKGHVSSHDEQQVEAGAVQLRADPAIKEPLPVEDVCPKVVSTPPSVTEPPEKELSTVSKLPAEPPALLQTHPPCRRSESSGILPNTTDMRLRPGTRRDDSTKLELALTGGEAKSIPLECPLSSPKGVLFSSKSAEVCKQDSPFSRVPRKVQPGYPVVPAEKRSSGERARETGGAEGTGDAVLGEKVLEEALLSREHVLELENSKGPSLASLEGEEDKGKSSSSQVVGPVQEEEYVAEKLPSRFIESAHTELAKDDAAPAPPVADAKAQDRGVEGELGNEESLDRNEEGLDRNEEGLDRNEESLDRNEEGLDRNEEIKRAAFQIISQVISEATEQVLATTVGKVAGRVCQASQLQGQKEESCVPVHQKTVLGPDTAEPATAEAAVAPPDAGLPLPGLPAEGSPPPKTYVSCLKSLLSSPTKDSKPNISAHHISLASCLALTTPSEELPDRAGILVEDATCVTCMSDSSQSVPLVASPGHCSDSFSTSGLEDSCTETSSSPRDKAITPPLPESTVPFSNGVLKGELSDLGAEDGWTMDAEADHSGGSDRNSMDSVDSCCSLKKTESFQNAQAGSNPKKVDLIIWEIEVPKHLVGRLIGKQGRYVSFLKQTSGAKIYISTLPYTQSVQICHIEGSQHHVDKALNLIGKKFKELNLTNIYAPPLPSLALPSLPMTSWLMLPDGITVEVIVVNQVNAGHLFVQQHTHPTFHALRSLDQQMYLCYSQPGIPTLPTPVEITVICAAPGADGAWWRAQVVASYEETNEVEIRYVDYGGYKRVKVDVLRQIRSDFVTLPFQGAEVLLDSVMPLSDDDQFSPEADAAMSEMTGNTALLAQVTSYSPTGLPLIQLWSVVGDEVVLINRSLVERGLAQWVDSYYTSL

SEQ ID NO: 907263 - protein, 937 aa, Homo sapiens
MAIQFRSLFPLALPGMLALLGWWWFFSRKKGHVSSHDEQQVEAGAVQLRADPAIKEPLPVEDVCPKVVSTPPSVTEPPEKELSTVSKLPAEPPALLQTHPPCRRSESSGILPNTTDMRLRPGTRRDDSTKLELALTGGEAKSIPLECPLSSPKGVLFSSKSAEVCKQDSPFSRVPRKVQPGYPVVPAEKRSSGERARETGGAEGTGDAVLGEKVLEEALLSREHVLELENSKGPSLASLEGEEDKGKSSSSQVVGPVQEEEYVAEKLPSRFIESAHTELAKDDAAPAPPVADAKAQDRGVEGELGNEESLDRNEEGLDRNEEGLDRNEESLDRNEEGLDRNEEIKRAAFQIISQVISEATEQVLATTVGKVAGRVCQASQLQGQKEESCVPVHQKTVLGPDTAEPATAEAAVAPPDAGLPLPGLPAEGSPPPKTYVSCLKSLLSSPTKDSKPNISAHHISLASCLALTTPSEELPDRAGILVEDATCVTCMSDSSQSVPLVASPGHCSDSFSTSGLEDSCTETSSSPRDKAITPPLPESTVPFSNGVLKGELSDLGAEDGWTMDAEADHSGVAAPPPGKRGTLITRCPGFSSADPSVDSSDRYLTGSDRNSMDSVDSCCSLKKTESFQNAQAGSNPKKVDLIIWEIEVPKHLVGRLIGKQGRYVSFLKQTSGAKIYISTLPYTQSVQICHIEGSQHHVDKALNLIGKKFKELNLTNIYAPPLPSLALPSLPMTSWLMLPDGITVEVIVVNQVNAGHLFVQQHTHPTFHALRSLDQQMYLCYSQPGIPTLPTPVEITVICAAPGADGAWWRAQVVASYEETNEVEIRYVDYGGYKRVKVDVLRQIRSDFVTLPFQGAEVLLDSVMPLSDDDQFSPEADAAMSEMTGNTALLAQVTSYSPTGLPLIQLWSVVGDEVVLINRSLVERGLAQWVDSYYTSL

SEQ ID NO: 907264 - protein, 903 aa, Homo sapiens; identical to SEQ ID NO: 907262

SEQ ID NO: 907265 - protein, 937 aa, Homo sapiens; identical to SEQ ID NO: 907263

SEQ ID NO: 907266 - protein, 938 aa, Homo sapiens
MAIQFRSLFPLALPGMLALLGWWWFFSRKKGHVSSHDEQQVEAGAVQLRADPAIKEPLPVEDVCPKVVSTPPSVTEPPEKELSTVSKLPAEPPALLQTHPPCRRSESSGILPNTTDMRLRPGTRRDDSTKLELALTGGEAKSIPLECPLSSPKGVLFSSKSAEVCKQDSPFSRVPRKVQPGYPVVPAEKRSSGERARETGGAEGTGDAVLGEKVLEEALLSREHVLELENSKGPSLASLEGEEDKGKSSSSQVVGPVQEEEYVAEKLPSRFIESAHTELAKDDAAPAPPVADAKAQDRGVEGELGNEESLDRNEEGLDRNEEGLDRNEESLDRNEEGLDRNEEIKRAAFQIISQVISEATEQVLATTVGKVAGRVCQASQLQGQKEESCVPVHQKTVLGPDTAEPATAEAAVAPPDAGLPLPGLPAEGSPPPKTYVSCLKSLLSSPTKDSKPNISAHHISLASCLALTTPSEELPDRAGILVEDATCVTCMSDSSQSVPLVASPGHCSDSFSTSGLEDSCTETSSSPRDKAITPPLPESTVPFSNGVLKGELSDLGAEDGWTMDAEADHSGVAAPPPGKRGTLITRCPGFSSADPSVDSSDRYLTGSDRNSMDSVDSCCSLKKTESFQNAQAGSNPKKVDLIIWEIEVPKHLVGRLIGKQGRYVSFLKQTSGAKIYISTLPYTQSVQICHIEGSQHHVDKALNLIGKKFKELNLTNIYAPPLPSLALPSLPMTSWLMLPDGITVEVIVVNQVNAGHLFVQQHTHPTFHALRSLDQQMYLCYSQPGIPTLPTPVEITVICAAPGADGAWWRAQVVASYEETNEVEIRYVDYGGYKRVKVDVLRQIRSDFVTLPFQGAEVLLDSVMPLSDDDQFSPEADAAMSEMTGNTALLAQVTSYSPTGLPLIQLWSVVGDEVVLINRSLVERGLAQWVDSYYTSHI

SEQ ID NO: 907267 - protein, 845 aa, Homo sapiens
MAIQFRSLFPLALPGMLALLGWWWFFSRKKGHVSSHDEQQVEAGAVQLRADPAIKEPLPVEDVCPKVVSTPPSVTEPPEKELSTVSKLPAEPPALLQTHPPCRRSESSGILPNTTDMRLRPGTRRDDSTKLELALTGGEAKSIPLECPLSSPKGVLFSSKSAEVCKQDSPFSRVPRKVQPGYPVVPAEKRSSGERARETGGAEGTGDAVLGEKVLEEALLSREHVLELENSKGPSLASLEGEEDKGKSSSSQVVGPVQEEEYVAEKLPSRFIESAHTELAKDDAAPAPPVADAKAQDRGVEGELGNEESLDRNEEGLDRNEEGLDRNEESLDRNEEGLDRNEEIKRAAFQIISQVISEATEQVLATTVGKVAGRVCQASQLQGQKEESCVPVHQKTVLGPDTAEPATAEAAVAPPDAGLPLPGLPAEGSPPPKTYVSCLKSLLSSPTKDSKPNISAHHISLASCLALTTPSEELPDRAGILVEDATCVTCMSDSSQSVPLVASPGHCSDSFSTSGLEDSCTETSSSPRDKAITPPLPESTVPFSNGVLKGELSDLGAEDGWTMDAEADHSGVAAPPPGKRGTLITRCPGFSSADPSVDSSDRYLTGSDRNSMDSVDSCCSLKKTESFQNAQAGSNPKKVDLIIWEIEVPKHLVGRLIGKQGRYVSFLKQTSGAKIYISTLPYTQSVQICHIEGSQHHVDKALNLIGKKFKELNLTNIYAPPLPSLALPSLPMTSWLMLPDGITVEVIVVNQVNAGHLFVQQHTHPTFHALRSLDQQMYLCYSQPGIPTLPTPVEITVICAAPGADGAWWRAQVVASYEETNEVEIRYVDYGGYKRVKVDVLRQIS

SEQ ID NO: 907268 - protein, 821 aa, Homo sapiens
MAIQFRSLFPLALPGMLALLGWWWFFSRKKGHVSSHDEQQVEAGAVQLRADPAIKEPLPVEDVCPKVVSTPPSVTEPPEKELSTVSKLPAEPPALLQTHPPCRRSESSGILPNTTDMRLRPGTRRDDSTKLELALTGGEAKSIPLECPLSSPKGVLFSSKSAEVCKQDSPFSRVPRKVQPGYPVVPAEKRSSGERARETGGAEGTGDAVLGEKVLEEALLSREHVLELENSKGPSLASLEGEEDKGKSSSSQVVGPVQEEEYVAEKLPSRFIESAHTELAKDDAAPAPPVADAKAQDRGVEGELGNEESLDRNEEGLDRNEEGLDRNEESLDRNEEGLDRNEEIKRAAFQIISQVISEATEQVLATTVGKVAGRVCQASQLQGQKEESCVPVHQKTVLGPDTAEPATAEAAVAPPDAGLPLPGLPAEGSPPPKTYVSCLKSLLSSPTKDSKPNISAHHISLASCLALTTPSEELPDRAGILVEDATCVTCMSDSSQSVPLVASPGHCSDSFSTSGLEDSCTETSSSPRDKAITPPLPESTVPFSNGVLKGELSDLGAEDGWTMDAEADHSGGSDRNSMDSVDSCCSLKKTESFQNAQAGSNPKKVDLIIWEIEVPKETLLEIEIRDVCEVHGRARHHGDVSLRGITSGAKIYISTLPYTQSVQICHIEGSQHHVDKALNLIGKKFKELNLTNIYAPPLPSLALPSLPMTSWLMLPDGITVEVIVVNQVNAGHLFVQQHTHPTFHALRSLDQQMYLCYSQPGIPTLPTPVEITVICAAPGADGAWWRAQVVASYEETNEVEIRYVDYGGYKRVKVDVLRQIS

SEQ ID NO: 907269 - protein, 148 aa, Homo sapiens
MAIQFRSLFPLALPGMLALLGWWWFFSRKKGHVSSHDEQQVEAGAVQLRADPAIKEPLPVEDVCPKVVSTPPSVTEPPEKELSTVSKLPAEPPALLQTHPPCRRSESSGILPNTTDMTFQKKKRKKKKKKKKKNVGGILCVGGEEKKV

SEQ ID NO: 907270 - protein, 903 aa, Homo sapiens; identical to SEQ ID NO: 907262

SEQ ID NO: 907271 - protein, 896 aa, Homo sapiens
MAIQFRSLFPLALPGMLALLGWWWFFSRKKGHVSSHDEQQVEAGAVQLRADPAIKEPLPVEDVCPKVVSTPPSVTEPPEKELSTVSKLPAEPPALLQTHPPCRRSESSGILPNTTDMRLRPGTRRDDSTKLELALTGGEAKSIPLECPLSSPKGVLFSSKSAEVCKQDSPFSRVPRKVQPGYPVVPAEKRSSGERARETGGAEGTGDAVLGEKVLEEALLSREHVLELENSKGPSLASLEGEEDKGKSSSSQVVGPVQEEEYVAEKLPSRFIESAHTELAKDDAAPAPPVADAKAQDRGVEGELGNEESLDRNEEGLDRNEEGLDRNEEGLDRNEEIKRAAFQIISQVISEATEQVLATTVGKVAGRVCQASQLQGQKEESCVPVHQKTVLGPDTAEPATAEAAVAPPDAGLPLPGLPAEGSPPPKTYVSCLKSLLSSPTKDSKPNISAHHISLASCLALTTPSEELPDRAGILVEDATCVTCMSDSSQSVPLVASPGHCSDSFSTSGLEDSCTETSSSPRDKAITPPLPESTVPFSNGVLKGELSDLGAEDGWTMDAEADHSGGSDRNSMDSVDSCCSLKKTESFQNAQAGSNPKKVDLIIWEIEVPKHLVGRLIGKQGRYVSFLKQTSGAKIYISTLPYTQSVQICHIEGSQHHVDKALNLIGKKFKELNLTNIYAPPLPSLALPSLPMTSWLMLPDGITVEVIVVNQVNAGHLFVQQHTHPTFHALRSLDQQMYLCYSQPGIPTLPTPVEITVICAAPGADGAWWRAQVVASYEETNEVEIRYVDYGGYKRVKVDVLRQIRSDFVTLPFQGAEVLLDSVMPLSDDDQFSPEADAAMSEMTGNTALLAQVTSYSPTGLPLIQLWSVVGDEVVLINRSLVERGLAQWVDSYYTSL

SEQ ID NO: 907272 - protein, 812 aa, Homo sapiens
MAIQFRSLFPLALPGMLALLGWWWFFSRKKGHVSSHDEQQVEAGAVQLRADPAIKEPLPVEDVCPKVVSTPPSVTEPPEKELSTVSKLPAEPPALLQTHPPCRRSESSGILPNTTDMRLRPGTRRDDSTKLELALTGGEAKSIPLECPLSSPKGVLFSSKSAEVCKQDSPFSRVPRKVQPGYPVVPAEKRSSGERARETGGAEGTGDAVLGEKVLEEALLSREHVLELENSKGPSLASLEGEEDKGKSSSSQVVGPVQEEEYVAEKLPSRFIESAHTELAKDDAAPAPPVADAKAQDRGVEGELGNEESLDRNEEGLDRNEEGLDRNEESLDRNEEGLDRNEEIKRAAFQIISQVISEATEQVLATTVGKVAGRVCQASQLQGQKEESCVPVHQKTVLGPDTAEPATAEAAVAPPDAGLPLPGLPAEGSPPPKTYVSCLKSLLSSPTKDSKPNISAHHISLASCLALTTPSEELPDRAGILVEDATCVTCMSDSSQSVPLVASPGHCSDSFSTSGLEDSCTETSSSPRDKAITPPLPESTVPFSNGVLKGELSDLGAEDGWTMDAEADHSGVAAPPPGKRGTLITRCPGFSSADPSVDSSDRYLTGSDRNSMDSVDSCCSLKKTESFQNAQAGSNPKKVDLIIWEIEVPKHLVGRLIGKQGRYVSFLKQTSGAKIYISTLPYTQSVQICHIEGSQHHVDKALNLIGKKFKELNLTNIYAPPLPSLALPSLPMTSWLMLPDGITVEVIVVNQVNAGHLFVQQHTHPTFHALRSLDQQMYLCYSQPGIPTLPTPVESLTLSPCRFREQKSFWTV

SEQ ID NO: 907273 - protein, 924 aa, Homo sapiens
MAIQFRSLFPLALPGMLALLGWWWFFSRKKGHVSSHDEQQVEAGAVQLRADPAIKEPLPVEDVCPKVVSTPPSVTEPPEKELSTVSKLPAEPPALLQTHPPCRRSESSGILPNTTDMRLRPGTRRDDSTKLELALTGGEAKSIPLECPLSSPKGVLFSSKSAEVCKQDSPFSRVPRKVQPGYPVVPAEKRSSGERARETGGAEGTGDAVLGEKVLEEALLSREHVLELENSKGPSLASLEGEEDKGKSSSSQVVGPVQEEEYVAEKLPSRFIESAHTELAKDDAAPAPPVADAKAQDRGVEGELGNEESLDRNEEGLDRNEEGLDRNEESLDRNEEGLDRNEEIKRAAFQIISQVISEATEQVLATTVGKVAGRVCQASQLQGQKEESCVPVHQKTVLGPDTAEPATAEAAVAPPDAGLPLPGLPAEGSPPPKTYVSCLKSLLSSPTKDSKPNISAHHISLASCLALTTPSEELPDRAGILVEDATCVTCMSDSSQSVPLVASPGHCSDSFSTSGLEDSCTETSSSPRDKAITPPLPESTVPFSNGVLKGELSDLGAEDGWTMDAEADHSGVAAPPPGKRGTLITRCPGFSSADPSVDSSDRYLTGSDRNSMDSVDSCCSLKKTESFQNAQAGSNPKKVDLIIWEIEVPKHLVGRLIGKQGRYVSFLKQTSGAKIYISTLPYTQSVQICHIEGSQHHVDKALNLIGKKFKELNLTNIYAPPLPSLALPSLPMTSWLMLPDGITVEVIVVNQVNAGHLFVQQHTHPTFHALRSLDQQMYLCYSQPGIPTLPTPVEITVICAAPGADGAWWRAQVVASYEETNEVEIRYVDYGGYKRVKVDVLRQIRSDFVTLPFQGAEVLLDSVMPLSDDDQFSPEADAAMSEMTGNTALLAQVTSYSPTGLPLIQLWSVVGDETGFSIVQFKNK

SEQ ID NO: 907274 - protein, 735 aa, Homo sapiens
MAIQFRSLFPLALPGMLALLGWWWFFSRKKGHVSSHDEQQVEAGAVQLRADPAIKEPLPVEDVCPKVVSTPPSVTEPPEKELSTVSKLPAEPPALLQTHPPCRRSESSGILPNTTDMRLRPGTRRDDSTKLELALTGGEAKSIPLECPLSSPKGVLFSSKSAEVCKQDSPFSRVPRKVQPGYPVVPAEKRSSGERARETGGAEGTGDAVLGEKVLEEALLSREHVLELENSKGPSLASLEGEEDKGKSSSSQVVGPVQEEEYVAEKLPSRFIESAHTELAKDDAAPAPPVADAKAQDRGVEGELGNEESLDRNEEGLDRNEEGLDRNEESLDRNEEGLDRNEEIKRAAFQIISQVISEATEQVLATTVGKVAGRVCQASQLQGQKEESCVPVHQKTVLGPDTAEPATAEAAVAPPDAGLPLPGLPAEGSPPPKTYVSCLKSLLSSPTKDSKPNISAHHISLASCLALTTPSEELPDRAGILVEDATCVTCMSDSSQSVPLVASPGHCSDSFSTSGLEDSCTETSSSPRDKAITPPLPESTVPFSNGVLKGELSDLGAEDGWTMDAEADHSGGSDRNSMDSVDSCCSLKKTESFQNAQAGSNPKKVDLIIWEIEVPKHLVGRLIGKQGRYVSFLKQTSGAKIYISTLPYTQSVQICHIEGSQHHVDKALNLIGKKFKELNLTNIYAPPLPSLALPSLPMTSWVSVLLGDPDFLPLSPKPTPNKKLPRPQAKKAKCT

SEQ ID NO: 907275 - protein, 194 aa, Homo sapiens
  misc_feature (194)..(194): Xaa can be any naturally occurring amino acid
MAIQFRSLFPLALPGMLALLGWWWFFSRKKGHVSSHDEQQVEAGAVQLRADPAIKEPLPVEDVCPKVVSTPPSVTEPPEKELSTVSKLPAEPPALLQTHPPCRRSESSGILPNTTDMTFQKKKRKKKKKKKKKNREGTKGGGGKKGRKGGRGQNGRPRPKFRGKRGEKGGTQKRRAENTKNPGHRVENPTKRDX

SEQ ID NO: 907276 - protein, 212 aa, Homo sapiens
CVWIEKESINSVIISDAPEDLHQRMLVAASLSINATGSTMLLRETSLMPHIPGLPALLSMLFAPVIELRIDQNGKYYTGVLCGLGWNPATGASILPEHDMELAFDVQFSVEDVVEVNILRAAINKLVCDGPNGCKCLGPERVAQLQDIARQKLLGLFCQSKPREKIVPKWHEKPYEWNQVDPKLVMEQADRESSRGKNTFLYQLHKLVVLGT

SEQ ID NO: 907277 - protein, 482 aa, Homo sapiens
GGCSRGSQGLAVIAIEEFSIIPEAPMRSSQVSAWGLEAQEDEDPSYKWREEHRLSATQQSELRDVCDYAIETMPSFPKEGSADVEPNQESLVAEACDTPEHWEAVPQSLAGRQARTLAPPELWACPIQSEHLDMAPFSSDLGSEEEEVEFGPGLTSLTWGSGQAEEEEETSSDNSGQTRYYSPCEEHPAETNQNEGAESGTIRQGEELPSEELQESQGLLHPQEVQVLEEQGQQEAGFRGEGTLREDVCADGLLGEEQMIEQVNDEKGEQKQKQEQVQDVMLGRQGERMGLTGEPEGLNDGEWEQEDMERKAQGQGGPEQGEERKRELQVPEENRADSQDEKSQTFLGKSEEVTGKQEDHGIKEKGVPVSGQEAKEPESWDGGRLGAVGRARSREEENEHHGPSMPALIAPEDSPHCDLFPGASYLVTQIPGTQTESRAEELSPAALSPLLEPIRCSHQPISLLGSFLTEESPDKEKLLSVL

SEQ ID NO: 907278 - protein, 488 aa, Homo sapiens
DSALMEAEEAQHGASPPISAIEEFSIIPEAPMRSSQVSAWGLEAQEDEDPSYKWREEHRLSATQQSELRDVCDYAIETMPSFPKEGSADVEPNQESLVAEACDTPEHWEAVPQSLAGRQARTLAPPELWACPIQSEHLDMAPFSSDLGSEEEEVEFGPGLTSLTWGSGQAEEEEETSSDNSGQTRYYSPCEEHPAETNQNEGAESGTIRQGEELPSEELQESQGLLHPQEVQVLEEQGQQEAGFRGEGTLREDVCADGLLGEEQMIEQVNDEKGEQKQKQEQVQDVMLGRQGERMGLTGEPEGLNDGEWEQEDMERKAQGQGGPEQGEERKRELQVPEENRADSQDEKSQTFLGKSEEVTGKQEDHGIKEKGVPVSGQEAKEPESWDGGRLGAVGRARSREEENEHHGPSMPALIAPEDSPHCDLFPGASYLVTQIPGTQTESRAEELSPAALSPLLEPIRCSHQPISLLGSFLTEESPDKEKLLSVL

SEQ ID NO: 907279 - protein, 482 aa, Homo sapiens; identical to SEQ ID NO: 907277

SEQ ID NO: 907280 - protein, 70 aa, Homo sapiens
APQLWSVPGDGGHDGYRMGANNGKQYGSEGKGSSSISSASQSAGITVMSHYTGLSIFLVLVLYAVFGGYL

SEQ ID NO: 907281 - protein, 508 aa, Homo sapiens
APQLWSVPGDGGHDGYRMGANNGKQYGSEGKGSSSISSDVSSSTDHTPTKAQKNVATSEDSDLSMRTLSTPSPALICPPNLPGFQNGRGSSTSSSSITGETVAMVHSPPPTRLTHPLIRLASRPQKEQASIDRLPDHSMVQIFSFLPTNQLCRCARVCRRWYNLAWDPRLWRTIRLTGETINVDRALKVLTRRLCQDTPNVCLMLETVTVSGCRRLTDRGLYTIAQCCPELRRLEVSGCYNISNEAVFDVVSLCPNLEHLDVSGCSKVTCISLTREASIKLSPLHGKQISIRYLDMTDCFVLEDEGLHTIAAHCTQLTHLYLRRCVRLTDEGLRYLVIYCASIKELSVSDCRFVSDFGLREIAKLESRLRYLSIAHCGRVTDVGIRYVAKYCSKLRYLNARGCEGITDHGVEYLAKNCTKLKSLDIGKCPLVSDTGLECLALNCFNLKRLSLKSCESITGQGLQIVAANCFDLQTLNVQDCEVSVEALRFVKRHCKRCVIEHTNPAFF

SEQ ID NO: 907282 - protein, 164 aa, Homo sapiens
VVAGVFGTDIQGDEEAGGAEQRAAQRGQQAGARLLRGRGRWNGHAGLLRPRGVLAPSPLGPANMGRVRTKTVKKAARVIIEKYYTRLGNDFHTNKRVCEEIAIIPSKKRPQQDSRLCHASDEANSERPSKRYLHQAAGGGERTRRDNYVPEVSALDQEIIERRS

SEQ ID NO: 907283 - protein, 114 aa, Homo sapiens
  misc_feature (1)..(1): Xaa can be any naturally occurring amino acid
XKKPSCANSARANMGRVRTKTVKKAARVIIEKYYTRLGNDFHTNKRVCEEIAIIPSKKRPQQDSRLCHASDEANSERPSKRYLHQAAGGGERTRRDNYVPEVSALDQEIIERRS

SEQ ID NO: 907284 - protein, 164 aa, Homo sapiens; identical to SEQ ID NO: 907282

SEQ ID NO: 907285 - protein, 90 aa, Homo sapiens
RDITCYLVAELFAGDNGDLLAHALVRVEVVAQARVVLFYDDPGRLLHGFGANAAHVGWVLGTAGGGERTRRDNYVPEVSALDQEIIERRS

SEQ ID NO: 907286 - protein, 146 aa, Homo sapiens
RYNPPEHYAMLPSLSDHIGSCTLQYRRNPGRLLLLNCGRSTGPANMGRVRTKTVKKAARVIIEKYYTRLGNDFHTNKRVCEEIAIIPSKKRPQQDSRLCHASDEANSERPSKRYLHQAAGGGERTRRDNYVPEVSALDQEIIERRS

SEQ ID NO: 907287 - protein, 117 aa, Homo sapiens
PPPHPPPQLDEAGVTQMGRVRTKTVKKAARVIIEKYYTRLGNDFHTNKRVCEEIAIIPSKKRPQQDSRLCHASDEANSERPSKRYLHQAAGGGERTRRDNYVPEVSALDQEIIERRS

SEQ ID NO: 907288 - protein, 119 aa, Homo sapiens
GVAAADYVFLNWSPRPANMGRVRTKTVKKAARVIIEKYYTRLGNDFHTNKRVCEEIAIIPSKKRPQQDSRLCHASDEANSERPSKRYLHQAAGGGERTRRDNYVPEVSALDQEIIERRS

SEQ ID NO: 907289 - protein, 159 aa, Homo sapiens
HKTLIHTRKHPHVHTPIPHSPPIPQPRHHYRVFLLKKKKKKKKKKKKKKKNFYQGPANMGRVRTKTVKKAARVIIEKYYTRLGNDFHTNKRVCEEIAIIPSKKRPQQDSRLCHASDEANSERPSKRYLHQAAGGGERTRRDNYVPEVSALDQEIIERRS

SEQ ID NO: 907290 - protein, 108 aa, Homo sapiens
MLELVANMGRVRTKTVKKAARVIIEKYYTRLGNDFHTNKRVCEEIAIIPSKKRPQQDSRLCHASDEANSERPSKRYLHQAAGGGERTRRDNYVPEVSALDQEIIERRS

SEQ ID NO: 907291 - protein, 108 aa, Homo sapiens; identical to SEQ ID NO: 907290

SEQ ID NO: 907292 - protein, 109 aa, Homo sapiens
MNQGPAFMGRVRTKTVKKAARVIIEKYYTRLGNDFHTNKRVCEEIAIIPSKKRPQQDSRLCHASDEANSERPSKRYLHQDSKGPGPKGGHGARREKRTDGTPKTKKRFF

SEQ ID NO: 907293 - protein, 108 aa, Homo sapiens
MTASRKNRGRVRTKTVKKAARVIIEKYYTRLGNDFHTNKRVCEEIAIIPSKKRPQQDSRLCHASDEANSERPSKRYLHQAAGGGERTRRDNYVPEVSALDQEIIERRS

SEQ ID NO: 907294 - protein, 108 aa, Homo sapiens; identical to SEQ ID NO: 907290

SEQ ID NO: 907295 - protein, 110 aa, Homo sapiens
MCEAWVGANMGRVRTKTVKKAARVIIEKYYTRLGNDFHTNKRVCEEIAIIPSKKRPQQDSRLCHASDEANSERPSKRYLHQAAGGGERTRRDNYVPEVSALDQEIIERRS

SEQ ID NO: 907296 - protein, 110 aa, Homo sapiens; identical to SEQ ID NO: 907295

SEQ ID NO: 907297 - protein, 119 aa, Homo sapiens; identical to SEQ ID NO: 907288

SEQ ID NO: 907298 - protein, 124 aa, Homo sapiens
MGRVRTKTVKKAARVIIEKYYTRLGRVRTKTVKKAARVIIEKYYTRLGNDFHTNKRVCEEIAIIPSKKRPQQDSRLCHASDEANSERPSKRYLHQAAGGGERTRRDNYVPEVSALDQEIIERRS

SEQ ID NO: 907299 - protein, 162 aa, Homo sapiens
FFFVVPDLLKIIQHYRKNSNRSPRRSPLSPAKSVRNKIAGYVTHLMKRIQRGPVRGISIKLQEEEREHGETIMFLRSQPWIRRLLNVDPDTKGNAEAFGTSAVCPTFRSLSLQIGMNFQNASGTCFELSISGSCCTYFSNLTLLGTNSRKTEDKYLANLYRH

SEQ ID NO: 907300 - protein, 117 aa, Homo sapiens
KLRLGSEAWVAARIANMGRVRTKTVKKAARVIIEKYYTRLGNDFHTNKRVCEEIAIIPSKKRPQQDSRLCHASDEANSERPSKRYLHQAAGGGERTRRDNYVPEVSALDQEIIERRS

SEQ ID NO: 907301 - protein, 102 aa, Homo sapiens
RYNPPEHYAMLPSLSDHIGSCTLQYRRNPGRLLLLNSRPLDYPQQKAPLKISRLCHASDEANSERPSKRYLHQAAGGGERTRRDNYVPEVSALDQEIIERRS

SEQ ID NO: 907302 - protein, 124 aa, Homo sapiens
GEREREREREREREREREQGPANMGRVRTKTVKKAARVIIEKYYTRLGNDFHTNKRVCEEIAIIPSKKRPQQDSRLCHASDEANSERPSKRYLHQAAGGGERTRRDNYVPEVSALDQEIIERRS

SEQ ID NO: 907303 - protein, 114 aa, Homo sapiens; identical to SEQ ID NO: 907283
  misc_feature (1)..(1): Xaa can be any naturally occurring amino acid

SEQ ID NO: 907304 - protein, 114 aa, Homo sapiens; identical to SEQ ID NO: 907283
  misc_feature (1)..(1): Xaa can be any naturally occurring amino acid

SEQ ID NO: 907305 - protein, 114 aa, Homo sapiens; identical to SEQ ID NO: 907283
  misc_feature (1)..(1): Xaa can be any naturally occurring amino acid

SEQ ID NO: 907306 - protein, 114 aa, Homo sapiens; identical to SEQ ID NO: 907283
  misc_feature (1)..(1): Xaa can be any naturally occurring amino acid

SEQ ID NO: 907307 - protein, 114 aa, Homo sapiens; identical to SEQ ID NO: 907283
  misc_feature (1)..(1): Xaa can be any naturally occurring amino acid

SEQ ID NO: 907308 - protein, 114 aa, Homo sapiens; identical to SEQ ID NO: 907283
  misc_feature (1)..(1): Xaa can be any naturally occurring amino acid

SEQ ID NO: 907309 - protein, 114 aa, Homo sapiens; identical to SEQ ID NO: 907283
  misc_feature (1)..(1): Xaa can be any naturally occurring amino acid

SEQ ID NO: 907310 - protein, 114 aa, Homo sapiens; identical to SEQ ID NO: 907283
  misc_feature (1)..(1): Xaa can be any naturally occurring amino acid

SEQ ID NO: 907311 - protein, 114 aa, Homo sapiens; identical to SEQ ID NO: 907283
  misc_feature (1)..(1): Xaa can be any naturally occurring amino acid

SEQ ID NO: 907312 - protein, 114 aa, Homo sapiens; identical to SEQ ID NO: 907283
  misc_feature (1)..(1): Xaa can be any naturally occurring amino acid

SEQ ID NO: 907313 - protein, 114 aa, Homo sapiens; identical to SEQ ID NO: 907283
  misc_feature (1)..(1): Xaa can be any naturally occurring amino acid

SEQ ID NO: 907314 - protein, 114 aa, Homo sapiens; identical to SEQ ID NO: 907283
  misc_feature (1)..(1): Xaa can be any naturally occurring amino acid

SEQ ID NO: 907315 - protein, 114 aa, Homo sapiens; identical to SEQ ID NO: 907283
  misc_feature (1)..(1): Xaa can be any naturally occurring amino acid

SEQ ID NO: 907316 - protein, 114 aa, Homo sapiens; identical to SEQ ID NO: 907283
  misc_feature (1)..(1): Xaa can be any naturally occurring amino acid

SEQ ID NO: 907317 - protein, 114 aa, Homo sapiens; identical to SEQ ID NO: 907283
  misc_feature (1)..(1): Xaa can be any naturally occurring amino acid

SEQ ID NO: 907318 - protein, 114 aa, Homo sapiens; identical to SEQ ID NO: 907283
  misc_feature (1)..(1): Xaa can be any naturally occurring amino acid

SEQ ID NO: 907319 - protein, 114 aa, Homo sapiens; identical to SEQ ID NO: 907283
  misc_feature (1)..(1): Xaa can be any naturally occurring amino acid

SEQ ID NO: 907320 - protein, 114 aa, Homo sapiens; identical to SEQ ID NO: 907283
  misc_feature (1)..(1): Xaa can be any naturally occurring amino acid

SEQ ID NO: 907321 - protein, 114 aa, Homo sapiens; identical to SEQ ID NO: 907283
  misc_feature (1)..(1): Xaa can be any naturally occurring amino acid

SEQ ID NO: 907322 - protein, 114 aa, Homo sapiens; identical to SEQ ID NO: 907283
  misc_feature (1)..(1): Xaa can be any naturally occurring amino acid

SEQ ID NO: 907323 - protein, 102 aa, Homo sapiens
MGRVRTKTVKKAARVIIEKYYTRLGNDFHTNKRVCEEIAIIPSKKRPQQDSRLCHASDEANSERPSKRYLHQAAGGGERTRRDNYVPEGKLSGYLGFWLILK

SEQ ID NO: 907324 - protein, 97 aa, Homo sapiens
MGRVRTKTVKKAARVIIEKYYTRLGNDFHTNKRVCEEIAIIPSKKRPQQDSRLCHASDEANSERPSKRYLHQAAGGGERTRRDNYVPEDFPTEGPNV

SEQ ID NO: 907325 - protein, 102 aa, Homo sapiens
MGRVRTKTVKKAARVIIEKYYTRLGNDFHTNKRVCEEIAIIPSKKRPQQDSRLCHASDEANSERPSKRYLHQDSKGPGPKGGHGARREKRTDGTPKTKKRFF

SEQ ID NO: 907326 - protein, 114 aa, Homo sapiens; identical to SEQ ID NO: 907283
  misc_feature (1)..(1): Xaa can be any naturally occurring amino acid

SEQ ID NO: 907327 - protein, 118 aa, Homo sapiens
KLRLGTRLGVDIGRGANMGRVRTKTVKKAARVIIEKYYTRLGNDFHTNKRVCEEIAIIPSKKRPQQDSRLCHASDEANSERPSKRYLHQAAGGGERTRRDNYVPEVSALDQEIIERRS

SEQ ID NO: 907328 - protein, 174 aa, Homo sapiens
MKRIQRGPVRGISIKLQEEEREHGETIMFLRSQPWIRRLLNVDPDTKGNAEAFGTSAVCPTFRSLSLQIGMNFQNASGTCFELSISGSCCTYFSNLTLLGTNSRKKKKKTKKKKIRGDLMGGGEKRGNGKGPWAIAVFPGPRFFGPRGKIWGVTLMGSRINRKSRVTGLGRGEK

SEQ ID NO: 907329 - protein, 121 aa, Homo sapiens
AAAYYYYYCSEFKLLTMYGDMGRVRTKTVKKAARVIIEKYYTRLGNDFHTNKRVCEEIAIIPSKKRPQQDSRLCHASDEANSERPSKRYLHQAAGGGERTRRDNYVPEVSALDQEIIERRS

SEQ ID NO: 907330 - protein, 129 aa, Homo sapiens
  misc_feature (1)..(1): Xaa can be any naturally occurring amino acid
XPPHPPPPTPTPTRPTPTKARYEAGVGNMGRVRTKTVKKAARVIIEKYYTRLGNDFHTNKRVCEEIAIIPSKKRPQQDSRLCHASDEANSERPSKRYLHQAAGGGERTRRDNYVPEVSALDQEIIERRS

SEQ ID NO: 907331 - protein, 138 aa, Homo sapiens
SRVGSERPWPGGSGFLAYALTGFACASCFLFYQGPANMGRVRTKTVKKAARVIIEKYYTRLGNDFHTNKRVCEEIAIIPSKKRPQQDSRLCHASDEANSERPSKRYLHQAAGGGERTRRDNYVPEVSALDQEIIERRS

SEQ ID NO: 907332 - protein, 119 aa, Homo sapiens; identical to SEQ ID NO: 907288

SEQ ID NO: 907333 - protein, 141 aa, Homo sapiens
RYNPPEHYAMLPSLSDHIGSCTLQYRRNPGRLLLLNSRPLDGRVRTKTVKKAARVIIEKYYTRLGNDFHTNKRVCEEIAIIPSKKRPQQDSRLCHASDEANSERPSKRYLHQAAGGGERTRRDNYVPEVSALDQEIIERRS

SEQ ID NO: 907334 - protein, 131 aa, Homo sapiens
QQKITRQVPVLYFRTQGGCGIEIDIGPAADYGRVRTKTVKKAARVIIEKYYTRLGNDFHTNKRVCEEIAIIPSKKRPQQDSRLCHASDEANSERPSKRYLHQAAGGGERTRRDNYVPEVSALDQEIIERRS

SEQ ID NO: 907335 - protein, 129 aa, Homo sapiens; identical to SEQ ID NO: 907330
  misc_feature (1)..(1): Xaa can be any naturally occurring amino acid

SEQ ID NO: 907336 - protein, 113 aa, Homo sapiens
MRVLTSSRWPANMGRVRTKTVKKAARVIIEKYYTRLGNDFHTNKRVCEEIAIIPSKKRPQQDSRLCHASDEANSERPSKRYLHQAAGGGERTRRDNYVPEVSALDQEIIERRS

SEQ ID NO: 907337 - protein, 129 aa, Homo sapiens; identical to SEQ ID NO: 907330
  misc_feature (1)..(1): Xaa can be any naturally occurring amino acid

SEQ ID NO: 907338 - protein, 111 aa, Homo sapiens
MRDHAVGPANMGRVRTKTVKKAARVIIEKYYTRLGNDFHTNKRVCEEIAIIPSKKRPQQDSRLCHASDEANSERPSKRYLHQAAGGGERTRRDNYVPEVSALDQEIIERRS

SEQ ID NO: 907339 - protein, 117 aa, Homo sapiens; identical to SEQ ID NO: 907300

SEQ ID NO: 907340 - protein, 113 aa, Homo sapiens; identical to SEQ ID NO: 907336

SEQ ID NO: 907341 - protein, 124 aa, Homo sapiens; identical to SEQ ID NO: 907302

SEQ ID NO: 907342 - protein, 114 aa, Homo sapiens; identical to SEQ ID NO: 907283
  misc_feature (1)..(1): Xaa can be any naturally occurring amino acid

SEQ ID NO: 907343 - protein, 114 aa, Homo sapiens; identical to SEQ ID NO: 907283
  misc_feature (1)..(1): Xaa can be any naturally occurring amino acid

SEQ ID NO: 907344 - protein, 114 aa, Homo sapiens; identical to SEQ ID NO: 907283
  misc_feature (1)..(1): Xaa can be any naturally occurring amino acid

SEQ ID NO: 907345 - protein, 114 aa, Homo sapiens; identical to SEQ ID NO: 907283
  misc_feature (1)..(1): Xaa can be any naturally occurring amino acid

SEQ ID NO: 907346 - protein, 114 aa, Homo sapiens; identical to SEQ ID NO: 907283
  misc_feature (1)..(1): Xaa can be any naturally occurring amino acid

SEQ ID NO: 907347 - protein, 114 aa, Homo sapiens; identical to SEQ ID NO: 907283
  misc_feature (1)..(1): Xaa can be any naturally occurring amino acid

SEQ ID NO: 907348 - protein, 114 aa, Homo sapiens; identical to SEQ ID NO: 907283
  misc_feature (1)..(1): Xaa can be any naturally occurring amino acid

SEQ ID NO: 907349 - protein, 114 aa, Homo sapiens; identical to SEQ ID NO: 907283
  misc_feature (1)..(1): Xaa can be any naturally occurring amino acid

SEQ ID NO: 907350 - protein, 114 aa, Homo sapiens; identical to SEQ ID NO: 907283
  misc_feature (1)..(1): Xaa can be any naturally occurring amino acid

SEQ ID NO: 907351 - protein, 114 aa, Homo sapiens; identical to SEQ ID NO: 907283
  misc_feature (1)..(1): Xaa can be any naturally occurring amino acid

SEQ ID NO: 907352 - protein, 114 aa, Homo sapiens; identical to SEQ ID NO: 907283
  misc_feature (1)..(1): Xaa can be any naturally occurring amino acid

SEQ ID NO: 907353 - protein, 164 aa, Homo sapiens
MKRIQRGPVRGISIKLQEEEREHGETIMFLRSQPWIRRLLNVDPDTKGNAEAFGTSAVCPTFRSLSLQIGMNFQNASGTCFELSISGSCCTYFSNLTLLGTNSRKNKITYETQISPRPQPESVSCILQEPKRNLAFFQLRKVWGQVWHSIQTLKEDCNRLQQGQ

SEQ ID NO: 907354 - protein, 114 aa, Homo sapiens; identical to SEQ ID NO: 907283
  misc_feature (1)..(1): Xaa can be any naturally occurring amino acid

SEQ ID NO: 907355 - protein, 114 aa, Homo sapiens; identical to SEQ ID NO: 907283
  misc_feature (1)..(1): Xaa can be any naturally occurring amino acid

SEQ ID NO: 907356 - protein, 114 aa, Homo sapiens; identical to SEQ ID NO: 907283
  misc_feature (1)..(1): Xaa can be any naturally occurring amino acid

SEQ ID NO: 907357 - protein, 102 aa, Homo sapiens; identical to SEQ ID NO: 907323

SEQ ID NO: 907358 - protein, 94 aa, Homo sapiens
  misc_feature (1)..(1): Xaa can be any naturally occurring amino acid
XKKPSCANSARANMGRVRTKTVKKAARVIIEKYYTRLGNDFHTNKRVCEEIAIIPSKKRPQQDSRLCHASDEANSERPSKRYLHQGLSLGSGDY

SEQ ID NO: 907359 - protein, 72 aa, Homo sapiens
GATLSWERGGCGERRTETGDVFKPGSGGFTGGCSGDEDNDSDGYAEALVPGVKPPAPALPRIQDEKTDKRRS

SEQ ID NO: 907360 - protein, 181 aa, Homo sapiens [sequence omitted]

SEQ ID NO: 907361 - protein, 2039 aa, Homo sapiens
MPKSGFTKPIQSENSDSDSNMVEKPYGRKSKDKIASYSKTPKIERSDVSKEMKEKSSMKRKLPFTISPSRNEERDSDTEKEGPEKKKTKKEAGNKKSTPVSILFGYPLSERKQMALLMQMTARDNSPDSTPNHPSQTTPAQKKTPSSSSRQKDKVNKRNERGETPLHMAAIRGDVKQVKELISLGANVNVKDFAGWTPLHEACNVGYYDVAKILIAAGADVNTQGLDDDTPLHDSASSGHRDIVKLLLRHGGNPFQANKHGERPVDVAETEELELLLKREVPLSDDDESYTDSEEAQSVNPSSVDENIDSETEKDSLICESKQILPSKTPLPSALDEYEFKDDDDEEINKMIDDRHILRKEQRKENEPEAEKTHLFAKQEKAFYPKSFKSKKQKPSRVLYSSTESSDEEALQNKKISTSCSVIPETSNSDMQTKKEYVVSGEHKQKGKVKRKLKNQNKNKENQELKQEKEGKENTRITNLTVNTGLDCSEKTREEGNFRKSFSPKDDTSLHLFHISTGKSPKHSCGLSEKQSTPLKQEHTKTCLSPGSSEMSLQPDLVRYDNTESEFLPESSSVKSCKHKEKSKHQKDFHLEFGEKSNAKIKDEDHSPTFENSDCTLKKMDKEGKTLKKHKLKHKEREKEKHKKEIEGEKEKYKTKDSAKELQRSVEFDREFWKENFFKSDETEDLFLNMEHESLTLEKKSKLEKNIKDDKSTKEKHVSKERNFKEERDKIKKESEKSFREEKIKDLKEERENIPTDKDSEFTSLGMSAIEESIGLHLVEKEIDIEKQEKHIKESKEKPEKRSQIKEKDIEKMERKTFEKEKKIKHEHKSEKDKLDLSECVDKIKEKDKLYSHHTEKCHKEGEKSKNTAAIKKTDDREKSREKMDRKHDKEKPEKERHLAESKEKHLMEKKNKQSDNSEYSKSEKGKNKEKDRELDKKEKSRDKESINITNSKHIQEEKKSSIVDGNKAQHEKPLSLKEKTKDEPLKTPDGKEKDKKDKDIDRYKERDKHKDKIQINSLLKLKSEADKPKPKSSPASKDTRPKEKRLVNDDLMQTSFERMLSLKDLEIEQWHKKHKEKIKQKEKERLRNRNCLELKIKDKEKTKHTPTESKNKELTRSKSSEVTDAYTKEKQPKDAVSNRSQSVDTKNVMTLGKSSFVSDNSLNRSPRSENEKPGLSSRSVSMISVASSEDSCHTTVTTPRPPVEYDSDFMLESSESQMSFSQSPFLSIAKSPALHERELDSLADLPERIKPPYANRLSTSHLRSSSVEDVKLIISEGRPTIEVRRCSMPSVICEHTKQFQTISEESNQGSLLTVPGDTSPSPKPEVFSNVPERDLSNVSNIHSSFATSPTGASNSKYVSADRNLIKNTAPVNTVMDSPVHLEPSSQVGVIQNKSWEMPVDRLETLSTRDFICPNSNIPDQESSLQSFCNSENKVLKENADFLSLRQTELPGNSCAQDPASFMPPQQPCSFPSQSLSDAESISKHMSLSYVANQEPGILQQKNAVQIISSALDTDNESTKDTENTFVLGDVQKTDAFVPVYSDSTIQEASPNFEKAYTLPVLPSEKDFNGSDASTQLNTHYAFSKLTYKSSSGHEVENSTTDTQVISHEKENKLESLVLTHLSRCDSDLCEMNAGMPKGNLNEQDPKHCPESEKCLLSIEDEESQQSILSSLENHSQQSTQPEMHKYGQLVKVELEENAEDDKTENQIPQRMTRNKANTMANQSKQILASCTLLSEKDSESSSPRGRIRLTEDDDPQIHHPRKRKVSRVPQPVQVSPSLLQAKEKTQQSLAAIVDSLKLDEIQPYSSERANPYFEYLHIRKKIEEKRKLLCSVIPQAPQYYDEYVTFNGSYLLDGNPLSKICIPTITPPPSLSDPLKELFRQQEVVRMKLRLQHSIEREKLIVSNEQEVLRVHYRAARTLANQTLPFSACTVLLDAEVYNVPLDSQSDDSKTSVRDRFNARQFMSWLQDVDDKFDKLKTCLLMRQQHEAAALNAVQRLEWQLKLQELDPATYKSISIYEIQEFYVPLVDVNDDFELTPI

SEQ ID NO: 907362 - protein, 1926 aa, Homo sapiens
MALLMQMTARDNSPDSTPNHPSQTTPAQKKTPSSSSRQKDKVNKRNERGETPLHMAAIRGDVKQVKELISLGANVNVKDFAGWTPLHEACNVGYYDVAKILIAAGADVNTQGLDDDTPLHDSASSGHRDIVKLLLRHGGNPFQANKHGERPVDVAETEELELLLKREVPLSDDDESYTDSEEAQSVNPSSVDENIDSETEKDSLICESKQILPSKTPLPSALDEYEFKDDDDEEINKMIDDRHILRKEQRKENEPEAEKTHLFAKQEKAFYPKSFKSKKQKPSRVLYSSTESSDEEALQNKKISTSCSVIPETSNSDMQTKKEYVVSGEHKQKGKVKRKLKNQNKNKENQELKQEKEGKENTRITNLTVNTGLDCSEKTREEGNFRKSFSPKDDTSLHLFHISTGKSPKHSCGLSEKQSTPLKQEHTKTCLSPGSSEMSLQPDLVRYDNTESEFLPESSSVKSCKHKEKSKHQKDFHLEFGEKSNAKIKDEDHSPTFENSDCTLKKMDKEGKTLKKHKLKHKEREKEKHKKEIEGEKEKYKTKDSAKELQRSVEFDREFWKENFFKSDETEDLFLNMEHESLTLEKKSKLEKNIKDDKSTKEKHVSKERNFKEERDKIKKESEKSFREEKIKDLKEERENIPTDKDSEFTSLGMSAIEESIGLHLVEKEIDIEKQEKHIKESKEKPEKRSQIKEKDIEKMERKTFEKEKKIKHEHKSEKDKLDLSECVDKIKEKDKLYSHHTEKCHKEGEKSKNTAAIKKTDDREKSREKMDRKHDKEKPEKERHLAESKEKHLMEKKNKQSDNSEYSKSEKGKNKEKDRELDKKEKSRDKESINITNSKHIQEEKKSSIVDGNKAQHEKPLSLKEKTKDEPLKTPDGKEKDKKDKDIDRYKERDKHKDKIQINSLLKLKSEADKPKPKSSPASKDTRPKEKRLVNDDLMQTSFERMLSLKDLEIEQWHKKHKEKIKQKEKERLRNRNCLELKIKDKEKTKHTPTESKNKELTRSKSSEVTDAYTKEKQPKDAVSNRSQSVDTKNVMTLGKSSFVSDNSLNRSPRSENEKPGLSSRSVSMISVASSEDSCHTTVTTPRPPVEYDSDFMLESSESQMSFSQSPFLSIAKSPALHERELDSLADLPERIKPPYANRLSTSHLRSSSVEDVKLIISEGRPTIEVRRCSMPSVICEHTKQFQTISEESNQGSLLTVPGDTSPSPKPEVFSNVPERDLSNVSNIHSSFATSPTGASNSKYVSADRNLIKNTAPVNTVMDSPVHLEPSSQVGVIQNKSWEMPVDRLETLSTRDFICPNSNIPDQESSLQSFCNSENKVLKENADFLSLRQTELPGNSCAQDPASFMPPQQPCSFPSQSLSDAESISKHMSLSYVANQEPGILQQKNAVQIISSALDTDNESTKDTENTFVLGDVQKTDAFVPVYSDSTIQEASPNFEKAYTLPVLPSEKDFNGSDASTQLNTHYAFSKLTYKSSSGHEVENSTTDTQVISHEKENKLESLVLTHLSRCDSDLCEMNAGMPKGNLNEQDPKHCPESEKCLLSIEDEESQQSILSSLENHSQQSTQPEMHKYGQLVKVELEENAEDDKTENQIPQRMTRNKANTMANQSKQILASCTLLSEKDSESSSPRGRIRLTEDDDPQIHHPRKRKVSRVPQPVQVSPSLLQAKEKTQQSLAAIVDSLKLDEIQPYSSERANPYFEYLHIRKKIEEKRKLLCSVIPQAPQYYDEYVTFNGSYLLDGNPLSKICIPTITPPPSLSDPLKELFRQQEVVRMKLRLQHSIEREKLIVSNEQEVLRVHYRAARTLANQTLPFSACTVLLDAEVYNVPLDSQSDDSKTSVRDRFNARQFMSWLQDVDDKFDKLKTCLLMRQQHEAAALNAVQRLEWQLKLQELDPATYKSISIYEIQEFYVPLVDVNDDFELTPI

SEQ ID NO: 907363 - protein, 1238 aa, Homo sapiens
DVIVVLMKTAFLGQWISQTLQMPEMLVYQKKDKLDLSECVDKIKEKDKLYSHHTEKCHKEGEKSKNTAAIKKTDDREKSREKMDRKHDKEKPEKERHLAESKEKHLMEKKNKQSDNSEYSKSEKGKNKEKDRELDKKEKSRDKESINITNSKHIQEEKKSSIVDGNKAQHEKPLSLKEKTKDEPLKTPDGKEKDKKDKDIDRYKERDKHKDKIQINSLLKLKSEADKPKPKSSPASKDTRPKEKRLVNDDLMQTSFERMLSLKDLEIEQWHKKHKEKIKQKEKERLRNRNCLELKIKDKEKTKHTPTESKNKELTRSKSSEVTDAYTKEKQPKDAVSNRSQSVDTKNVMTLGKSSFVSDNSLNRSPRSENEKPGLSSRSVSMISVASSEDSCHTTVTTPRPPVEYDSDFMLESSESQMSFSQSPFLSIAKSPALHERELDSLADLPERIKPPYANRLSTSHLRSSSVEDVKLIISEGRPTIEVRRCSMPSVICEHTKQFQTISEESNQGSLLTVPGDTSPSPKPEVFSNVPERDLSNVSNIHSSFATSPTGASNSKYVSADRNLIKNTAPVNTVMDSPVHLEPSSQVGVIQNKSWEMPVDRLETLSTRDFICPNSNIPDQESSLQSFCNSENKVLKENADFLSLRQTELPGNSCAQDPASFMPPQQPCSFPSQSLSDAESISKHMSLSYVANQEPGILQQKNAVQIISSALDTDNESTKDTENTFVLGDVQKTDAFVPVYSDSTIQEASPNFEKAYTLPVLPSEKDFNGSDASTQLNTHYAFSKLTYKSSSGHEVENSTTDTQVISHEKENKLESLVLTHLSRCDSDLCEMNAGMPKGNLNEQDPKHCPESEKCLLSIEDEESQQSILSSLENHSQQSTQPEMHKYGQLVKVELEENAEDDKTENQIPQRMTRNKANTMANQSKQILASCTLLSEKDSESSSPRGRIRLTEDDDPQIHHPRKRKVSRVPQPVQVSPSLLQAKEKTQQSLAAIVDSLKLDEIQPYSSERANPYFEYLHIRKKIEEKRKLLCSVIPQAPQYYDEYVTFNGSYLLDGNPLSKICIPTITPPPSLSDPLKELFRQQEVVRMKLRLQHSIEREKLIVSNEQEVLRVHYRAARTLANQTLPFSACTVLLDAEVYNVPLDSQSDDSKTSVRDRFNARQFMSWLQDVDDKFDKLKTCLLMRQQHEAAALNAVQRLEWQLKLQELDPATYKSISIYEIQEFYVPLVDVNDDFELTPI

SEQ ID NO: 907364 - protein, 1888 aa, Homo sapiens
MPKSGFTKPIQSENSDSDSNMVEKPYGRKSKDKIASYSKTPKIERSDVSKEMKEKSSMKRKLPFTISPSRNEERDSDTEKEGPEKKKTKKEAGNKKSTPVSILFGYPLSERKQMALLMQMTARDNSPDSTPNHPSQTTPAQKKTPSSSSRQKDKVNKRNERGETPLHMAAIRGDVKQVKELISLGANVNVKDFAGWTPLHEACNVGYYDVAKILIAAGADVNTQGLDDDTPLHDSASSGHRDIVKLLLRHGGNPFQANKHGERPVDVAETEELELLLKREVPLSDDDESYTDSEEAQSVNPSSVDENIDSETEKDSLICESKQILPSKTPLPSALDEYEFKDDDDEEINKMIDDRHILRKEQRKENEPEAEKTHLFAKQEKAFYPKSFKSKKQKPSRVLYSSTESSDEEALQNKKISTSCSVIPETSNSDMQTKKEYVVSGEHKQKGKVKRKLKNQNKNKENQELKQEKEGKENTRITNLTVNTGLDCSEKTREEGNFRKSFSPKDDTSLHLFHISTGKSPKHSCGLSEKQSTPLKQEHTKTCLSPGSSEMSLQPDLVRYDNTESEFLPESSSVKSCKHKEKSKHQKDFHLEFGEKSNAKIKDEDHSPTFENSDCTLKKMDKEGKTLKKHKLKHKEREKEKHKKEIEGEKEKYKTKDSAKELQRSVEFDREFWKENFFKSDETEDLFLNMEHESLTLEKKSKLEKNIKDDKSTKEKHVSKERNFKEERDKIKKESEKSFREEKIKDLKEERENIPTDKDSEFTSLGMSAIEESIGLHLVEKEIDIEKQEKHIKESKEKPEKRSQIKEKDIEKMERKTFEKEKKIKHEHKSEKDKLDLSECVDKIKEKDKLYSHHTEKCHKEGEKSKNTAAIKKTDDREKSREKMDRKHDKEKPEKERHLAESKEKHLMEKKNKQSDNSEYSKSEKGKNKEKDRELDKKEKSRDKESINITNSKHIQEEKKSSIVDGNKAQHEKPLSLKEKTKDEPLKTPDGKEKDKKDKDIDRYKERDKHKDKIQINSLLKLKSEADKPKPKSSPASKDTRPKEKRLVNDDLMQTSFERMLSLKDLEIEQWHKKHKEKIKQKEKERLRNRNCLELKIKDKEKTKHTPTESKNKELTRSKSSEVTDAYTKEKQPKDAVSNRSQSVDTKNVMTLGKSSFVSDNSLNRSPRSENEKPGLSSRSVSMISVASSEDSCHTTVTTPRPPVEYDSDFMLESSESQMSFSQSPFLSIAKSPALHERELDSLADLPERIKPPYANRLSTSHLRSSSVEDVKLIISEGRPTIEVRRCSMPSVICEHTKQFQTISEESNQGSLLTVPGDTSPSPKPEVFSNVPERDLSNVSNIHSSFATSPTGASNSKYVSADRNLIKNTAPVNTVMDSPVHLEPSSQVGVIQNKSWEMPVDRLETLSTRDFICPNSNIPDQESSLQSFCNSENKVLKENADFLSLRQTELPGNSCAQDPASFMPPQQPCSFPSQSLSDAESISKHMSLSYVANQEPGILQQKNAVQIISSALDTDNESTKDTENTFVLGDVQKTDAFVPVYSDSTIQEASPNFEKAYTLPVLPSEKDFNGSDASTQLNTHYAFSKLTYKSSSGHEVENSTTDTQVISHEKENKLESLVLTHLSRCDSDLCEMNAGMPKGNLNEQDPKHCPESEKCLLSIEDEESQQSILSSLENHSQQSTQPEMHKYGQLVKVELEENAEDDKTENQIPQRMTRNKANTMANQSKQILASCTLLSEKDSESSSPRGRIRLTEDDDPQIHHPRKRKVSRVPQPVQVSPSLLQAKEKTQQSLAAIVDSLKLDEIQPYSSERANPYFEYLHIRKKIEEKRKLLCSVIPQAPQYYDEYVTFNGSYLLDGNPLSKICIPTVSNIITCYTPVTLPNRSIMLATY

SEQ ID NO: 907365 - protein, 898 aa, Homo sapiens
MPKSGFTKPIQSENSDSDSNMVEKPYGRKSKDKIASYSKTPKIERSDVSKEMKEKSSMKRKLPFTISPSRNEERDSDTEKEGPEKKKTKKEAGNKKSTPVSILFGYPLSERKQMALLMQMTARDNSPDSTPNHPSQTTPAQKKTPSSSSRQKDKVNKRNERGETPLHMAAIRGDVKQVKELISLGANVNVKDFAGWTPLHEACNVGYYDVAKILIAAGADVNTQGLDDDTPLHDSASSGHRDIVKLLLRHGGNPFQANKHGERPVDVAETEELELLLKREVPLSDDDESYTDSEEAQSVNPSSVDENIDSETEKDSLICESKQILPSKTPLPSALDEYEFKDDDDEEINKMIDDRHILRKEQRKENEPEAEKTHLFAKQEKAFYPKSFKSKKQKPSRVLYSSTESSDEEALQNKKISTSCSVIPETSNSDMQTKKEYVVSGEHKQKGKVKRKLKNQNKNKENQELKQEKEGKENTRITNLTVNTGLDCSEKTREEGNFRKSFSPKDDTSLHLFHISTGKSPKHSCGLSEKQSTPLKQEHTKTCLSPGSSEMSLQPDLVRYDNTESEFLPESSSVKSCKHKEKSKHQKDFHLEFGEKSNAKIKDEDHSPTFENSDCTLKKMDKEGKTLKKHKLKHKEREKEKHKKEIEGEKEKYKTKDSAKELQRSVEFDREFWKENFFKSDETEDLFLNMEHESLTLEKKSKLEKNIKDDKSTKEKHVSKERNFKEERDKIKKESEKSFREEKIKDLKEERENIPTDKDSEFTSLGMSAIEESIGLHLVEKEIDIEKQEKHIKESKEKPEKRSQIKEKDIEKMERKTFEKEKKIKHEHKSEKDKLDLSECVDKIKERTSYIRITQKNAIKKVRRAKILLLLKKLTTERKVEKRWIGNMTKKSLKKRGI

SEQ ID NO: 907366 - protein, 294 aa, Homo sapiens [sequence omitted]

SEQ ID NO: 907367 - protein, 2062 aa, Homo sapiens
MPKSGFTKPIQSENSDSDSNMVEKPYGRKSKDKIASYSKTPKIERSDVSKEMKEKSSMKRKLPFTISPSRNEERDSDTDSDPGHTSENWGERLISSYRTYSEKEGPEKKKTKKEAGNKKSTPVSILFGYPLSERKQMALLMQMTARDNSPDSTPNHPSQTTPAQKKTPSSSSRQKDKVNKRNERGETPLHMAAIRGDVKQVKELISLGANVNVKDFAGWTPLHEACNVGYYDVAKILIAAGADVNTQGLDDDTPLHDSASSGHRDIVKLLLRHGGNPFQANKHGERPVDVAETEELELLLKREVPLSDDDESYTDSEEAQSVNPSSVDENIDSETEKDSLICESKQILPSKTPLPSALDEYEFKDDDDEEINKMIDDRHILRKEQRKENEPEAEKTHLFAKQEKAFYPKSFKSKKQKPSRVLYSSTESSDEEALQNKKISTSCSVIPETSNSDMQTKKEYVVSGEHKQKGKVKRKLKNQNKNKENQELKQEKEGKENTRITNLTVNTGLDCSEKTREEGNFRKSFSPKDDTSLHLFHISTGKSPKHSCGLSEKQSTPLKQEHTKTCLSPGSSEMSLQPDLVRYDNTESEFLPESSSVKSCKHKEKSKHQKDFHLEFGEKSNAKIKDEDHSPTFENSDCTLKKMDKEGKTLKKHKLKHKEREKEKHKKEIEGEKEKYKTKDSAKELQRSVEFDREFWKENFFKSDETEDLFLNMEHESLTLEKKSKLEKNIKDDKSTKEKHVSKERNFKEERDKIKKESEKSFREEKIKDLKEERENIPTDKDSEFTSLGMSAIEESIGLHLVEKEIDIEKQEKHIKESKEKPEKRSQIKEKDIEKMERKTFEKEKKIKHEHKSEKDKLDLSECVDKIKEKDKLYSHHTEKCHKEGEKSKNTAAIKKTDDREKSREKMDRKHDKEKPEKERHLAESKEKHLMEKKNKQSDNSEYSKSEKGKNKEKDRELDKKEKSRDKESINITNSKHIQEEKKSSIVDGNKAQHEKPLSLKEKTKDEPLKTPDGKEKDKKDKDIDRYKERDKHKDKIQINSLLKLKSEADKPKPKSSPASKDTRPKEKRLVNDDLMQTSFERMLSLKDLEIEQWHKKHKEKIKQKEKERLRNRNCLELKIKDKEKTKHTPTESKNKELTRSKSSEVTDAYTKEKQPKDAVSNRSQSVDTKNVMTLGKSSFVSDNSLNRSPRSENEKPGLSSRSVSMISVASSEDSCHTTVTTPRPPVEYDSDFMLESSESQMSFSQSPFLSIAKSPALHERELDSLADLPERIKPPYANRLSTSHLRSSSVEDVKLIISEGRPTIEVRRCSMPSVICEHTKQFQTISEESNQGSLLTVPGDTSPSPKPEVFSNVPERDLSNVSNIHSSFATSPTGASNSKYVSADRNLIKNTAPVNTVMDSPVHLEPSSQVGVIQNKSWEMPVDRLETLSTRDFICPNSNIPDQESSLQSFCNSENKVLKENADFLSLRQTELPGNSCAQDPASFMPPQQPCSFPSQSLSDAESISKHMSLSYVANQEPGILQQKNAVQIISSALDTDNESTKDTENTFVLGDVQKTDAFVPVYSDSTIQEASPNFEKAYTLPVLPSEKDFNGSDASTQLNTHYAFSKLTYKSSSGHEVENSTTDTQVISHEKENKLESLVLTHLSRCDSDLCEMNAGMPKGNLNEQDPKHCPESEKCLLSIEDEESQQSILSSLENHSQQSTQPEMHKYGQLVKVELEENAEDDKTENQIPQRMTRNKANTMANQSKQILASCTLLSEKDSESSSPRGRIRLTEDDDPQIHHPRKRKVSRVPQPVQVSPSLLQAKEKTQQSLAAIVDSLKLDEIQPYSSERANPYFEYLHIRKKIEEKRKLLCSVIPQAPQYYDEYVTFNGSYLLDGNPLSKICIPTITPPPSLSDPLKELFRQQEVVRMKLRLQHSIEREKLIVSNEQEVLRVHYRAARTLANQTLPFSACTVLLDAEVYNVPLDSQSDDSKTSVRDRFNARQFMSWLQDVDDKFDKLKTCLLMRQQHEAAALNAVQRLEWQLKLQELDPATYKSISIYEIQEFYVPLVDVNDDFELTPI

SEQ ID NO: 907368 - protein, 1956 aa, Homo sapiens
LNRSASVFAQRVDTKKNANWCGFLIASFLFGLLLLQMTARDNSPDSTPNHPSQTTPAQKKTPSSSSRQKDKVNKRNERGETPLHMAAIRGDVKQVKELISLGANVNVKDFAGWTPLHEACNVGYYDVAKILIAAGADVNTQGLDDDTPLHDSASSGHRDIVKLLLRHGGNPFQANKHGERPVDVAETEELELLLKREVPLSDDDESYTDSEEAQSVNPSSVDENIDSETEKDSLICESKQILPSKTPLPSALDEYEFKDDDDEEINKMIDDRHILRKEQRKENEPEAEKTHLFAKQEKAFYPKSFKSKKQKPSRVLYSSTESSDEEALQNKKISTSCSVIPETSNSDMQTKKEYVVSGEHKQKGKVKRKLKNQNKNKENQELKQEKEGKENTRITNLTVNTGLDCSEKTREEGNFRKSFSPKDDTSLHLFHISTGKSPKHSCGLSEKQSTPLKQEHTKTCLSPGSSEMSLQPDLVRYDNTESEFLPESSSVKSCKHKEKSKHQKDFHLEFGEKSNAKIKDEDHSPTFENSDCTLKKMDKEGKTLKKHKLKHKEREKEKHKKEIEGEKEKYKTKDSAKELQRSVEFDREFWKENFFKSDETEDLFLNMEHESLTLEKKSKLEKNIKDDKSTKEKHVSKERNFKEERDKIKKESEKSFREEKIKDLKEERENIPTDKDSEFTSLGMSAIEESIGLHLVEKEIDIEKQEKHIKESKEKPEKRSQIKEKDIEKMERKTFEKEKKIKHEHKSEKDKLDLSECVDKIKEKDKLYSHHTEKCHKEGEKSKNTAAIKKTDDREKSREKMDRKHDKEKPEKERHLAESKEKHLMEKKNKQSDNSEYSKSEKGKNKEKDRELDKKEKSRDKESINITNSKHIQEEKKSSIVDGNKAQHEKPLSLKEKTKDEPLKTPDGKEKDKKDKDIDRYKERDKHKDKIQINSLLKLKSEADKPKPKSSPASKDTRPKEKRLVNDDLMQTSFERMLSLKDLEIEQWHKKHKEKIKQKEKERLRNRNCLELKIKDKEKTKHTPTESKNKELTRSKSSEVTDAYTKEKQPKDAVSNRSQSVDTKNVMTLGKSSFVSDNSLNRSPRSENEKPGLSSRSVSMISVASSEDSCHTTVTTPRPPVEYDSDFMLESSESQMSFSQSPFLSIAKSPALHERELDSLADLPERIKPPYANRLSTSHLRSSSVEDVKLIISEGRPTIEVRRCSMPSVICEHTKQFQTISEESNQGSLLTVPGDTSPSPKPEVFSNVPERDLSNVSNIHSSFATSPTGASNSKYVSADRNLIKNTAPVNTVMDSPVHLEPSSQVGVIQNKSWEMPVDRLETLSTRDFICPNSNIPDQESSLQSFCNSENKVLKENADFLSLRQTELPGNSCAQDPASFMPPQQPCSFPSQSLSDAESISKHMSLSYVANQEPGILQQKNAVQIISSALDTDNESTKDTENTFVLGDVQKTDAFVPVYSDSTIQEASPNFEKAYTLPVLPSEKDFNGSDASTQLNTHYAFSKLTYKSSSGHEVENSTTDTQVISHEKENKLESLVLTHLSRCDSDLCEMNAGMPKGNLNEQDPKHCPESEKCLLSIEDEESQQSILSSLENHSQQSTQPEMHKYGQLVKVELEENAEDDKTENQIPQRMTRNKANTMANQSKQILASCTLLSEKDSESSSPRGRIRLTEDDDPQIHHPRKRKVSRVPQPVQVSPSLLQAKEKTQQSLAAIVDSLKLDEIQPYSSERANPYFEYLHIRKKIEEKRKLLCSVIPQAPQYYDEYVTFNGSYLLDGNPLSKICIPTITPPPSLSDPLKELFRQQEVVRMKLRLQHSIEREKLIVSNEQEVLRVHYRAARTLANQTLPFSACTVLLDAEVYNVPLDSQSDDSKTSVRDRFNARQFMSWLQDVDDKFDKLKTCLLMRQQHEAAALNAVQRLEWQLKLQELDPATYKSISIYEIQEFYVPLVDVNDDFELTPI

SEQ ID NO: 907369 - protein, 1203 aa, Homo sapiens
KSALFYIYTTPDKLYSHHTEKCHKEGEKSKNTAAIKKTDDREKSREKMDRKHDKEKPEKERHLAESKEKHLMEKKNKQSDNSEYSKSEKGKNKEKDRELDKKEKSRDKESINITNSKHIQEEKKSSIVDGNKAQHEKPLSLKEKTKDEPLKTPDGKEKDKKDKDIDRYKERDKHKDKIQINSLLKLKSEADKPKPKSSPASKDTRPKEKRLVNDDLMQTSFERMLSLKDLEIEQWHKKHKEKIKQKEKERLRNRNCLELKIKDKEKTKHTPTESKNKELTRSKSSEVTDAYTKEKQPKDAVSNRSQSVDTKNVMTLGKSSFVSDNSLNRSPRSENEKPGLSSRSVSMISVASSEDSCHTTVTTPRPPVEYDSDFMLESSESQMSFSQSPFLSIAKSPALHERELDSLADLPERIKPPYANRLSTSHLRSSSVEDVKLIISEGRPTIEVRRCSMPSVICEHTKQFQTISEESNQGSLLTVPGDTSPSPKPEVFSNVPERDLSNVSNIHSSFATSPTGASNSKYVSADRNLIKNTAPVNTVMDSPVHLEPSSQVGVIQNKSWEMPVDRLETLSTRDFICPNSNIPDQESSLQSFCNSENKVLKENADFLSLRQTELPGNSCAQDPASFMPPQQPCSFPSQSLSDAESISKHMSLSYVANQEPGILQQKNAVQIISSALDTDNESTKDTENTFVLGDVQKTDAFVPVYSDSTIQEASPNFEKAYTLPVLPSEKDFNGSDASTQLNTHYAFSKLTYKSSSGHEVENSTTDTQVISHEKENKLESLVLTHLSRCDSDLCEMNAGMPKGNLNEQDPKHCPESEKCLLSIEDEESQQSILSSLENHSQQSTQPEMHKYGQLVKVELEENAEDDKTENQIPQRMTRNKANTMANQSKQILASCTLLSEKDSESSSPRGRIRLTEDDDPQIHHPRKRKVSRVPQPVQVSPSLLQAKEKTQQSLAAIVDSLKLDEIQPYSSERANPYFEYLHIRKKIEEKRKLLCSVIPQAPQYYDEYVTFNGSYLLDGNPLSKICIPTITPPPSLSDPLKELFRQQEVVRMKLRLQHSIEREKLIVSNEQEVLRVHYRAARTLANQTLPFSACTVLLDAEVYNVPLDSQSDDSKTSVRDRFNARQFMSWLQDVDDKFDKLKTCLLMRQQHEAAALNAVQRLEWQLKLQELDPATYKSISIYEIQEFYVPLVDVNDDFELTPI

SEQ ID NO: 907370 - protein, 526 aa, Homo sapiens
MPKSGFTKPIQSENSDSDSNMVEKPYGRKSKDKIASYSKTPKIERSDVSKEMKEKSSMKRKLPFTISPSRNEERDSDTEKEGPEKKKTKKEAGNKKSTPVSILFGYPLSERKQMALLMQMTARDNSPDSTPNHPSQTTPAQKKTPSSSSRQKDKVNKRNERGETPLHMAAIRGDVKQVKELISLGANVNVKDFAGWTPLHEACNVGYYDVAKILIAAGADVNTQGLDDDTPLHDSASSGHRDIVKLLLRHGGNPFQANKHGERPVDVAETEELELLLKREVPLSDDDESYTDSEEAQSVNPSSVDENIDSETEKDSLICESKQILPSKTPLPSALDEYEFKDDDDEEINKMIDDRHILRKEQRKENEPEAEKTHLFAKQEKAFYPKSFKSKKQKPSRVLYSSTESSDEEALQNKKISTSCSVIPETSNSDMQTKKEYVVSGEHKQKGKVKRKLKNQNKNKENQELKQEKEGKENTRITNLTVNTGLDVQKRPERRGTLGNLLAQKMILHYIYFIFPLVNLPNILVD

SEQ ID NO: 907371 - protein, 776 aa, Homo sapiens
SWPRDSLHSCLACGDGTALSHSLFPLPLLPAAPTMGGRVFLAFCVWLTLPGAETQDSRGCARWCPQNSSCVNATACRCNPGFSSFSEIITTPTETCDDINECATPSKVSCGKFSDCWNTEGSYDCVCSPGYEPVSGAKTFKNESENTCQDVDECSSGQHQCDSSTVCFNTVGSYSCRCRPGWKPRHGIPNNQKDTVCEDMTFSTWTPPPGVHSQTLSRFFDKVQDLGRDSKTSSAEVTIQNVIKLVDELMEAPGDVEALAPPVRHLIATQLLSNLEDIMRILAKSLPKGPFTYISPSNTELTLMIQERGDKNVTMGQSSARMKLNWAVAAGAEDPGPAVAGILSIQNMTTLLANASLNLHSKKQAELEEIYESSIRGVQLRRLSAVNSIFLSHNNTKELNSPILFAFSHLESSDGEAGRDPPAKDVMPGPRQELLCAFWKSDSDRGGHWATEGCQVLGSKNGSTTCQCSHLSSFAILMAHYDVEDWKLTLITRVGLALSLFCLLLCILTFLLVRPIQGSRTTIHLHLCICLFVGSTIFLAGIENEGGQVGLRCRLVAGLLHYCFLAAFCWMSLEGLELYFLVVRVFQGQGLSTRWLCLIGYGVPLLIVGVSAAIYSKGYGRPRYCWLDFEQGFLWSFLGPVTFIILCNAVIFVTTVWKLTQKFSEINPDMKKLKKARALTITAIAQLFLLGCTWVFGLFIFDDRSLVLTYVFTILNCLQGAFLYLLHCLLNKKVREEYRKWACLVAGGSKYSEFTSTTSGTGHNQTRALRASESGI

SEQ ID NO: 907372 - protein, 75 aa, Homo sapiens
KSYPPELSVSRCSLVTSHLTHLCQLPSAAVFARQTLSRFFDKVQDLGRDSKTSSAEVTIQVRAGCWGTPGQCRIS

SEQ ID NO: 907373 - protein, 820 aa, Homo sapiens
SWPRDSLHSCLACGDGTALSHSLFPLPLLPAAPTMGGRVFLAFCVWLTLPGAETQDSRGCARWCPQNSSCVNATACRCNPGFSSFSEIITTPTETCDDINECATPSKVSCGKFSDCWNTEGSYDCVCSPGYEPVSGAKTFKNESENTCQDVDECQQNPRLCKSYGTCVNTLGSYTCQCLPGFKFIPEDPKVCTDVDECSSGQHQCDSSTVCFNTVGSYSCRCRPGWKPRHGIPNNQKDTVCEDMTFSTWTPPPGVHSQTLSRFFDKVQDLGRDSKTSSAEVTIQNVIKLVDELMEAPGDVEALAPPVRHLIATQLLSNLEDIMRILAKSLPKGPFTYISPSNTELTLMIQERGDKNVTMGQSSARMKLNWAVAAGAEDPGPAVAGILSIQNMTTLLANASLNLHSKKQAELEEIYESSIRGVQLRRLSAVNSIFLSHNNTKELNSPILFAFSHLESSDGEAGRDPPAKDVMPGPRQELLCAFWKSDSDRGGHWATEGCQVLGSKNGSTTCQCSHLSSFAILMAHYDVEDWKLTLITRVGLALSLFCLLLCILTFLLVRPIQGSRTTIHLHLCICLFVGSTIFLAGIENEGGQVGLRCRLVAGLLHYCFLAAFCWMSLEGLELYFLVVRVFQGQGLSTRWLCLIGYGVPLLIVGVSAAIYSKGYGRPRYCWLDFEQGFLWSFLGPVTFIILCNAVIFVTTVWKLTQKFSEINPDMKKLKKARALTITAIAQLFLLGCTWVFGLFIFDDRSLVLTYVFTILNCLQGAFLYLLHCLLNKKVREEYRKWACLVAGGSKYSEFTSTTSGTGHNQTRALRASESGI

SEQ ID NO: 907374 - protein, 577 aa, Homo sapiens
MTFSTWTPPPGVHSQTLSRFFDKVQDLGRDSKTSSAEVTIQNVIKLVDELMEAPGDVEALAPPVRHLIATQLLSNLEDIMRILAKSLPKGPFTYISPSNTELTLMIQERGDKNVTMGQSSARMKLNWAVAAGAEDPGPAVAGILSIQNMTTLLANASLNLHSKKQAELEEIYESSIRGVQLRRLSAVNSIFLSHNNTKELNSPILFAFSHLESSDGEAGRDPPAKDVMPGPRQELLCAFWKSDSDRGGHWATEGCQVLGSKNGSTTCQCSHLSSFAILMAHYDVEDWKLTLITRVGLALSLFCLLLCILTFLLVRPIQGSRTTIHLHLCICLFVGSTIFLAGIENEGGQVGLRCRLVAGLLHYCFLAAFCWMSLEGLELYFLVVRVFQGQGLSTRWLCLIGYGVPLLIVGVSAAIYSKGYGRPRYCWLDFEQGFLWSFLGPVTFIILCNAVIFVTTVWKLTQKFSEINPDMKKLKKARALTITAIAQLFLLGCTWVFGLFIFDDRSLVLTYVFTILNCLQGAFLYLLHCLLNKKVREEYRKWACLVAGGSKYSEFTSTTSGTGHNQTRALRASESGI

SEQ ID NO: 907375 - protein, 350 aa, Homo sapiens [sequence omitted]

SEQ ID NO: 907376 - protein, 106 aa, Homo sapiens
RGLVGAPYMLVHEGSGRIPEVGLPSCWGEQVLRIHLHHVWHWPQSDPGPQGIRVRHMKAHGSGRPSSSCGHSSFVHEDHPSSLRPPLYSLHPPSLIPCATRREWQL

SEQ ID NO: 907377 - protein, 348 aa, Homo sapiens
SWPRDSLHSCLACGDGTALSHSLFPLPLLPAAPTMGGRVFLAFCVWLTLPGAETQDSRGCARWCPQNSSCVNATACRCNPGFSSFSEIITTPTETCDDINECATPSKVSCGKFSDCWNTEGSYDCVCSPGYEPVSGAKTFKNESENTCQDVDECQQNPRLCKSYGTCVNTLGSYTCQCLPGFKFIPEDPKVCTDVNECTSGQNPCHSSTHCLNNVGSYQCRCRPGWQPIPGSPNGPNNTVCEDVDECSSGQHQCDSSTVCFNTVGSYSCRCRPGWKPRHGIPNNQKDTVCEDMTFSTWTPPPGVHSQTLSRFFDKVQDLGRDSKTSSAEVTIQVRAGCWGTPGQCRIS

SEQ ID NO: 907378 - protein, 296 aa, Homo sapiens
SWPRDSLHSCLACGDGTALSHSLFPLPLLPAAPTMGGRVFLAFCVWLTLPGAETQDSRGCARWCPQNSSCVNATACRCNPGFSSFSEIITTPTETCDDINECATPSKVSCGKFSDCWNTEGSYDCVCSPGYEPVSGAKTFKNESENTCQDVDECQQNPRLCKSYGTCVNTLGSYTCQCLPGFKFIPEDPKVCTDVNECTSGQNPCHSSTHCLNNVGSYQCRCRPGWQPIPGSPNGPNNTVCEDVDECSSGQHQCDSSTVCFNTVGSYSCRCRPGWKPRHGIPNNQKDTVCEGMTWP

SEQ ID NO: 907379 - protein, 296 aa, Homo sapiens; identical to SEQ ID NO: 907378

SEQ ID NO: 907380 - protein, 112 aa, Homo sapiens
VRGMKLEVRWGPTLQPRSSRALTITAIAQLFLLGCTWVFGLFIFDDRSLVLTYVFTILNCLQGAFLYLLHCLLNKKVGAWAQWRTPVILPPIWEAEVGGLLEPRSWRPAWAT

SEQ ID NO: 907381 - protein, 869 aa, Homo sapiens
SWPRDSLHSCLACGDGTALSHSLFPLPLLPAAPTMGGRVFLAFCVWLTLPGAETQDSRGCARWCPQNSSCVNATACRCNPGFSSFSEIITTPTETCDDINECATPSKVSCGKFSDCWNTEGSYDCVCSPGYEPVSGAKTFKNESENTCQDVDECQQNPRLCKSYGTCVNTLGSYTCQCLPGFKFIPEDPKVCTDVNECTSGQNPCHSSTHCLNNVGSYQCRCRPGWQPIPGSPNGPNNTVCEDVDECSSGQHQCDSSTVCFNTVGSYSCRCRPGWKPRHGIPNNQKDTVCEDMTFSTWTPPPGVHSQTLSRFFDKVQDLGRDSKTSSAEVTIQNVIKLVDELMEAPGDVEALAPPVRHLIATQLLSNLEDIMRILAKSLPKGPFTYISPSNTELTLMIQERGDKNVTMGQSSARMKLNWAVAAGAEDPGPAVAGILSIQNMTTLLANASLNLHSKKQAELEEIYESSIRGVQLRRLSAVNSIFLSHNNTKELNSPILFAFSHLESSDGEAGRDPPAKDVMPGPRQELLCAFWKSDSDRGGHWATEGCQVLGSKNGSTTCQCSHLSSFAILMAHYDVEDWKLTLITRVGLALSLFCLLLCILTFLLVRPIQGSRTTIHLHLCICLFVGSTIFLAGIENEGGQVGLRCRLVAGLLHYCFLAAFCWMSLEGLELYFLVVRVFQGQGLSTRWLCLIGYGVPLLIVGVSAAIYSKGYGRPRYCWLDFEQGFLWSFLGPVTFIILCNAVIFVTTVWKLTQKFSEINPDMKKLKKARALTITAIAQLFLLGCTWVFGLFIFDDRSLVLTYVFTILNCLQGAFLYLLHCLLNKKVREEYRKWACLVAGGSKYSEFTSTTSGTGHNQTRALRASESGI

SEQ ID NO: 907382 - protein, 776 aa, Homo sapiens; identical to SEQ ID NO: 907371

SEQ ID NO: 907383 - protein, 794 aa, Homo sapiens
MGVSALTELTSLGGDSLSCCVPDINECATPSKVSCGKFSDCWNTEGSYDCVCSPGYEPVSGAKTFKNESENTCQDVDECQQNPRLCKSYGTCVNTLGSYTCQCLPGFKFIPEDPKVCTDVNECTSGQNPCHSSTHCLNNVGSYQCRCRPGWQPIPGSPNGPNNTVCEDVDECSSGQHQCDSSTVCFNTVGSYSCRCRPGWKPRHGIPNNQKDTVCEDMTFSTWTPPPGVHSQTLSRFFDKVQDLGRDSKTSSAEVTIQNVIKLVDELMEAPGDVEALAPPVRHLIATQLLSNLEDIMRILAKSLPKGPFTYISPSNTELTLMIQERGDKNVTMGQSSARMKLNWAVAAGAEDPGPAVAGILSIQNMTTLLANASLNLHSKKQAELEEIYESSIRGVQLRRLSAVNSIFLSHNNTKELNSPILFAFSHLESSDGEAGRDPPAKDVMPGPRQELLCAFWKSDSDRGGHWATEGCQVLGSKNGSTTCQCSHLSSFAILMAHYDVEDWKLTLITRVGLALSLFCLLLCILTFLLVRPIQGSRTTIHLHLCICLFVGSTIFLAGIENEGGQVGLRCRLVAGLLHYCFLAAFCWMSLEGLELYFLVVRVFQGQGLSTRWLCLIGYGVPLLIVGVSAAIYSKGYGRPRYCWLDFEQGFLWSFLGPVTFIILCNAVIFVTTVWKLTQKFSEINPDMKKLKKARALTITAIAQLFLLGCTWVFGLFIFDDRSLVLTYVFTILNCLQGAFLYLLHCLLNKKVREEYRKWACLVAGGSKYSEFTSTTSGTGHNQTRALRASESGI

SEQ ID NO: 907384 - protein, 527 aa, Homo sapiens
MEAPGDVEALAPPVRHLIATQLLSNLEDIMRILAKSLPKGPFTYISPSNTELTLMIQERGDKNVTMGQSSARMKLNWAVAAGAEDPGPAVAGILSIQNMTTLLANASLNLHSKKQAELEEIYESSIRGVQLRRLSAVNSIFLSHNNTKELNSPILFAFSHLESSDGEAGRDPPAKDVMPGPRQELLCAFWKSDSDRGGHWATEGCQVLGSKNGSTTCQCSHLSSFAILMAHYDVEDWKLTLITRVGLALSLFCLLLCILTFLLVRPIQGSRTTIHLHLCICLFVGSTIFLAGIENEGGQVGLRCRLVAGLLHYCFLAAFCWMSLEGLELYFLVVRVFQGQGLSTRWLCLIGYGVPLLIVGVSAAIYSKGYGRPRYCWLDFEQGFLWSFLGPVTFIILCNAVIFVTTVWKLTQKFSEINPDMKKLKKARALTITAIAQLFLLGCTWVFGLFIFDDRSLVLTYVFTILNCLQGAFLYLLHCLLNKKVREEYRKWACLVAGGSKYSEFTSTTSGTGHNQTRALRASESGI

SEQ ID NO: 907385 - protein, 450 aa, Homo sapiens
SWPRDSLHSCLACGDGTALSHSLFPLPLLPAAPTMGGRVFLAFCVWLTLPGAETQDSRGCARWCPQNSSCVNATACRCNPGFSSFSEIITTPTETCDDINECATPSKVSCGKFSDCWNTEGSYDCVCSPGYEPVSGAKTFKNESENTCQDVDECSSGQHQCDSSTVCFNTVGSYSCRCRPGWKPRHGIPNNQKDTVCEDMTFSTWTPPPGVHSQTLSRFFDKVQDLGRDSKTSSAEVTIQNVIKLVDELMEAPGDVEALAPPVRHLIATQLLSNLEDIMRILAKSLPKGPFTYISPSNTELTLMIQERGDKNVTMGQSSARMKLNWAVAAGAEDPGPAVAGILSIQNMTTLLANASLNLHSKKQAELEEIYESSIRGVQLRRLSAVNSIFLSHNNTKELNSPILFAFSHLESSDGEAGRDPPAKDVMPGPRQELLCAFWKSTFLIPGPLS

SEQ ID NO: 907386 - protein, 440 aa, Homo sapiens
SWPRDSLHSCLACGDGTALSHSLFPLPLLPAAPTMGGRVFLAFCVWLTLPGAETQDSRGCARWCPQNSSCVNATACRCNPGFSSFSEIITTPTETCDDINECATPSKVSCGKFSDCWNTEGSYDCVCSPGYEPVSGAKTFKNESENTCQDVDECSSGQHQCDSSTVCFNTVGSYSCRCRPGWKPRHGIPNNQKDTVCEDMTFSTWTPPPGVHSQTLSRFFDKVQDLGRDSKTSSAEVTIQNVIKLVDELMEAPGDVEALAPPVRHLIATQLLSNLEDIMRILAKSLPKGPFTYISPSNTELTLMIQERGDKNVTMGQSSARMKLNWAVAAGAEDPGPAVAGILSIQNMTTLLANASLNLHSKKQAELEEIYESSIRGVQLRRLSAVNSIFLSHNNTKELNSPILFAFSHLESSDGEAGRDPPAKLAGQEVLTVVKVVDVV

SEQ ID NO: 907387 - protein, 329 aa, Homo sapiens
SWPRDSLHSCLACGDGTALSHSLFPLPLLPAAPTMGGRVFLAFCVWLTLPGAETQDSRGCARWCPQNSSCVNATACRCNPGFSSFSEIITTPTETCDDINECATPSKVSCGKFSDCWNTEGSYDCVCSPGYEPVSGAKTFKNESENTCQDVDECQQNPRLCKSYGTCVNTLGSYTCQCLPGFKFIPEDPKVCTDVNECTSGQNPCHSSTHCLNNVGSYQCRCRPGWQPIPGSPNGPNNTVCEDVDECSSGQHQCDSSTVCFNTVGSYSCRCRPGWKPRHGIPNNQKDTVCEDAFPILRQSPGPGQRLQDKLSRGHHPGKGRMLGDPRTV

SEQ ID NO: 907388 - protein, 106 aa, Homo sapiens
MEAPGDVEALAPPVRHLIATQLLSNLEDIMRILAKSLPKGPFTYISPSNTGEALAWPALPQTLGPTWYLGSLITTAPLPSELTLMIQERGDKNVTMGQSSARMKLN

SEQ ID NO: 907389 - protein, 110 aa, Homo sapiens
TEWAEAGACRREGGRGAGLPSSCSALSSCSRRRCSGRPCPPRPRGAPRKVRPPLCSLPPGSFPFAEVPSRSRPCPEQSVPGTPAAVMAGLGWGAPLSGPGLEDSPAPELE

SEQ ID NO: 907390 - protein, 406 aa, Homo sapiens
MGGGGGVPTGGRPRRGAPFLVLGVELLQPPPLQWSSLPSPAPGCTPQGNKPRVRSIRFAAGHDAEGSHSHVHFDEKLHDSVVMVTQESDSSFLVKVGFLKILHRYEITFTLPPVHRLSKDVREAPVPSLHLKLLSVVPVPEGYSVKCEYSAHKEGVLKEEILLACEGGTGTCVRVTVQARVMGESVRLLVGGGMHKLDCEGFCPPQGTKAEQGILARLRGSQPPWQTGTTARPCCWMVSSVWAPSWNTTQSTATGTALTEARGPACPGPLSLKPRLVPPTCCVMVWLPRPSLGWVWGWSGLAHASHLCLHLCCHPAPPSSSSPTSSSLCASVSCRKKWVEPERRLSEEGRGRAWGGSPTPHPKPQGLPPGSGRGRSWLCGVVAPLLLPCFSHLSCPSLVPTAVHHE

SEQ ID NO: 907391 - protein, 174 aa, Homo sapiens
MAAANKGNKPRVRSIRFAAGHDAEGSHSHVHFDEKLHDSVVMVTQESDSSFLVKVGFLKILHRYEITFTLPPVHRLSKDVREAPVPSLHLKLLSVVPVPEGYSVKCEYSAHKEGVLKEEILLACEGGTGTCVRVTVQARVMDRHHGTPMLLDGVKCVGAELEYDSEHSDWHGFD

SEQ ID NO: 907392 - protein, 199 aa, Homo sapiens
MAAANKGKCLPGVVGLAQALPVGPGRRAIAAGNKPRVRSIRFAAGHDAEGSHSHVHFDEKLHDSVVMVTQESDSSFLVKVGFLKILHRYEITFTLPPVHRLSKDVREAPVPSLHLKLLSVVPVPEGYSVKCEYSAHKEGVLKEEILLACEGGTGTCVRVTVQARVMDRHHGTPMLLDGVKCVGAELEYDSEHSDWHGFD

SEQ ID NO: 907393 - protein, 290 aa, Homo sapiens
MDLTRDKMCSMVKKWQTMIEAHVDVKTTDGYLLRLFCVGFTKKRNNQIRKTSYAQHQQVRQIRKKMMAHTHDPRGADNSDFAHTNVGQLTHLDSRTGPFGAHTPTIYAHTGLCPKSIFISLFHWIVFPGSRTHTVTHTLGLEKEKGPKAFGTLRGEKSLQWGRPFQWGRTRGHGKVPLGTQKANLGGEPHAPRGGPHTRFWNPKGLGFADYMKTQRQVPSKSLVVHRVPETSKLGGGTFTKCAIVEQKKKTRDLIRGRTKESYSARAIRVLTTLFTGKLRSQRGETQTVV

SEQ ID NO: 907394 - protein, 321 aa, Homo sapiens
MDLTRDKMCSMVKKWQTMIEAHVDVKTTDGYLLRLFCVGFTKKRNNQIRKTSYAQHQQVRQIRKKMMAHTHDPRGADNSDFAHTNVGQLTHLDSRTGPFGAHTPTIYAHTGLCPKSIFISLFHWIVFPGSRTHTVTHTLGLEKEKGPKAFGTLRGEKSLQWGRPFQWGRTRGHGKVPLGTQKANLGGEPHAPRGGPHTRFWNPKGLGFADYMKTQRQVPSKSLVVHRVPETSKLGGGTFTKCAIVEQKKKITGRLGENKKKEKPENYRGKKIKGKSKAATFKGIGTWSKTRRKKTTTTREKKKRYRRDKQSDTENNQYPLR

SEQ ID NO: 907395 - protein, 212 aa, Homo sapiens
MDLTRDKMCSMVKKWQTMIEAHVDVKTTDGYLLRLFCVGFTKKRNNQIRKTSYAQHQQVRQIRKKMMAHTHDPRGADNSDFAHTNVGQLTHLDSRTGPFGAHTPTIYAHTGLGPKSIFISLFHWMVLPGSRTHTVTHTLGLEKEKGPKVFGTLRGEKSLQWGRPFQWGRTRGHGKVPLGTQKANLGGEPHAPRGGPHTRFWNPKGLGFADYM

SEQ ID NO: 907396 - protein, 352 aa, Homo sapiens
MDLTRDKMCSMVKKWQTMIEAHVDVKTTDGYLLRLFCVGFTKKRNNQIRKTSYAQHQQVRQIRKKMMAHTHDPRGADNSDFAHTNVGQLTHLDSRTGPFGAHTPTIYAHTGLCPKSIFISLFHWIVFPGSRTHTVTHTLGLEKEKGPKAFGTLRGEKSLQWGRPFQWGRTRGHGKVPLGTQKANLGGEPHAPRGGPHTRFWNPKGLGFADYMKTQRQVPSKSLVVHRVPETSKLGGGTFTKCAIVEQKKKRHPPTQKQHKKPAGDNNSGGRRKEDIHKARSVKQVHAPPFVQQRGIARPPRGGSQIEDGHQNIENTNADTTRHSTGHHSQRDKHRRDAYQTSITTRTDHYRP

SEQ ID NO: 907397 - protein, 262 aa, Homo sapiens
MDLTRDKMCSMVKKWQTMIEAHVDVKTTDGYLLRLFCVGFTKKRNNQIRKTSYAQHQQVRQIRKKMMAHTHDPRGADNSDFAHTNVGQLTHLDSRTGPFGAHTPTIYAHTGLCPKSIFISLFHWIVFPGSRTHTVTHTLGLEKEKGPKAFGTLRGEKSLQWGRPFQWGRTRGHGKVPLGTQKANLGGEPHAPRGGPHTRFWNPKGLGFADYMKTQRQVPSKSLVVHRVPETSKLGGGTFTKCAIVEQKKKIVEKGLGTKKRG

SEQ ID NO: 907398 - protein, 304 aa, Homo sapiens
MDLTRDKMCSMVKKWQTMIEAHVDVKTTDGYLLRLFCVGFTKKRNNQIRKTSYAQHQQVRQIRKKMMAHTHDPRGADNSDFAHTNVGQLTHLDSRTGPFGAHTPTIYAHTGLCPKSIFISLFHWIVFPGSRTHTVTHTLGLEKEKGPKAFGTLRGEKSLQWGRPFQWGRTRGHGKVPLGTQKANLGGEPHAPRGGPHTRFWNPKGLGFADYMKTQRQVPSKSLVVHRVPETSKLGGGTFTKCAIVEQKKKSEWYTTKHNSPGIYDGLGQSDSKGKGTTDAHRSARTARTTQAKGGTHQRPKQRQ

SEQ ID NO: 907399 - protein, 283 aa, Homo sapiens
MDLTRDKMCSMVKKWQTMIEAHVDVKTTDGYLLRLFCVGFTKKRNNQIRKTSYAQHQQVRQIRKKMMAHTHDPRGADNSDFAHTNVGQLTHLDSRTGPFGAHTPTIYAHTGLCPKSIFISLFHWIVFPGSRTHTVTHTLGLEKEKGPKAFGTLRGEKSLQWGRPFQWGRTRGHGKVPLGTQKANLGGEPHAPRGGPHTRFWNPKGLGFADYMKTQRQVPSKSLVVHRVPETSKLGGGTFTKCAIVEQKKKIKRPCAHTKKPGLFRAERKGGVRPLREGPRIDK

SEQ ID NO: 907400 - protein, 262 aa, Homo sapiens; identical to SEQ ID NO: 907397

SEQ ID NO: 907401 - protein, 289 aa, Homo sapiens
MDLTRDKMCSMVKKWQTMIEAHVDVKTTDGYLLRLFCVGFTKKRNNQIRKTSYAQHQQVRQIRKKMMAHTHDPRGADNSDFAHTNVGQLTHLDSRTGPFGAHTPTIYAHTGLCPKSIFISLFHWIVFPGSRTHTVTHTLGLEKEKGPKAFGTLRGEKSLQWGRPFQWGRTRGHGKVPLGTQKANLGGEPHAPRGGPHTRFWNPKGLGFADYMKTQRQVPSKSLVVHRVPETSKLGGGTFTKCAIVEQKKKTGAFSCGKRLEGCYFPALCPGTPAHKGYERLIHTIKTKR

SEQ ID NO: 907402 - protein, 212 aa, Homo sapiens
MDLTRDKMCSMVKKWQTMIEAHVDVKTTDGYLLRLFCVGFTKKRNNQIRKTSYAQHQQVRQIRKKMMAHTHDPRGADNSDFAHTNVGQLTHLDSRTGPFGAHTPTIYAHTGLGPKSIFISLFHWMVFPGSRTHTVTHTLGLEKEKGPKVFGTLRGEKSLQWGRPFQWGRTRGHGKVPLGTQKANLGGEPHAPRGGPHTRFWNPKGLGFADYM

SEQ ID NO: 907403 - protein, 212 aa, Homo sapiens; identical to SEQ ID NO: 907402

SEQ ID NO: 907404 - protein, 212 aa, Homo sapiens; identical to SEQ ID NO: 907402

SEQ ID NO: 907405 - protein, 206 aa, Homo sapiens
MDLTRDKMCSMVKKWQTMIEAHVDVKTTDGYLLRLFCVGFTKKRNNQIRKTSYAQHQQVRQIRKKMMAHTHDPRGADNSDFAHTNVGQLTHLDSRTGPFGAHTPTIYAHTGLGPKSIFISLFHWMVFPGSRTHTVTHTLGLEKEKGPKVFGTLRGEKSLQWGRPFQWGRTRGHGKVPLGTQKANLGGEPHAPRGGPHTRFWSDECG

SEQ ID NO: 907406 - protein, 222 aa, Homo sapiens
MDLTRDKMCSMVKKWQTMIEAHVDVKTTDGYLLRLFCVGFTKKRNNQIRKTSYAQHQQVRQIRKKMMAHTHDPRGADNSDFAHTNVGQLTHLDSRTGPFGAHTPTIYAHTGLGPKSIFISLFHWMVFPGSRTHTVTHTLGLEKEKGPKVFGTLRGEKSLQWGRPFQWGRTRGHGKVPLGTQKANLGGEPHAPRGGPHTRFWMWFDTVRIVSSIMWLKGLGKQ

SEQ ID NO: 907407 - protein, 193 aa, Homo sapiens
MDLTRDKMCSMVKKWQTMIEAHVDVKTTDGYLLRLFCVGFTKKRNNQIRKTSYAQHQQVRQIRKKMMAHTHDPRGADNSDFAHTNVGQLTHLDSRTGPFGAHTPTIYAHTGLGPKSIFISLFHWMVFPGSRTHTVTHTLGLEKEKGPKVFGTLRGEKSLQWGRPFQWGIWKPGANRASDGVVTPHCCPSLEKV

SEQ ID NO: 907408 - protein, 272 aa, Homo sapiens
MDLTRDKMCSMVKKWQTMIEAHVDVKTTDGYLLRLFCVGFTNQIRKKMMAHTHDPRGADNSDFAHTNVGQLTHLDSRTGPFGAHTPTIYAHTGLGPKSIFISLFHWMVFPGSRTHTVTHTLGLEKEKGPKVFGTLRGEKSLQWGRPFQWGRTRGHGKVPLGTQKANLGGEPHAPRGGPHTRFWNPKGLGFADYMKTQHQVPRKSLVVHRVPETSKLGGGTFTKCAIVEQKKKTRDLIRGRTKESDSARAIRVLTTFFTGKLRSQRGETQTVV

SEQ ID NO: 907409 - protein, 212 aa, Homo sapiens; identical to SEQ ID NO: 907402

SEQ ID NO: 907410 - protein, 212 aa, Homo sapiens
MDLTRDKMCSMVKKWQTMIEAHVDVKTTDGYLLRLFCVGFTKKRNNQIRKTSYAQHQQVRQIRKKMMAHTHDPRGADNSDFAHTNVGQLTHLDSRTGPLRAHTPTIYAHTGLGPKSIFISLFHWMVFPGSRTHTVTHTLGLEKEKGPKVFGTLRGEKSLQWGRPFQWGRTRGHGKVPLGTQKANLGGEPHAPRGGPHTRFWNPKGLGFADYM

SEQ ID NO: 907411 - protein, 304 aa, Homo sapiens
MDLTRDKMCSMVKKWQTMIEAHVDVKTTDGYLLRLFCVGFTKKRNNQIRKTSYAQHQQVRQIRKKMMAHTHDPRGADNSDFAHTNVGQLTHLDSRTGPLRAHTPTIYAHTGLGPKSIFISLFHWMVFPGSRTHTVTHTLGLEKEKGPKVFGTLRGEKSLQWGRPFQWGRTRGHGKVPLGTQKANLGGEPHAPRGGPHTRFWNPKGLGFADYMKTQHQVPSKSLVVHRVPETSKLGGGTFTKCAIVEQKKKSEWYTTKHNSPGIYDGLGQSDSKGKGTTDAHRSARTARTTQAKGGTHQRPKQRQ

SEQ ID NO: 907412 - protein, 296 aa, Homo sapiens
MDLTRDKMCSMVKKWQTMIEAHVDVKTTDGYLLRLFCVGFTKKRNNQIRKTSYAQHQQVRQIRKKMMAHTHDPRGADNSDFAHTNVGQLTHLDSRTGPFGAHTPTIYAHTGLCPKSIFISLFHWIVFPGSRTHTVTHTLGLEKEKGPKAFGTLRGEKSLQWGRPFQWGRTRGHGKVPLGTQKANLGGEPHAPRGGPHTRFWNPKGLGFADYMKTQRQVPSKSLVVHRVPETSKLGGGTFTKCAIVEQKKKSTYKGPLAKHNTKTREQREKKKRGGEKNTQKGAKKPHRMKKGPQGQ

SEQ ID NO: 907413 - protein, 206 aa, Homo sapiens; identical to SEQ ID NO: 907405

SEQ ID NO: 907414 - protein, 352 aa, Homo sapiens; identical to SEQ ID NO: 907396

SEQ ID NO: 907415 - protein, 296 aa, Homo sapiens; identical to SEQ ID NO: 907412

SEQ ID NO: 907416 - protein, 321 aa, Homo sapiens; identical to SEQ ID NO: 907394

SEQ ID NO: 907417 - protein, 212 aa, Homo sapiens; identical to SEQ ID NO: 907402

SEQ ID NO: 907418 - protein, 212 aa, Homo sapiens; identical to SEQ ID NO: 907402

SEQ ID NO: 907419 - protein, 222 aa, Homo sapiens
MDLTRDKMCSMVKKWQTMIEAHVDVKTTDGYLLRLFCVGFTKKRNNQIRKTSYAQHQQVRQIRKKMMAHTHDPRGADNSDFAHTNVGQLTHLDSRTGPFGAHTPTIYAHTGLGPKSIFISLFHWMVFPGSRTHTVTHTLGLEKEKGPKVFGTLRGEKSLQWGRPFQWGRTRGHGKVPLGTQKANLGGEPHAPRGGPHTRFWKRGINPSKLVVRFCASGLGKK

SEQ ID NO: 907420 - protein, 216 aa, Homo sapiens
MDLTRDKMCSMVKKWQTMIEAHVDVKTTDGYLLRLFCVGFTKKRNNQIRKTSYAQHQQVRQIRKKMMAHTHDPRGIPEQGHFGHTHRPFTHTQGFAPNLFLFPSSNGLSFPVHAHTRSHTHLAWKKKKAPKFLAHFGGKKASNGEGLSNGVAQGATVKFLGGHKRPTWGGNRTHHGVGLTQGFGTRKASDLRIICNPNTRSQGNPWFYTGFQKLPN

SEQ ID NO: 907421 - protein, 182 aa, Homo sapiens
MDLTRDKMCSMVKKWQTMIETSYAQHQQVRQIRKKMMAHTHDPRGADNSDFAHTNVGQLTHLDSRTGPFGAHTPTIYAHTGLCPKSIFISLFHWIVFPGSRTHTVTHTLGLEKEKGPKAFGTLRGEKSLQWGRPFQWGRTRGHGKVPLGTQKANLGGEPHAPRGGPHTRFWNPKGLGFADYM

SEQ ID NO: 907422 - protein, 1405 aa, Homo sapiens
MRGFLARPFLSTNQHLAQWGSPLPQGKGLVQLPSQHTRHSRPFHELCSKEENSATVPKLISLVVSSETIDFSNKTMDSRRDWEREKRILEGKLQLPKALARTQRARDEGRAWTSRWLQRRRSPESCEAPLSAPLWGPQRGLPGREPLRSRSASAIALRTIGHILALLLRLLHLGLGSGGCREDVPPSGRGKKEEKMKKHRRALALVSCLFLCSLVWLPSWRVCCKESSSASASSYYSQDDNCALENEDVQFQKKNTESKKLSPPVVETLPTVDLHEESSNAVVDSETVENISSSSTSEITPISKLDEIEKSGTIPIAKPSETEQSETDCDVGEALDASAPIEQPSFVSPPDSLVGQHIENVSSSHGKGKITKSEFESKVSASEQGGGDPKSALNASDNLKNESSDYTKPGDIDPTSVASPKDPEDIPTFDEWKKKVMEVEKEKSQSMHASSNGGSHATKKVQKNRNNYASVECGAKILAANPEAKSTSAILIENMDLYMLNPCSTKIWFVIELCEPIQVKQLDIANYELFSSTPKDFLVSISDRYPTNKWIKLGTFHGRDERNVQSFPLDEQMYAKYVKVELLSHFGSEHFCPLSLIRVFGTSMVEEYEEIADSQYHSERQELFDEDYDYPLDYNTGEDKSSKNLLGSATNAILNMVNIAANILGAKTEDLTEGNKSISENATATAAPKMPESTPVSTPVPSPEYVTTEVHTHDMEPSTPDTPKESPIVQLVQEEEEEASPSTVTLLGSGEQEDESSPWFESETQIFCSELTTICCISSFSEYIYKWCSVRVALYRQRSRTALSKGKDYLVLAQPPLLLPAESVDVSVLQPLSGELENTNIEREAETVVLGDLSSSMHQDDLVNHTVDAVELEPSHSQTLSQSLLLDITPEINPLPKIEVSESVEYEAGHIPSPVIPQESSVEIDNETEQKSESFSSIEKPSITYETNKVNELMDNIIKEDVNSMQIFTKLSETIVPPINTATVPDNEDGEAKMNIADTAKQTLISVVDSSSLPEVKEEEQSPEDALLRGLQRTATDFYAELQNSTDLGYANGNLVHGSNQKESVFMRLNNRIKALEVNMSLSGRYLEELSQRYRKQMEEMQKAFNKTIVKLQNTSRIAEEQDQRQTEAIQLLQAQLTNMTQLVSNLSATVAELKREVSDRQSYLVISLVLCVVLGLMLCMQRCRNTSQFDGDYISKLPKSNQYPSPKRCFSSYDDMNLKRRTSFPLMRSKSLQLTGKEVDPNDLYIVEPLKFSPEKKKKRCKYKIEKIETIKPEEPLHPIANGDIKGRKPFTNQRDFSNMGEVYHSSYKGPPSEGSSETSSQSEESYFCGISACTSLCNGQSQKTKTEKRALKRRRSKVQDQGKLIKTLIQTKSGSLPSLHDIIKGNKEITVGTFGVTAVSGHI

SEQ ID NO: 907423 - protein, 266 aa, Homo sapiens [sequence omitted]

SEQ ID NO: 907424 - protein, 1210 aa, Homo sapiens
MKKHRRALALVSCLFLCSLVWLPSWRVCCKESSSASASSYYSQDDNCALENEDVQFQKKNTESKKLSPPVVETLPTVDLHEESSNAVVDSETVENISSSSTSEITPISKLDEIEKSGTIPIAKPSETEQSETDCDVGEALDASAPIEQPSFVSPPDSLVGQHIENVSSSHGKGKITKSEFESKVSASEQGGGDPKSALNASDNLKNESSDYTKPGDIDPTSVASPKDPEDIPTFDEWKKKVMEVEKEKSQSMHASSNGGSHATKKVQKNRNNYASVECGAKILAANPEAKSTSAILIENMDLYMLNPCSTKIWFVIELCEPIQVKQLDIANYELFSSTPKDFLVSISDRYPTNKWIKLGTFHGRDERNVQSFPLDEQMYAKYVKVELLSHFGSEHFCPLSLIRVFGTSMVEEYEEIADSQYHSERQELFDEDYDYPLDYNTGEDKSSKNLLGSATNAILNMVNIAANILGAKTEDLTEGNKSISENATATAAPKMPESTPVSTPVPSPEYVTTEVHTHDMEPSTPDTPKESPIVQLVQEEEEEASPSTVTLLGSGEQEDESSPWFESETQIFCSELTTICCISSFSEYIYKWCSVRVALYRQRSRTALSKGKDYLVLAQPPLLLPAESVDVSVLQPLSGELENTNIEREAETVVLGDLSSSMHQDDLVNHTVDAVELEPSHSQTLSQSLLLDITPEINPLPKIEVSESVEYEAGHIPSPVIPQESSVEIDNETEQKSESFSSIEKPSITYETNKVNELMDNIIKEDVNSMQIFTKLSETIVPPINTATVPDNEDGEAKMNIADTAKQTLISVVDSSSLPEVKEEEQSPEDALLRGLQRTATDFYAELQNSTDLGYANGNLVHGSNQKESVFMRLNNRIKALEVNMSLSGRYLEELSQRYRKQMEEMQKAFNKTIVKLQNTSRIAEEQDQRQTEAIQLLQAQLTNMTQLVSNLSATVAELKREVSDRQSYLVISLVLCVVLGLMLCMQRCRNTSQFDGDYISKLPKSNQYPSPKRCFSSYDDMNLKRRTSFPLMRSKSLQLTGKEVDPNDLYIVEPLKFSPEKKKKRCKYKIEKIETIKPEEPLHPIANGDIKGRKPFTNQRDFSNMGEVYHSSYKGPPSEGSSETSSQSEESYFCGISACTSLCNGQSQKTKTEKRALKRRRSKVQDQGKLIKTLIQTKSGSLPSLHDIIKGNKEITVGTFGVTAVSGHI

SEQ ID NO: 907425 - protein, 1254 aa, Homo sapiens
MKKHRRALALVSCLFLCSLVWLPSWRVCCKESSSASASSYYSQDDNCALENEDVQFQKKDEREGPINAESLGKSGSNLPISPKEHKLKDDSIVDVQNTESKKLSPPVVETLPTVDLHEESSNAVVDSETVENISSSSTSEITPISKLDEIEKSGTIPIAKPSETEQSETDCDVGEALDASAPIEQPSFVSPPDSLVGQHIENVSSSHGKGKITKSEFESKVSASEQGGGDPKSALNASDNLKNESSDYTKPGDIDPTSVASPKDPEDIPTFDEWKKKVMEVEKEKSQSMHASSNGGSHATKKVQKNRNNYASVECGAKILAANPEAKSTSAILIENMDLYMLNPCSTKIWFVIELCEPIQVKQLDIANYELFSSTPKDFLVSISDRYPTNKWIKLGTFHGRDERNVQSFPLDEQMYAKYVKMFIKYIKVELLSHFGSEHFCPLSLIRVFGTSMVEEYEEIADSQYHSERQELFDEDYDYPLDYNTGEDKSSKNLLGSATNAILNMVNIAANILGAKTEDLTEGNKSISENATATAAPKMPESTPVSTPVPSPEYVTTEVHTHDMEPSTPDTPKESPIVQLVQEEEEEASPSTVTLLGSGEQEDESSPWFESETQIFCSELTTICCISSFSEYIYKWCSVRVALYRQRSRTALSKGKDYLVLAQPPLLLPAESVDVSVLQPLSGELENTNIEREAETVVLGDLSSSMHQDDLVNHTVDAVELEPSHSQTLSQSLLLDITPEINPLPKIEVSESVEYEAGHIPSPVIPQESSVEIDNETEQKSESFSSIEKPSITYETNKVNELMDNIIKEDVNSMQIFTKLSETIVPPINTATVPDNEDGEAKMNIADTAKQTLISVVDSSSLPEVKEEEQSPEDALLRGLQRTATDFYAELQNSTDLGYANGNLVHGSNQKESVFMRLNNRIKALEVNMSLSGRYLEELSQRYRKQMEEMQKAFNKTIVKLQNTSRIAEEQDQRQTEAIQLLQAQLTNMTQLVSNLSATVAELKREVSDRQSYLVISLVLCVVLGLMLCMQRCRNTSQFDGDYISKLPKSNQYPSPKRCFSSYDDMNLKRRTSFPLMRSKSLQLTGKEVDPNDLYIVEPLKFSPEKKKKRCKYKIEKIETIKPEEPLHPIANGDIKGRKPFTNQRDFSNMGEVYHSSYKGPPSEGSSETSSQSEESYFCGISACTSLCNGQSQKTKTEKRALKRRRSKVQDQGKLIKTLIQTKSGSLPSLHDIIKGNKEITVGTFGVTAVSGHI

SEQ ID NO: 907426 - protein, 1210 aa, Homo sapiens; identical to SEQ ID NO: 907424

SEQ ID NO: 907427 - protein, 1055 aa, Homo sapiens
MKKHRRALALVSCLFLCSLVWLPSWRVCCKESSSASASSYYSQDDNCALENEDVQFQKKNTESKKLSPPVVETLPTVDLHEESSNAVVDSETVENISSSSTSEITPISKLDEIEKSGTIPIAKPSETEQSETDCDVGEALDASAPIEQPSFVSPPDSLVGQHIENVSSSHGKGKITKSEFESKVSASEQGGGDPKSALNASDNLKNESSDYTKPGDIDPTSVASPKDPEDIPTFDEWKKKVMEVEKEKSQSMHASSNGGSHATKKVQKNRNNYASVECGAKILAANPEAKSTSAILIENMDLYMLNPCSTKIWFVIELCEPIQVKQLDIANYELFSSTPKDFLVSISDRYPTNKWIKLGTFHGRDERNVQSFPLDEQMYAKYVKVELLSHFGSEHFCPLSLIRVFGTSMVEEYEEIADSQYHSERQELFDEDYDYPLDYNTGEDKSSKNLLGSATNAILNMVNIAANILGAKTEDLTEGNKSISENATATAAPKMPESTPVSTPVPSPEYVTTEVHTHDMEPSTPDTPKESPIVQLVQEEEEEASPSTVTLLGSGEQEDESSPWFESETQIFCSELTTICCISSFSEYIYKWCSVRVALYRQRSRTALSKGKDYLVLAQPPLLLPAESVDVSVLQPLSGELENTNIEREAETVVLGDLSSSMHQDDLVNHTVDAVELEPSHSQTLSQSLLLDITPEINPLPKIEVSESVEYEAGHIPSPVIPQESSVEIDNETEQKSESFSSIEKPSITYETNKVNELMDNIIKEDVNSMQIFTKLSETIVPPINTATVPDNEDGEAKMNIADTAKQTLISVVDSSSLPEVKEEEQSPEDALLRGLQRTATDFYAELQNSTDLGYANGNLVHGSNQKESVFMRLNNRIKALEVNMSLSGRYLEELSQRYRKQMEEMQKAFNKTIVKLQNTSRIAEEQDQRQTEAIQLLQAQLTNMTQLVSNLSATVAELKREVSDRQSYLVISLVLCVVLGLMLCMQRCRNTSQFDGDYISKLPKSNQYPSPKRCFSSYDDMNLKRRTSFPLMRSKSLQLTGKEGRFLWIYNMYI

SEQ ID NO: 907428 - protein, 316 aa, Homo sapiens
MAAPEAPPLDRVFRTTWLSTECDSHPLPPSYRKFLFETQAADLAGGTTVAAGNLLNESEKDCGQDRRAPGVQPCRLVTMTSVVKTVYSLQPPSALSGGQPADTQTRATSKSLLPVRSKEVDVSKQLHSGGPENDVTKITKLRRENGQMKATDTATRRNVRKGYKPLSKQKSEEELKDKNQLLEAVNKQLHQKLTETQGELKDLTQKVELLEKFRDNCLAILESKGLDPALGSETLASRQESTTDHMDSMLLLETLQEELKLFNETAKKQMEELQALKVKLEMKEERVRFLEQQTLCNNQVNDLTTALKEMEQLLEM

SEQ ID NO: 907429 - protein, 240 aa, Homo sapiens
PGIRPLWPGESEIDCGQDRRAPGVQPCRLVTMTSVVKTVYSLQPPSALSGGQPADTQTRATSKSLLPVRSKEVDVSKQLHSGGPENDVTKITKLRRENGQMKATDTATRRNVRKGYKPLSKQKSEEELKDKNQLLEAVNKQLHQKLTETQGELKDLTQKVELLEKFRDNCLAILESKGLDPALGSETLASRQESTTDHMDSMLLLETLQEELKLFNETANRVRFLERIPYLQLMNVLQHA

SEQ ID NO: 907430 - protein, 316 aa, Homo sapiens; identical to SEQ ID NO: 907428

SEQ ID NO: 907431 - protein, 316 aa, Homo sapiens; identical to SEQ ID NO: 907428

SEQ ID NO: 907432 - protein, 316 aa, Homo sapiens; identical to SEQ ID NO: 907428

SEQ ID NO: 907433 - protein, 286 aa, Homo sapiens
MAAPEAPPLDRVFRTTWLSTECDSHPLPPSYRKFLFETQAADLAGGTTVAAGNLLNESEKDCGQDRRAPGVQPCRLVTMTSVVKTVYSLQPPSALSGGQPADTQTRATSKSLLPVRSKEVDVSKQLHSGGPENDVTKITKLRRENGQMKATDTATRRNVRKGYKPLSKQKSEEELKDKNQLLEAVNKQLHQKLTETQGELKDLTQKVELLEKFRDNCLAILESKGLDPALGSETLASRQESTTDHMDSMLLLETLQEELKLFNETAKKQMEELQIAWMNHGILHQM

SEQ ID NO: 907434 - protein, 337 aa, Homo sapiens
MAAPEAPPLDRVFRTTWLSTECDSHPLPPSYRKFLFETQAADLAGGTTVAAGNLLNESEKDCGQDRRAPGVQPCRLVTMTSVVKTVYSLQPPSALSGGQPAEHLNGNPGTSGDEELLEELEPDTQTRATSKSLLPVRSKEVDVSKQLHSGGPENDVTKITKLRRENGQMKATDTATRRNVRKGYKPLSKQKSEEELKDKNQLLEAVNKQLHQKLTETQGELKDLTQKVELLEKFRDNCLAILESKGLDPALGSETLASRQESTTDHMDSMLLLETLQEELKLFNETAKKQMEELQALKVKLEMKEERVRFLEQQTLCNNQVNDLTTALKEMEQLLEM

SEQ ID NO: 907435 - protein, 241 aa, Homo sapiens
MAAPEAPPLDRVFRTTWLSTECDSHPLPPSYRKFLFETQAADLAGGTTVAAGNLLNESEKDCGQDRRAPGVQPCRLVTMTSVVKTVYSLQPPSALSGGQPADTQTRATSKSLLPVRSKEVDVSKQLHSGGPENDVTKITKLRRENGQMKATDTATRRNVRKGYKPLSKQKSEEELKDKNQLLEAVNKQLHQKLTETQGELKDLTQKVELLEKFRDNCLAILESKGLDPVAVRNFARGAEAF

SEQ ID NO: 907436 - protein, 144 aa, Homo sapiens
EKDCGQDRRAPGFGSPGARDWAGWEEGRNELGKEDFLFSNPEPGPVGSRYPRALHSLGPSGPALGNIHPVPSRVQPCRLVTMTSVVKTVYSLQPPSALSGGQPAGEGPSHARGTAAWPGMVSGVWRSNGWRGHGEGRPVGPENL

SEQ ID NO: 907437 - protein, 113 aa, Homo sapiens
MAAPEAPPLDRVFRTTWLSTECDSHPLPPSYRKFLFETQAADLAGGTTVAAGNLLNESEKDCGQDRRAPGVQPCRLVTMTSVVKTVYSLQPPSALSGGQPAEHLNGNPGTSGD

SEQ ID NO: 907438 - protein, 316 aa, Homo sapiens; identical to SEQ ID NO: 907428

SEQ ID NO: 907439 - protein, 316 aa, Homo sapiens; identical to SEQ ID NO: 907428

SEQ ID NO: 907440 - protein, 286 aa, Homo sapiens; identical to SEQ ID NO: 907433

SEQ ID NO: 907441 - protein, 358 aa, Homo sapiens
MAAPEAPPLDRVFRTTWLSTECDSHPLPPSYRKFLFETQAADLAGGTTVAAGNLLNESEKDCGQDRRAPGVQPCRLVTMTSVVKTVYSLQPPSALSGGQPADTQTRATSKSLLPVRSKEVDVSKQLHSGGPENDVTKITKLRRENGQMKATDTATRRNVRKGRSFALVATQAGVQWRNLSSPQPPPPGFKRLSCLSLPNTWDYSYKPLSKQKSEEELKDKNQLLEAVNKQLHQKLTETQGELKDLTQKVELLEKFRDNCLAILESKGLDPALGSETLASRQESTTDHMDSMLLLETLQEELKLFNETAKKQMEELQALKVKLEMKEERVRFLEQQTLCNNQVNDLTTALKEMEQLLEM

SEQ ID NO: 907442 - protein, 105 aa, Homo sapiens
MAAPEAPPLDRVFRTTWLSTECDSHPLPPSYRKFLFETQAADLAGGTTVAAGNLLNESEKDCGQDRRAPGVQPCRLVTMTSVVKTVYSLQPPSALSGGQPAATNH

SEQ ID NO: 907443 - protein, 82 aa, Homo sapiens
KNARNTPPFASYNRERGRQVVYLHNNNISVVGSSDFCPPGHNTKKASYSGVSLFSNPVPVLGDTAIHLQMCLRALCHSTRKL

SEQ ID NO: 907444 - protein, 82 aa, Homo sapiens; identical to SEQ ID NO: 907443

SEQ ID NO: 907445 - protein, 359 aa, Homo sapiens
MKATIILLLLAQVSWAGPFQQRGLFDFMLEDEASGIGPEVPDDRDFEPSLGPVCPFRCQCHLRVVQCSDLGLDKVPKDLPPDTTLLDLQNNKITEIKDGDFKNLKNLHALILVNNKISKVSPGAFTPLVKLERLYLSKNQLKELPEKMPKTLQELRAHENEITKVRKVTFNGLNQMIVIELGTNPLKSSGIENGAFQGMKKLSYIRIADTNITSIPQGLPPSLTELHLDGNKISRVDAASLKGLNNLAKLGLSFNSISAVDNGSLANTPHLRELHLDNNKLTRVPGGLAEHKYIQVVYLHNNNISVVGSSDFCPPGHNTKKASYSGVSLFSNPVQYWEIQPSTFRCVYVRSAIQLGNYK

SEQ ID NO: 907446 - protein, 359 aa, Homo sapiens; identical to SEQ ID NO: 907445

SEQ ID NO: 907447 - protein, 184 aa, Homo sapiens
MIVIELGHQSAEELKELKMGAFQGMKKLSYIRIADTNITSIPQGLPPSLTELHLDGNKISRVDAASLKGLNNLAKLGLSFNSISAVDNGSLANTPHLRELHLDNNKLTRVPGGLAEHKYIQVVYLHNNNISVVGSSDFCPPGHNTKKASYSGVSLFSNPVPVLGDTAIHLQMCLRALCHSTRKL

SEQ ID NO: 907448 - protein, 359 aa, Homo sapiens; identical to SEQ ID NO: 907445

SEQ ID NO: 907449 - protein, 122 aa, Homo sapiens
TEVISPEVVYKQQLGLSFNSISAVDNGSLANTPHLRELHLDNNKLTRVPGGLAEHKYIQVVYLHNNNISVVGSSDFCPPGHNTKKASYSGVSLFSNPVPVLGDTAIHLQMCLRALCHSTRKL

SEQ ID NO: 907450 - protein, 112 aa, Homo sapiens
FYYTDNTLFLSVCTMRLSGPSMPHLRELHLDNNKLTRVPGGLAEHKYIQVVYLHNNNISVVGSSDFCPPGHNTKKASYSGVSLFSNPVPVLGDTAIHLQMCLRALCHSTRKL

SEQ ID NO: 907451 - protein, 81 aa, Homo sapiens
  misc_feature (13)..(13): Xaa can be any naturally occurring amino acid
DIKKLGAPPIKYXKRERRVVYLHNNNISVVGSSDFCPPGHNTKKASYSGVSLFSNPVPVLGDTAIHLQMCLRALCHSTRKL

SEQ ID NO: 907452 - protein, 184 aa, Homo sapiens; identical to SEQ ID NO: 907447

SEQ ID NO: 907453 - protein, 82 aa, Homo sapiens; identical to SEQ ID NO: 907443

SEQ ID NO: 907454 - protein, 250 aa, Homo sapiens
MKATIILLLLAQVSWAGPFQQRGLFDFMLEDEASGIGPEVPDDRDFEPSLGPVCPFRCQCHLRVVQCSDLELGHQSAEELKELKMGAFQGMKKLSYIRIADTNITSIPQGLPPSLTELHLDGNKISRVDAASLKGLNNLAKLGLSFNSISAVDNGSLANTPHLRELHLDNNKLTRVPGGLAEHKYIQVVYLHNNNISVVGSSDFCPPGHNTKKASYSGVSLFSNPVPVLGDTAIHLQMCLRALCHSTRKL

SEQ ID NO: 907455 - protein, 125 aa, Homo sapiens
EVNTYSEIFSNQIELALGLSFNSISAVDNGSLANTPHLRELHLDNNKLTRVPGGLAEHKYIQVVYLHNNNISVVGSSDFCPPGHNTKKASYSGVSLFSNPVPVLGDTAIHLQMCLRALCHSTRKL

SEQ ID NO: 907456 - protein, 84 aa, Homo sapiens
PRLPAYRTNVPASKKELWCVTVVYLHNNNISVVGSSDFCPPGHNTKKASYSGVSLFSNPVPVLGDTAIHLQMCLRALCHSTRKL

SEQ ID NO: 907457 - protein, 359 aa, Homo sapiens; identical to SEQ ID NO: 907445

SEQ ID NO: 907458 - protein, 359 aa, Homo sapiens; identical to SEQ ID NO: 907445

SEQ ID NO: 907459 - protein, 359 aa, Homo sapiens; identical to SEQ ID NO: 907445

SEQ ID NO: 907460 - protein, 342 aa, Homo sapiens
SRPLGQRHRHESPGRGKDRKEEEEAPVAMGLEAARELECAALGTLLRDPREAERTLLLDCRPFLAFCRRHVRAARPVPWNALLRRRARGPPAAVLACLLPDRALRTRLVRGELARAVVLDEGSASVAELRPDSPAHVLLAALLHETRAGPTAVYFLRGGFDGFQGCCPDLCSEAPAPALPPTGDKTSRSDSRAPVYDQGGPVEILPYLFLGSCSHSSDLQGLQACGITAVLNVSASCPNHFEGLFRYKSIPVEDNQMVEISAWFQEAIGFIDWVKNSGGRVLVHCQAGISRSATICLAYLMQSRRVRLDEAFDFVKQRRGVISPNFSFMGQLLQFETQVLCH

SEQ ID NO: 907461 - protein, 342 aa, Homo sapiens; identical to SEQ ID NO: 907460

SEQ ID NO: 907462 - protein, 342 aa, Homo sapiens; identical to SEQ ID NO: 907460

SEQ ID NO: 907463 - protein, 237 aa, Homo sapiens
HESPGRGKDRKEEEEAPVAMGLEAARELECAALGTLLRDPREAERTLLLDCRPFLAFCRRHVRAARPVPWNALLRRRARGPPAAVLACLLPDRALRTRLVRGELARAVVLDEGSASVAELRPDSPAHVLLAALLHETRAGPTAVYFLRGEQAGRPWPAPPDSSPAFPADRALPLLAGGFDGFQGCCPDLCSEAPAPALPPTGDKTSRSDSRAPVYDQVSIDPPPPNLPLSPPRTGRL

SEQ ID NO: 907464 - protein, 274 aa, Homo sapiens
GVDRSGSATATRARDAGKTERKRKRHRWPWGWRRRASWSARRWARCCGIRGRRNARCCWTAAPSWPSAGATCALLHETRAGPTAVYFLRGGFDGFQGCCPDLCSEAPAPALPPTGDKTSRSDSRAPVYDQGGPVEILPYLFLGSCSHSSDLQGLQACGITAVLNVSASCPNHFEGLFRYKSIPVEDNQMVEISAWFQEAIGFIDWVKNSGGRVLVHCQAGISRSATICLAYLMQSRRVRLDEAFDFVKQRRGVISPNFSFMGQLLQFETQVLCH

SEQ ID NO: 907465 - protein, 175 aa, Homo sapiens
YLFLGSCSHSSDLQGLQACGITAVLNVSASCPNHFEGLFRYKSIPVEDNQMVEISAWFQEAIGFIGKGAPLPRNPEGLQRRGLGAPVSWAVHIPSDTTAPISLADWVKNSGGRVLVHCQAGISRSATICLAYLMQSRRVRLDEAFDFVKQRRGVISPNFSFMGQLLQFETQVLCH

SEQ ID NO: 907466 - protein, 580 aa, Homo sapiens
MGDLSSLTPGGSMGLQVNRGSQSSLEGAPATAPEPHSLGILHASYSVSHRVRPWWDITSCRQQWTRQILKDVSLYVESGQIMCILGSSGSGKTTLLDAMSGRLGRAGTFLGEVYVNGRALRREQFQDCFSYVLQSDTLLSSLTVRETLHYTALLAIRRGNPGSFQKKVEAVMAELSLSHVADRLIGNYSLGGISTGERRRVSIAAQLLQDPKVMLFDEPTTGLDCMTANQIVVLLVELARRNRIVVLTIHQPRSELFQLFDKIAILSFGELIFCGTPAEMLDFFNDCGYPCPEHSNPFDFYMDLTSVDTQSKEREIETSKRVQMIESAYKKSAICHKTLKNIERMKHLKTLPMVPFKTKDSPGVFSKLGVLLRRVTRNLVRNKLAVITRLLQNLIMGLFLLFFVLRVRSNVLKGAIQDRVGLLYQFVGATPYTGMLNAVNLFPVLRAVSDQESQDGLYQKWQMMLAYALHVLPFSVVATMIFSSVCYWTLGLHPEVARFGYFSAALLAPHLIGEFLTLVLLGIVQNPNIVNSVVALLSIAGVLVGSGFLRNIQEMPIPFNEFYGLDFTCGSSVSVTTSLC

SEQ ID NO: 907467 - protein, 651 aa, Homo sapiens
MGDLSSLTPGGSMGLQVNRGSQSSLEGAPATAPEPHSLGILHASYSVSHRVRPWWDITSCRQQWTRQILKDVSLYVESGQIMCILGSSGSGKTTLLDAMSGRLGRAGTFLGEVYVNGRALRREQFQDCFSYVLQSDTLLSSLTVRETLHYTALLAIRRGNPGSFQKKVEAVMAELSLSHVADRLIGNYSLGGISTGERRRVSIAAQLLQDPKVMLFDEPTTGLDCMTANQIVVLLVELARRNRIVVLTIHQPRSELFQLFDKIAILSFGELIFCGTPAEMLDFFNDCGYPCPEHSNPFDFYMDLTSVDTQSKEREIETSKRVQMIESAYKKSAICHKTLKNIERMKHLKTLPMVPFKTKDSPGVFSKLGVLLRRVTRNLVRNKLAVITRLLQNLIMGLFLLFFVLRVRSNVLKGAIQDRVGLLYQFVGATPYTGMLNAVNLFPVLRAVSDQESQDGLYQKWQMMLAYALHVLPFSVVATMIFSSVCYWTLGLHPEVARFGYFSAALLAPHLIGEFLTLVLLGIVQNPNIVNSVVALLSIAGVLVGSGFLRNIQEMPIPFKIISYFTFQKYCSEILVVNEFYGLNFTCGSSNVSVTTNPMCAFTQGIQFIEKTCPGATSRFTMNFLILYSFIPALVILGIVVFKIRDHLISR

SEQ ID NO: 907468 - protein, 256 aa, Homo sapiens
MLWQKPTAPEQAPAPARPYQGVRVKEPVKELLRRKRGHASSGAAPAPTAVVLPHQPLATYTTVGPSCLDMEGSVSAVTEEAALCAGWLSQPTPATLQPLAPWTPYTEYVPHEAVSCPYSADMYVQPVCPSYTVVGPSSVLTYASPPLITNVTTRSSATPAVGPPLEGPEHQAPLTYFPWPQPLSTLPTSTLQYQPPAPALPGPQFVQLPISIPEPVLQDMEDPRRAASSLTIDKLLLEEEDSDAYALNHTLSVEGF

SEQ ID NO: 907469 - protein, 256 aa, Homo sapiens; identical to SEQ ID NO: 907468

SEQ ID NO: 907470 - protein, 456 aa, Homo sapiens
IPAGAHGGLSPAHALVAWKPAWAPCKDQRFPEELLGSSLAWGGLDTGFPQLAPHHLHTHTQQVPAGPVQAVAARAALLLCPGWLAPSVERSGPGPLGRAQWGDRRPGCRNVAPVPEVGGCDDAAHAAGTQAFKKPRKQPQLKRWLHWRKTHPGLTLKKPNCRLQREKATSCHRPCSGKNAMEQRQPILSGTMAADPVVSAVWMRAATAPEQAPAPARPYQGVRVKEPVKELLRRKRGHASSGAAPAPTAVVLPHQPLATYTTVGPSCLDMEGSVSAVTEEAALCAGWLSQPTPATLQPLAPWTPYTEYVPHEAVSCPYSADMYVQPVCPSYTVVGPSSVLTYASPPLITNVTTRSSATPAVGPPLEGPEHQAPLTYFPWPQPLSTLPTSTLQYQPPAPALPGPQFVQLPISIPEPVLQDMEDPRRAASSLTIDKLLLEEEDSDAYALNHTLSVEGF

SEQ ID NO: 907471 - protein, 256 aa, Homo sapiens; identical to SEQ ID NO: 907468

SEQ ID NO: 907472 - protein, 256 aa, Homo sapiens; identical to SEQ ID NO: 907468

SEQ ID NO: 907473 - protein, 197 aa, Homo sapiens
IPAGAHGGLSPAHALVAWKPAWAPCKDQRFPEELLGSSLAWGGLDTGFPQLAPHHLHTHTQQVPAGPVQAVAARAALLLCPGWLAPSVERSGPGPLGRAQWGDRRPGCRNVAPVPEVGGCDDAAHAAGTQAFKKPRKQPQLKRWLHWRKTHPGLTLKKPNCRLQREKATSCHRPCSGKNPQLRSKPQPRPGHTRASV

SEQ ID NO: 907474 - protein, 477 aa, Homo sapiens
MVLMQDKGSSQQWPGLGGEGGGTGPLSMLRAALLLISLPWGAQGTASTSLSTAGGHTVPPTGGRYLSIGDGSVMEFEFPEDSEGIIVISSQYPGQANRTAPGPMLRVTSLDTEVLTIKNVSAITWGGGGGFVVSIHSGLAGLAPLHIQLVDAHEAPPTLIEERRDFCIKVSPAEDTPATLSADLAHFSENPILYLLLPLIFVNKCSFGCKVELEVLKGLMQSPQPMLLGLLGQFLVMPLYAFLMAKVFMLPKALALGLIITCSSPGGGGSYLFSLLLGGDVTLAISMTFLSTVAATGFLPLSSAIYSRLLSIHETLHVPISKILGTLLFIAIPIAVGVLIKSKLPKFSQLLLQVVKPFSFVLLLGGLFLAYRMGVFILAGIRLPIVLVGITVPLVGLLVGYCLATCLKLPVAQRRTVSIEVGVQNSLLALAMLQLSLRRLQADYASQAPFIVALSGTSEMLALVIGHFIYSSLFPVP

SEQ ID NO: 907475 - protein, 448 aa, Homo sapiens
MVLMQDKGSSQQWPGLGGEGGGTGPLSMLRAALLLISLPWGAQGTASTSLSTAGGHTVPPTGGRYLSIGDGSVMEFEFPEDSEGIIVISSQYPGQANRTAPGPMLRVTSLDTEVLTIKNLVDAHEAPPTLIEERRDFCIKVSPAEDTPATLSADLAHFSENPILYLLLPLIFVNKCSFGCKVELEVLKGLMQSPQPMLLGLLGQFLVMPLYAFLMAKVFMLPKALALGLIITCSSPGGGGSYLFSLLLGGDVTLAISMTFLSTVAATGFLPLSSAIYSRLLSIHETLHVPISKILGTLLFIAIPIAVGVLIKSKLPKFSQLLLQVVKPFSFVLLLGGLFLAYRMGVFILAGIRLPIVLVGITVPLVGLLVGYCLATCLKLPVAQRRTVSIEVGVQNSLLALAMLQLSLRRLQADYASQAPFIVALSGTSEMLALVIGHFIYSSLFPVP

SEQ ID NO: 907476 - protein, 561 aa, Homo sapiens
  misc_feature (6)..(6): Xaa can be any naturally occurring amino acid
MCWYTXEYLDIVDPSGALPTATGPADAAAKLRGGCGRDSPAIKEDSTGLGPTHEPFSGQPNSTSGDVLLSRRGPGHAIRPPGRAMVLMQDKGSSQQWPGLGGEGGGTGPLSMLRAALLLISLPWGAQGTASTSLSTAGGHTVPPTGGRYLSIGDGSVMEFEFPEDSEGIIVISSQYPGQANRTAPGPMLRVTSLDTEVLTIKNVSAITWGGGGGFVVSIHSGLAGLAPLHIQLVDAHEAPPTLIEERRDFCIKVSPAEDTPATLSADLAHFSENPILYLLLPLIFVNKCSFGCKVELEVLKGLMQSPQPMLLGLLGQFLVMPLYAFLMAKVFMLPKALALGLIITCSSPGGGGSYLFSLLLGGDVTLAISMTFLSTVAATGFLPLSSAIYSRLLSIHETLHVPISKILGTLLFIAIPIAVGVLIKSKLPKFSQLLLQVVKPFSFVLLLGGLFLAYRMGVFILAGIRLPIVLVGITVPLVGLLVGYCLATCLKLPVAQRRTVSIEVGVQNSLLALAMLQLSLRRLQADYASQAPFIVALSGTSEMLALVIGHFIYSSLFPVP

SEQ ID NO: 907477 - protein, 532 aa, Homo sapiens
MAGPRPPGDSPAIKEDSTGLGPTHEPFSGQPNSTSGDVLLSRRGPGHAIRPPGRAMVLMQDKGSSQQWPGLGGEGGGTGPLSMLRAALLLISLPWGAQGTASTSLSTAGGHTVPPTGGRYLSIGDGSVMEFEFPEDSEGIIVISSQYPGQANRTAPGPMLRVTSLDTEVLTIKNVSAITWGGGGGFVVSIHSGLAGLAPLHIQLVDAHEAPPTLIEERRDFCIKVSPAEDTPATLSADLAHFSENPILYLLLPLIFVNKCSFGCKVELEVLKGLMQSPQPMLLGLLGQFLVMPLYAFLMAKVFMLPKALALGLIITCSSPGGGGSYLFSLLLGGDVTLAISMTFLSTVAATGFLPLSSAIYSRLLSIHETLHVPISKILGTLLFIAIPIAVGVLIKSKLPKFSQLLLQVVKPFSFVLLLGGLFLAYRMGVFILAGIRLPIVLVGITVPLVGLLVGYCLATCLKLPVAQRRTVSIEVGVQNSLLALAMLQLSLRRLQADYASQAPFIVALSGTSEMLALVIGHFIYSSLFPVP

SEQ ID NO: 907478 - protein, 122 aa, Homo sapiens
HVLVPPGVFGYRRSQRRSAHCVRGRQTLQLSCAVAVAGESLRKGGGLWPRPCSAIAHSGARPGLAGKGRRRRRAFARPGGAAGPRNGVRGPPRLRDGPSGSPAVGRRRALPFLPPRFAPELC

SEQ ID NO: 907479 - protein, 448 aa, Homo sapiens; identical to SEQ ID NO: 907475

SEQ ID NO: 907480 - protein, 448 aa, Homo sapiens; identical to SEQ ID NO: 907475

SEQ ID NO: 907481 - protein, 242 aa, Homo sapiens
MVLMQDKGSSQQWPGLGGEGGGTGPLSMLRAALLLISLPWGAQGTASTSLSTAGGHTVPPTGGRYLSIGDGSVMEFEFPEDSEGIIVISSQYPGQANRTAPGPMLRVTSLDTEVLTIKNVSAITWGGGGGFVVSIHSGLAGLAPLHIQLVDAHEAPPTLIEERRDFCIKVSPAEDTPATLSADLAHFSENPILYLLLPLIFVNKCSQFPEASGSSFHQPQPPHSTKVLMHYALRKIQAYFFY

SEQ ID NO: 907482 - protein, 234 aa, Homo sapiens
MNHLPEDMENALTGSQSSHASLRNIHSINPTQLMARIESYEGREKKGISDVRRTFCLFVTFDLLFVTLLWIIELNVNGGIENTLEKEVMQYDYYSSYFDIFLLAVFRFKVLILAYAVCRLRHWWAIALTTAVTSAFLLAKVILSKLFSQGAFGYVLPIISFILAWIETWFLDFKVLPQEAEEENRLLIVQDASERAALIPGGLSDGQFYSPPESEAGSEEAEEKQDSEKPLLEL

SEQ ID NO: 907483 - protein, 176 aa, Homo sapiens
MNHLPEDMENALTGSQSSHASLRNIHSINPTQLMARIESYEGREKKGISDVRRTFCLFVTFDLLFVTLLWIIELNVNGGIENTLEKEVMQYDYYSSYFDIFLLAVFRFKVLILAYAVCRLRHWWAIAVSMPCMSGSSPPVLVAKSCSQQAWAGRRYSSNAGGIPPAFLSPVSSILK

SEQ ID NO: 907484 - protein, 234 aa, Homo sapiens; identical to SEQ ID NO: 907482

SEQ ID NO: 907485 - protein, 234 aa, Homo sapiens; identical to SEQ ID NO: 907482

SEQ ID NO: 907486 - protein, 146 aa, Homo sapiens
MQYDYYSSYFDIFLLAVFRFKVLILAYAVCRLRHWWAIALTTAVTSAFLLAKVILSKLFSQGAFGYVLPIISFILAWIETWFLDFKVLPQEAEEENRLLIVQDASERAALIPGGLSDGQFYSPPESEAGSEEAEEKQDSEKPLLEL

SEQ ID NO: 907487 - protein, 216 aa, Homo sapiens
MNHLPEDMENALTGSQSSHASLRNIHSINPTQLMARIESYEGREKKGISDVRRTFCLFVTFDLLFVTLLWIIELNVNGGIENTLEKEVMQYDYYSSYFDIFLLAVFRFKVLILAYAVCRLRHWWAIALFSQGAFGYVLPIISFILAWIETWFLDFKVLPQEAEEENRLLIVQDASERAALIPGGLSDGQFYSPPESEAGSEEAEEKQDSEKPLLEL

SEQ ID NO: 907488 - protein, 123 aa, Homo sapiens
QCEMPSVNSAGLCVLQLTTAVTSAFLLAKVILSKLFSQGAFGYVLPIISFILAWIETWFLDFKVLPQEAEEENRLLIVQDASERAALIPGGLSDGQFYSPPESEAGSEEAEEKQDSEKPLLEL

SEQ ID NO: 907489 - protein, 103 aa, Homo sapiens
MNHLPEDMENALTGSQSSHASLRNIHSINPTQLMARIESYEGREKKGISDVRRTFCLFVTFDLLFVTLLWIIELNVNGGIENTLEKELRIHVKCHQTFVLFLS

SEQ ID NO: 907490 - protein, 123 aa, Homo sapiens; identical to SEQ ID NO: 907488

SEQ ID NO: 907491 - protein, 234 aa, Homo sapiens; identical to SEQ ID NO: 907482

SEQ ID NO: 907492 - protein, 234 aa, Homo sapiens; identical to SEQ ID NO: 907482

SEQ ID NO: 907493 - protein, 234 aa, Homo sapiens; identical to SEQ ID NO: 907482

SEQ ID NO: 907494 - protein, 66 aa, Homo sapiens
MTLEDPECLQEAEEENRLLIVQDASERAALIPGGLSDGQFYSPPESEAGSEEAEEKQDSEKPLLEL

SEQ ID NO: 907495 - protein, 105 aa, Homo sapiens
MNHLPEDMENALTGSQSSHASLRNIHSINPTQLMARIESYEGREKKGISDVRRTFCLFVTFDLLFVTLLWIIELNVSWWFFHNFLRSVSRDNRVFLFVSLIICFI

SEQ ID NO: 907496 - protein, 413 aa, Homo sapiens
AACATRREATRRRWEGGRSRPKGGEEGRRRTRVPGLVTASGPGNPLPDRLGEMAGGRHRRVVGTLHLLLLVAALPWASRGVSPSASAWPEEKNYHQPAILNSSALRQIAEGTSISEMWQNDLQPLLIERYPGSPGSYAARQHIMQRIQRLQADWVLEIDTFLSQTPYGYRSFSNIISTLNPTAKRHLVLACHYDSKYFSHWNNRVFVGATDSAVPCAMMLELARALDKKLLSLKTVSDSKPDLSLQLIFFDGEEAFLHWSPQDSLYGSRHLAAKMASTPHPPGARGTSQLHGMDLLVLLDLIGAPNPTFPNFFPNSARWFERLQAIEHELHELGLLKDHSLEGRYFQNYSYGGVIQDDHIPFLRRGVPVLHLIPSPFPEVWHTMDDNEENLDESTIDNLNKILQVFVLEYLHL

SEQ ID NO: 907497 - protein, 141 aa, Homo sapiens
AACATRREATRRRWEGGRSRPKGGEEGRRRTRVPGLVTASGPGNPLPDRLGEMAGGRHRRVVGTLHLLLLVAALPWASRGVSPSASAWPEEKNYHQPAILNSSALRQIAEGTSISEMWQNDLQPLLIERYPGSPGSYAARQ

SEQ ID NO: 907498 - protein, 413 aa, Homo sapiens; identical to SEQ ID NO: 907496

SEQ ID NO: 907499 - protein, 364 aa, Homo sapiens
AACATRREATRRRWEGGRSRPKGGEEGRRRTRVPGLVTASGPGNPLPDRLGEMAGGRHRRVVGTLHLLLLVAALPWASRGVSPSASAWPEEKHIMQRIQRLQADWVLEIDTFLSQTPYGYRSFSNIISTLNPTAKRHLVLACHYDSKYFSHWNNRVFVGATDSAVPCAMMLELARALDKKLLSLKTVSDSKPDLSLQLIFFDGEEAFLHWSPQDSLYGSRHLAAKMASTPHPPGARGTSQLHGMDLLVLLDLIGAPNPTFPNFFPNSARWFERLQAIEHELHELGLLKDHSLEGRYFQNYSYGGVIQDDHIPFLRRGVPVLHLIPSPFPEVWHTMDDNEENLDESTIDNLNKILQVFVLEYLHL

SEQ ID NO: 907500 - protein, 270 aa, Homo sapiens
MQRIQRLQADWVLEIDTFLSQTPYGYRSFSNIISTLNPTAKRHLVLACHYDSKYFSHWNNRVFVGATDSAVPCAMMLELARALDKKLLSLKTVSDSKPDLSLQLIFFDGEEAFLHWSPQDSLYGSRHLAAKMASTPHPPGARGTSQLHGMDLLVLLDLIGAPNPTFPNFFPNSARWFERLQAIEHELHELGLLKDHSLEGRYFQNYSYGGVIQDDHIPFLRRGVPVLHLIPSPFPEVWHTMDDNEENLDESTIDNLNKILQVFVLEYLHL

SEQ ID NO: 907501 - protein, 422 aa, Homo sapiens
AACATRREATRRRWEGGRSRPKGGEEGRRRTRVPGLVTASGPGNPLPDRLGEMAGGRHRRVVGTLHLLLLVAALPWASRGVSPSASAWPEEKNYHQPAILNSSALRQIAEGTSISEMWQNDLQPLLIERYPGSPGSYAARQHIMQRIQRLQADWVLEIDTFLSQTPYGYRSFSNIISTLNPTAKRHLVLACHYDSKYFSHWNNRVFVGATDSAVPCAMMLELARALDKKLLSLKTVSDSKPDLSLQLIFFDGEEAFLHWSPQDSLYGSRHLAAKMASTPHPPGARGTSQLHGMDLLVLLDLIGAPNPTFPNFFPNSARWFERLQAIEHELHELGLLKDHSLEGRYFQNYSYGGVIQDDHIPFLRRGVPVLHLIPSPFPEVWHTMDDNEVWHTMDDNEENLDESTIDNLNKILQVFVLEYLHL

SEQ ID NO: 907502 - protein, 413 aa, Homo sapiens; identical to SEQ ID NO: 907496

SEQ ID NO: 907503 - protein, 188 aa, Homo sapiens
LCFYCCFYQTVSDSKPDLSLQLIFFDGEEAFLHWSPQDSLYGSRHLAAKMASTPHPPGARGTSQLHGMDLLVLLDLIGAPNPTFPNFFPNSARWFERLQAIEHELHELGLLKDHSLEGRYFQNYSYGGVIQDDHIPFLRRGVPVLHLIPSPFPEVWHTMDDNEENLDESTIDNLNKILQVFVLEYLHL

SEQ ID NO: 907504 - protein, 126 aa, Homo sapiens
MGQGNVDLLVLLDLIGAPNPTFPNFFPNSARWFERLQAIEHELHELGLLKDHSLEGRYFQNYSYGGVIQDDHIPFLRRGVPVLHLIPSPFPEVWHTMDDNEENLDESTIDNLNKILQVFVLEYLHL

SEQ ID NO: 907505 - protein, 413 aa, Homo sapiens; identical to SEQ ID NO: 907496

SEQ ID NO: 907506 - protein, 297 aa, Homo sapiens
MWQNDLQPLLIERYPGSPGSYAARQHIMQRIQRLQADWVLEIDTFLSQTPYGYRSFSNIISTLNPTAKRHLVLACHYDSKYFSHWNNRVFVGATDSAVPCAMMLELARALDKKLLSLKTVSDSKPDLSLQLIFFDGEEAFLHWSPQDSLYGSRHLAAKMASTPHPPGARGTSQLHGMDLLVLLDLIGAPNPTFPNFFPNSARWFERLQAIEHELHELGLLKDHSLEGRYFQNYSYGGVIQDDHIPFLRRGVPVLHLIPSPFPEVWHTMDDNEENLDESTIDNLNKILQVFVLEYLHL

SEQ ID NO: 907507 - protein, 270 aa, Homo sapiens; identical to SEQ ID NO: 907500

SEQ ID NO: 907508 - protein, 413 aa, Homo sapiens; identical to SEQ ID NO: 907496

SEQ ID NO: 907509 - protein, 413 aa, Homo sapiens; identical to SEQ ID NO: 907496

SEQ ID NO: 907510 - protein, 395 aa, Homo sapiens
AACATRREATRRRWEGGRSRPKGGEEGRRRTRVPGLVTASGPGNPLPDRLGEMAGGRHRRVVGTLHLLLLVAALPWASRGVSPSASAWPEEKNYHQPAILNSSALRQIAEGTSISEMWQNDLQPLLIERYPGSPGSYAARQHIMQRIQRLQADWVLEIDTFLSQTPYGYRSFSNIISTLNPTAKRHLVLACHYDSKYFSHWNNRVFVGATDSAVPCAMMLELARALDKKLLSLKTVSDSKPDLSLQLIFFDGEAAKMASTPHPPGARGTSQLHGMDLLVLLDLIGAPNPTFPNFFPNSARWFERLQAIEHELHELGLLKDHSLEGRYFQNYSYGGVIQDDHIPFLRRGVPVLHLIPSPFPEVWHTMDDNEENLDESTIDNLNKILQVFVLEYLHL

SEQ ID NO: 907511 - protein, 53 aa, Homo sapiens
MAGGRHRRVVGTLHLLLLVAALPWASRGVSPSASAWPEEKVRGCFCVVVLERL

SEQ ID NO: 907512 - protein, 930 aa, Homo sapiens
AAGATMERDGCAGGGSRGGEGGRAPREGPAGNGRDRGRSHAAEAPGDPQAAASLLAPMDVGEEPLEKAARARTAKDPNTYKVLSLVLSVCVLTTILGCIFGLKPSCAKEVKSCKGRCFERTFGNCRCDAACVELGNCCLDYQETCIEPEHIWTCNKFRCGEKRLTRSLCACSDDCKDKGDCCINYSSVCQGEKSWVEEPCESINEPQCPAGFETPPTLLFSLDGFRAEYLHTWGGLLPVISKLKKCGTYTKNMRPVYPTKTFPNHYSIVTGLYPESHGIIDNKMYDPKMNASFSLKSKEKFNPEWYKGEPIWVTAKYQGLKSGTFFWPGSDVEINGIFPDIYKMYNGSVPFEERILAVLQWLQLPKDERPHFYTLYLEEPDSSGHSYGPVSSEVIKALQRVDGMVGMLMDGLKELNLHRCLNLILISDHGMEQGSCKKYIYLNKYLGDVKNIKVIYGPAARLRPSDVPDKYYSFNYEGIARNLSCREPNQHFKPYLKHFLPKRLHFAKSDRIEPLTFYLDPQWQLALNPSERKYCGSGFHGSDNVFSNMQALFVGYGPGFKHGIEADTFENIEVYNLMCDLLNLTPAPNNGTHGSLNHLLKNPVYTPKHPKEVHPLVQCPFTRNPRDNLGCSCNPSILPIEDFQTQFNLTVAEEKIIKHETLPYGRPRVLQKENTICLLSQHQFMSGYSQDILMPLWTSYTVDRNDSFSTEDFSNCLYQDFRIPLSPVHKCSFYKNNTKVSYGFLSPPQLNKNSSGIYSEALLTTNIVPMYQSFQVIWRYFHDTLLRKYAEERNGVNVVSGPVFDFDYDGRCDSLENLRQKRRVIRNQEILIPTHFFIVLTSCKDTSQTPLHCENLDTLAFILPHRTDNSESCVHGKHDSSWVEELLMLHRARITDVEHITGLSFYQQRKEPVSDILKLKTHLPTFSQED

SEQ ID NO: 907513 - protein, 161 aa, Homo sapiens [sequence omitted]

SEQ ID NO: 907514 - protein, 647 aa, Homo sapiens
AAGATMERDGCAGGGSRGGEGGRAPREGPAGNGRDRGRSHAAEAPGDPQAAASLLAPMDVGEEPLEKAARARTAKDPNTYKVLSLVLSVCVLTTILGCIFGLKPSCAKEVKSCKGRCFERTFGNCRCDAACVELGNCCLDYQETCIEPEHIWTCNKFRCGEKRLTRSLCACSDDCKDKGDCCINYSSVCQGEKSWVEEPCESINEPQCPAGFETPPTLLFSLDGFRAEYLHTWGGLLPVISKLKKCGTYTKNMRPVYPTKTFPNHYSIVTGLYPESHGIIDNKMYDPKMNASFSLKSKEKFNPEWYKGEPIWVTAKYQGLKSGTFFWPGSDVEINGIFPDIYKMYNGSVPFEERILAVLQWLQLPKDERPHFYTLYLEEPDSSGHSYGPVSSEVIKALQRVDGMVGMLMDGLKELNLHRCLNLILISDHGMEQGSCKKYIYLNKYLGDVKNIKVIYGPAARLRPSDVPDKYYSFNYEGIARNLSCREPNQHFKPYLKHFLPKRLHFAKSDRIEPLTFYLDPQWQLALNPSERKYCGSGFHGSDNVFSNMQALFVGYGPGFKHGIEADTFENIEVYNLMCDLLNLTPAPNNGTHGSLNHLLKNPVYTPKHPKEVHPLVQCPFTRNPRDNWVVSYLRIADGVSPFLLGV

SEQ ID NO: 907515 - protein, 930 aa, Homo sapiens; identical to SEQ ID NO: 907512

SEQ ID NO: 907516 - protein, 911 aa, Homo sapiens
AAGATMERDGCAGGGSRGGEGGRAPREGPAGNGRDRGRSHAAEAPGDPQAAASLLAPMDVGEEPLEKAARARTAKDPNTYKVLSLVLSVCVLTTILGCIFGLKPSCAKEVKSCKGRCFERTFGNCRCDAACVELGNCCLDYQETCIEPEHIWTCNKFRCGEKRLTRSLCACSDDCKDKGDCCINYSSVCQGEKSWVEEPCESINEPQCPAGFETPPTLLFSLDGFRAEYLHTWGGLLPVISKLKKCGTYTKNMRPVYPTKTFPNHYSIVTGLYPESHGIIDNKMYDPKMNASFSLKSKEKFNPEWYKGEPIWVTAKYQGLKSGTFFWPGSDVEINGIFPDIYKMYNGSVPFEERILAVLQWLQLPKDERPHFYTLYLEEPDSSGHSYGPVSSEVIKALQRVDGMVGMLMDGLKELNLHRCLNLILISDHGMEQGSCKKYIYLNKYLGDVKNIKLFNYEGIARNLSCREPNQHFKPYLKHFLPKRLHFAKSDRIEPLTFYLDPQWQLALNPSERKYCGSGFHGSDNVFSNMQALFVGYGPGFKHGIEADTFENIEVYNLMCDLLNLTPAPNNGTHGSLNHLLKNPVYTPKHPKEVHPLVQCPFTRNPRDNLGCSCNPSILPIEDFQTQFNLTVAEEKIIKHETLPYGRPRVLQKENTICLLSQHQFMSGYSQDILMPLWTSYTVDRNDSFSTEDFSNCLYQDFRIPLSPVHKCSFYKNNTKVSYGFLSPPQLNKNSSGIYSEALLTTNIVPMYQSFQVIWRYFHDTLLRKYAEERNGVNVVSGPVFDFDYDGRCDSLENLRQKRRVIRNQEILIPTHFFIVLTSCKDTSQTPLHCENLDTLAFILPHRTDNSESCVHGKHDSSWVEELLMLHRARITDVEHITGLSFYQQRKEPVSDILKLKTHLPTFSQED

SEQ ID NO: 907517 - protein, 492 aa, Homo sapiens
AAGATMERDGCAGGGSRGGEGGRAPREGPAGNGRDRGRSHAAEAPGDPQAAASLLAPMDVGEEPLEKAARARTAKDPNTYKVLSLVLSVCVLTTILGCIFGLKPSCAKEVKSCKGRCFERTFGNCRCDAACVELGNCCLDYQETCIEPEHIWTCNKFRCGEKRLTRSLCACSDDCKDKGDCCINYSSVCQGEKSWVEEPCESINEPQCPAGFETPPTLLFSLDGFRAEYLHTWGGLLPVISKLKKCGTYTKNMRPVYPTKTFPNHYSIVTGLYPESHGIIDNKMYDPKMNASFSLKSKEKFNPEWYKGEPIWVTAKYQGLKSGTFFWPGSDVEINGIFPDIYKMYNGSVPFEERILAVLQWLQLPKDERPHFYTLYLEEPDSSGHSYGPVSSEVIKALQRVDGMVGMLMDGLKELNLHRCLNLILISDHGMEQGSCKKYIYLNKYLGDVKNIKVIYGPAARLRPSDVPDKYYSLKALPEIFQQGHHGVTSSQ

SEQ ID NO: 907518 - protein, 70 aa, Homo sapiens
DLSQFGSSLFHQLAKNANTLRIQRTISLKGFLQDTGSQLSSFHKPFLLLCFKTMGGPEESLWMPSPSPTM

SEQ ID NO: 907519 - protein, 201 aa, Homo sapiens
RFVTVWKQSIPSTSQKCKHPEDSENNFFEGFPSRYWLPAFFFPQAFLAAVLQDYGRSRGIAVDALTFTHHVISNTTDKDEKFSVFMPKKLNIVRRAFKGSASSHTGVYIFGLFIEGARWNREQKILEDSLPLEMCCDFPDIYFLPTKISTKTPNASNQTDSELYAFECPVSSPPSLFFFFFFSLPPLPHPPPLFFPTEETS

SEQ ID NO: 907520 - protein, 218 aa, Homo sapiens
RFVTVWKQSIPSTSQKCKHPEDSENNFFEGFPSRYWLPAFFFPQAFLAAVLQDYGRSRGIAVDALTFTHHVISNTTDKDEKFSVFMPKKLNIVRRAFKGSASSHTGVYIFGLFIEGARWNREQKILEDSLPLEMCCDFPDIYFLPTKISTKTPNASNQTDSELYAFECPVYQTPERSRILATTGLPTNFLTSVYLSTKKPPSHWITMRVALLCEKNEK

SEQ ID NO: 907521 - protein, 1267 aa, Homo sapiens
MGDMKTPDFDDLLAAFDIPDPTSLDAKEAIQTPSEENESPLKPPGICMDESVSLSHSGSAPDVPAVSVIVKNTSRQESFEAEKDHITPSLLHNGFRGSDLPPDPHNCGKFDSTFMNGDSARSFPGKLEPPKSEPLPTFNQFSPISSPEPEDPIKDNGFGIKPKHSDSYFPPPLGCGAVGGPVLEALAKFPVPELHMFDHFCKKEPKPEPLPLGSQQEHEQSGQNTVEPHKDPDATRFFGEALEFNSHPSNSIGESKGLARELGTCSSVPPRQRLKPAHSKLSSCVAALVALQAKRVASVTKEDQPGHTKDLSGPTKESSKGSPKMPKSPKSPRSPLEATRKSIKPSDSPRSICSDSSSKGSPSVAASSPPAIPKVRIKTIKTSSGEIKRTVTRILPDPDDPSKSPVGSPLGSAIAEAPSEMPGDEVPVEEHFPEAGTNSGSPQGARKGDESMTKASDSSSPSCSSGPRVPKGAAPGSQTGKKQQSTALQASTLAPANLLPKAVHLANLNLVPHSVAASVTAKSSVQRRSQPQLTQMSVPLVHQVKKAAPLIVEVFNKVLHSSNPVPLYAPNLSPPADSRIHVPASGYCCLECGDAFALEKSLSQHYGRRSVHIEVLCTLCSKTLLFFNKCSLLRHARDHKSKGLVMQCSQLLVKPISADQMFVSAPVNSTAPAAPAPSSSPKHGLTSGSASPPPPALPLYPDPVRLIRYSIKCLECHKQMRDYMVLAAHFQRTTEETEGLTCQVCQMLLPNQCSFCAHQRIHAHKSPYCCPECGVLCRSAYFQTHVKENCLHYARKVGYRCIHCGVVHLTLALLKSHIQERHCQVFHKCAFCPMAFKTASSTADHSATQHPTQPHRPSQLIYKCSCEMVFNKKRHIQQHFYQNVSKTQVGVFKCPECPLLFVQKPELMQHVKSTHGVPRNVDELSSLQSSADTSSSRPGSRVPTEPPATSVAARSSSLPSGRWGRPEAHRRVEARPRLRNTGWTCQECQEWVPDRESYVSHMKKSHGRTLKRYPCRQCEQSFHTPNSLRKHIRNNHDTVKKFYTCGYCTEDSPSFPRPSLLESHISLMHGIRNPDLSQTSKVKPPGGHSPQVNHLKRPVSGVGDAPGTSNGATVSSTKRHKSLFQCAKCSFATDSGLEFQSHIPQHQVDSSTAQCLLCGLCYTSASSLSRHLFIVHKVRDQEEEEEEEAAAAEMAVEVAEPEEGSGEEVPMETRENGLEECAGEPLSADPEARRLLGPAPEDDGGHNDHSQPQASQDQDSHTLSPQV

SEQ ID NO: 907522 - protein, 1267 aa, Homo sapiens; identical to SEQ ID NO: 907521

SEQ ID NO: 907523 - protein, 1267 aa, Homo sapiens; identical to SEQ ID NO: 907521

SEQ ID NO: 907524 - protein, 758 aa, Homo sapiens [sequence omitted]

SEQ ID NO: 907525 - protein, 1214 aa, Homo sapiens
GGARVWYSRRQAAATTTKNTSRQESFEAEKDHITPSLLHNGFRGSDLPPDPHNCGKFDSTFMNGDSARSFPGKLEPPKSEPLPTFNQFSPISSPEPEDPIKDNGFGIKPKHSDSYFPPPLGCGAVGGPVLEALAKFPVPELHMFDHFCKKEPKPEPLPLGSQQEHEQSGQNTVEPHKDPDATRFFGEALEFNSHPSNSIGESKGLARELGTCSSVPPRQRLKPAHSKLSSCVAALVALQAKRVASVTKEDQPGHTKDLSGPTKESSKGSPKMPKSPKSPRSPLEATRKSIKPSDSPRSICSDSSSKGSPSVAASSPPAIPKVRIKTIKTSSGEIKRTVTRILPDPDDPSKSPVGSPLGSAIAEAPSEMPGDEVPVEEHFPEAGTNSGSPQGARKGDESMTKASDSSSPSCSSGPRVPKGAAPGSQTGKKQQSTALQASTLAPANLLPKAVHLANLNLVPHSVAASVTAKSSVQRRSQPQLTQMSVPLVHQVKKAAPLIVEVFNKVLHSSNPVPLYAPNLSPPADSRIHVPASGYCCLECGDAFALEKSLSQHYGRRSVHIEVLCTLCSKTLLFFNKCSLLRHARDHKSKGLVMQCSQLLVKPISADQMFVSAPVNSTAPAAPAPSSSPKHGLTSGSASPPPPALPLYPDPVRLIRYSIKCLECHKQMRDYMVLAAHFQRTTEETEGLTCQVCQMLLPNQCSFCAHQRIHAHKSPYCCPECGVLCRSAYFQTHVKENCLHYARKVGYRCIHCGVVHLTLALLKSHIQERHCQVFHKCAFCPMAFKTASSTADHSATQHPTQPHRPSQLIYKCSCEMVFNKKRHIQQHFYQNVSKTQVGVFKCPECPLLFVQKPELMQHVKSTHGVPRNVDELSSLQSSADTSSSRPGSRVPTEPPATSVAARSSSLPSGRWGRPEAHRRVEARPRLRNTGWTCQECQEWVPDRESYVSHMKKSHGRTLKRYPCRQCEQSFHTPNSLRKHIRNNHDTVKKFYTCGYCTEDSPSFPRPSLLESHISLMHGIRNPDLSQTSKVKPPGGHSPQVNHLKRPVSGVGDAPGTSNGATVSSTKRHKSLFQCAKCSFATDSGLEFQSHIPQHQVDSSTAQCLLCGLCYTSASSLSRHLFIVHKVRDQEEEEEEEAAAAEMAVEVAEPEEGSGEEVPMETRENGLEECAGEPLSADPEARRLLGPAPEDDGGHNDHSQPQASQDQDSHTLSPQV

SEQ ID NO: 907526 - protein, 1267 aa, Homo sapiens; identical to SEQ ID NO: 907521

SEQ ID NO: 907527 - protein, 707 aa, Homo sapiens
MGDMKTPDFDDLLAAFDIPDPTSLDAKEAIQTPSEENESPLKPPGICMDESVSLSHSGSAPDVPAVSVIVKNTSRQESFEAEKDHITPSLLHNGFRGSDLPPDPHNCGKFDSTFMNGDSARSFPGKLEPPKSEPLPTFNQFSPISSPEPEDPIKDNGFGIKPKHSDSYFPPPLGCGAVGGPVLEALAKFPVPELHMFDHFCKKEPKPEPLPLGSQQEHEQSGQNTVEPHKDPDATRFFGEALEFNSHPSNSIGESKGLARELGTCSSVPPRQRLKPAHSKLSSCVAALVALQAKRVASVTKEDQPGHTKDLSGPTKESSKGSPKMPKSPKSPRSPLEATRKSIKPSDSPRSICSDSSSKGSPSVAASSPPAIPKVRIKTIKTSSGEIKRTVTRILPDPDDPSKSPVGSPLGSAIAEAPSEMPGDEVPVEEHFPEAGTNSGSPQGARKGDESMTKASDSSSPSCSSGPRVPKGAAPGSQTGKKQQSTALQASTLAPANLLPKAVHLANLNLVPHSVAASVTAKSSVQRRSQPQLTQMSVPLVHQVKKAAPLIVEVFNKVLHSSNPVPLYAPNLSPPADSRIHVPASGYCCLECGDAFALEKSLSQHYGRRSVHIEVLCTLCSKTLLFFNKCSLLRHARDHKSKGLVMQCSQLLVKPISADQMFVSAPVNSTAPAAPAPSSSPKHGLTSGSASPPPPALPLYPDPVSPL

SEQ ID NO: 907528 - protein, 216 aa, Homo sapiens
MAGRGGAARPNGPAAGNKICQFKLVLLGESAVGKSSLVLRFVKGQFHEYQESTIGAAFLTQTVCLDDTTVKFEIWDTAGQERYHSLAPMYYRGAQAAIVVYDITNTDTFARAKNWVKELQRQASPNIVIALAGNKADLASKRAVEFQEAQAYADDNSLLFMETSAKTAMNVNEIFMAIAKKLPKNEPQNATGAPGRNRGVDLQENNPASRSQCCSN

SEQ ID NO: 907529 - protein, 187 aa, Homo sapiens
SGSGAAERRKWRPEPGTPPAGREADPVRAPAPSNAAAPEPPWRSPSPLSASLHSTSPHPHALWTTTAGRAMAGRGGAARPNGPAAGNKICQFKLVLLGESAVGKSSLVLRFVKGQFHEYQESTIGAAFLTQTVCLDDTTVKFEIWDTAGQERYHSLAPMYYRGAQAAIVVYDITNTDTFACVPRTVC

SEQ ID NO: 907530 - protein, 286 aa, Homo sapiens
SGSGAAERRKWRPEPGTPPAGREADPVRAPAPSNAAAPEPPWRSPSPLSASLHSTSPHPHALWTTTAGRAMAGRGGAARPNGPAAGNKICQFKLVLLGESAVGKSSLVLRFVKGQFHEYQESTIGAAFLTQTVCLDDTTVKFEIWDTAGQERYHSLAPMYYRGAQAAIVVYDITNTDTFARAKNWVKELQRQASPNIVIALAGNKADLASKRAVEFQEAQAYADDNSLLFMETSAKTAMNVNEIFMAIAKKLPKNEPQNATGAPGRNRGVDLQENNPASRSQCCSN

SEQ ID NO: 907531 - protein, 196 aa, Homo sapiens
RLGTRRVVNRPRGKSSLVLRFVKGQFHEYQESTIGAAFLTQTVCLDDTTVKFEIWDTAGQERYHSLAPMYYRGAQAAIVVYDITNTDTFARAKNWVKELQRQASPNIVIALAGNKADLASKRAVEFQEAQAYADDNSLLFMETSAKTAMNVNEIFMAIAKKLPKNEPQNATGAPGRNRGVDLQENNPASRSQCCSN

SEQ ID NO: 907532 - protein, 286 aa, Homo sapiens; identical to SEQ ID NO: 907530

SEQ ID NO: 907533 - protein, 286 aa, Homo sapiens; identical to SEQ ID NO: 907530

SEQ ID NO: 907534 - protein, 325 aa, Homo sapiens
SGSGAAERRKWRPEPGTPPAGREADPVRAPAPSNAAAPEPPWRSPSPLSASLHSTSPHPHALWTTTAGRAMAGRGGAARPNGPAAGNKICQFKLVLLGESAVGKSSLVLRFVKGQFHEYQESTIGAAFLTQTVCLDDTTVKFEIWDTAGQERYHSLAPMYYRGAQAAIVVYDITNTDTFARAKNWVKELQRQASPNIVIALAGNKADLASKRAVEFQEAQAYADDNSLLFMETSAKTAMNVNEIFMAIAKKLPKQQKAPEKLAKLGVAFPKGARKKTPNGLVGNPVPQRGKEKTKTAPKGPKGAPGERPPRVWPLGQGPKTLWER

SEQ ID NO: 907535 - protein, 286 aa, Homo sapiens; identical to SEQ ID NO: 907530

SEQ ID NO: 907536 - protein, 208 aa, Homo sapiens
SGSGAAERRKWRPEPGTPPAGREADPVRAPAPSNAAAPEPPWRSPSPLSASLHSTSPHPHALWTTTAGRAMAGRGGAARPNGPAAGNKICQFKLVLLGESAVGKSSLVLRFVKGQFHEYQESTIGAAFLTQTVCLDDTTVKFEIWDTAGQERYHSLAPMYYRGAQAAIVVYDITNTVKISPCFFLCPSSSQSPRDWVIRALISGRLTL

SEQ ID NO: 907537 - protein, 325 aa, Homo sapiens
SGSGAAERRKWRPEPGTPPAGREADPVRAPAPSNAAAPEPPVSLSRQAGVQWHYLSSVQPLPPGFKRFSCLSLPSSWDYSWRSPSPLSASLHSTSPHPHALWTTTAGRAMAGRGGAARPNGPAAGNKICQFKLVLLGESAVGKSSLVLRFVKGQFHEYQESTIGAAFLTQTVCLDDTTVKFEIWDTAGQERYHSLAPMYYRGAQAAIVVYDITNTDTFARAKNWVKELQRQASPNIVIALAGNKADLASKRAVEFQEAQAYADDNSLLFMETSAKTAMNVNEIFMAIAKKLPKNEPQNATGAPGRNRGVDLQENNPASRSQCCSN

SEQ ID NO: 907538 - protein, 162 aa, Homo sapiens
MSLSRCRGVRGSCYSDLTGCMWLKVEVYKEGNSWAPGEGAETSDQKAGPAICDTFARAKNWVKELQRQASPNIVIALAGNKADLASKRAVEFQEAQAYADDNSLLFMETSAKTAMNVNEIFMAIAKKLPKNEPQNATGAPGRNRGVDLQENNPASRSQCCSN

SEQ ID NO: 907539 - protein, 127 aa, Homo sapiens
MTNTKGKRRGTRYMFSRPLRKHGVVPLATYMRIYKKGDIVDIKGMGTVQKGMPHKCYHGKTGRVYNVTQHAVGIVVNKQVKGKILAKRINVRIEHIKHSKSRDSFLKRVKENESFHLHLSVQILIQF

SEQ ID NO: 907540 - protein, 211 aa, Homo sapiens
MSPFFAHRKFVNSAWGWTCTFLGGFVLLVVFLATRRVAVTARHLSRLVVGAAVWRGAGRAFLLIEDLTGSCFEPLPQGLLLHELPDRRSCLAAGHQWRGYTVSSHTFLLTFCCLLMAEEAAVFAKYLAHGLPAGAPLRLVFLLNVLLLGLWNFLLLCTVIYFHQYTHKVVGAAVGTFAWYLTYGSWYHQPWSPGSPGHGLFPRPHSSRKHN

SEQ ID NO: 907541 - protein, 292 aa, Homo sapiens
MERGPVVGAGLGAGARIQALLGCLLKVLLWVASALLYFGSEQAARLLGSPCLRRLYHAWLAAVVIFGPLLQFHVNPRTIFASHGNFFNIKFVNSAWGWTCTFLGGFVLLVVFLATRRVAVTARHLSRLVVGAAVWRGAGRAFLLIEDLTGSCFEPLPQGLLLHELPDRRSCLAAGHQWRGYTVSSHTFLLTFCCLLMAEEAAVFAKYLAHGLPAGAPLRLVFLLNVLLLGLWNFLLLCTVIYFHQYTHKVVGAAVGTFAWYLTYGSWYHQPWSPGSPGHGLFPRPHSSRKHN

SEQ ID NO: 907542 - protein, 54 aa, Homo sapiens
MPGKKARKNAQPSPARAPAELEVECATQLRRFGDKLNFRQKLLNLISKLFCSGT

SEQ ID NO: 907543 - protein, 111 aa, Homo sapiens
MPGKKARKNAQPSPARAPAGPAGTAGTARDQAGFAIGMQLRFTRAKSSFPPLFPPRHLPFPGATRNKCKCRRLSLGESHCRGRRGRREPRGPPGLPALPETAPQGPLCSGA

SEQ ID NO: 907544 - protein, 66 aa, Homo sapiens
  misc_feature (9)..(9): Xaa can be any naturally occurring amino acid
  misc_feature (47)..(47): Xaa can be any naturally occurring amino acid
  misc_feature (52)..(52): Xaa can be any naturally occurring amino acid
LALYQSYVXPCTIYLTTLHSVHRSPTYIESALRDLLLRSPHMNPIGXLATCXEPANSAIMADITLL

SEQ ID NO: 907545 - protein, 737 aa, Homo sapiens
MRCYLSWDRWTSPPLSSIIFISVDYILNVTREIDNFFPGLFAYHNIRVYDEETTDLLAHWNEAYHFINKAKRNHSKCLVHCKMGVSRSASTVIAYAMKEFGWPLEKAYNYVKQKRSITRPNAGFMRQLSEYEGILDASKQRHNKLWRQQTDSSLQQPVDDPAGPGDFLPETPDGTPESQLPFLDDAAQPGLGPPLPCCFRRLSDPLLPSPEDETGSLVHLEDPEREALLEEAAPPAEVHRPARQPQQGSGLCEKDVKKKLEFGSPKGRSGSLLQVEETEREEGLGAGRWGQLPTQLDQNLLNSENLNNNSKRSCPNGMEDDAIFGILNKVKPSYKSCADCMYPTASGAPEASRERCEDPNAPAICTQPAFLPHITSSPVAHLASRSRVPEKPASGPTEPPPFLPPAGSRRADTSGPGAGAALEPPASLLEPSRETPKVLPKSLLLKNSHCDKNPPSTEVVIKEESSPKKDMKPAKDLRLLFSNESEKPTTNSYLMQHQESIIQLQKAGLVRKHTKELERLKSVPADPAPPSRDGPASRLEASIPEESQDPAALHELGPLVMPSQAGSDEKSEAAPASLEGGSLKSPPPFFYRLDHTSSFSKDFLKTICYTPTSSSMSSNLTRSSSSDSIHSVRGKPGLVKQRTQEIETRLRLAGLTVSSPLKRSHSLAKLGSLTFSTEDLSSEADPSTVADSQDTTLSESSFLHEPQGTPRDPAATSKPSGKPAPENLKSPSWMSKS

SEQ ID NO: 907546 - protein, 380 aa, Homo sapiens
MRCYLSWDRWTSPPLSSIIFISVDYILNVTREIDNFFPGLFAYHNIRVYDEETTDLLAHWNEAYHFINKAKRNHSKCLVHCKMGVSRSASTVIAYAMKEFGWPLEKAYNYVKQKRSITRPNAGFMRQLSEYEGILDASKQRHNKLWRQQTDSSLQQPVDDPAGPGDFLPETPDGTPESQLPFLDDAAQPGLGPPLPCCFRRLSDPLLPSPEDETGSLVHLEDPEREALLEEAAPPAEVHRPARQPQQGSGLCEKDVKKKLEFGSPKGRSGSLLQVEETEREEGLGAGRWGQLPTQLDQNLLNSENLNNNSKRSCPNGMEVGRARPAGWHTPSLPSHSNWPTSASVVGTTGTRHHTQLIFFYCLLWAPSSHLQGPEGSFTG

SEQ ID NO: 907547 - protein, 737 aa, Homo sapiens; identical to SEQ ID NO: 907545

SEQ ID NO: 907548 - protein, 147 aa, Homo sapiens
MGISEEFNGKPDSLFFNDGQRRIDFVLVYEDESRKETNKKGTNEKQRRKRQAYESNLICHGLQLEATRSVSTGPFFSPRLTTVLGQLRATWNTWVTLETCSPGHILVIDWERSQSKSALCRMYSFFLIKTSRSFLIANEFYNECMYE

SEQ ID NO: 907549 - protein, 275 aa, Homo sapiens
GRTGHAQSPGSARQARGVLRLWAPVGGCLGSAFPGAGWAQRPLSPSDTRPAVPDPAPGRAAPFWNPGAPNFAPSSEPPSEGDMKKMSRNVLLQMEEEEDDDDGDIVLENLGQTIVPDLGSLESQHDFRTPEFEEFNGKPDSLFFNDGQRRIDFVLVYEDESRKETNKKGTNEKQRRKRQAYESNLICHGLQLEATRSVSTGPFFSPRLTTVLGQLRATWNTWVTLETCSPGHILVIDWERSQSKSALCRMYSFFLIKTSRSFLIANEFYNECMYE

SEQ ID NO: 907550 - protein, 108 aa, Homo sapiens
GRTGHAQSPGSARQARGVLRLWAPVGGCLGSAFPGAGWAQRPLSPSDTRPAVPDPAPGRAAPFWNPGAPNFAPSSEPPSEGDMKKMSRNVLLQMEEEEDDDDGDIGRI

SEQ ID NO: 907551 - protein, 296 aa, Homo sapiens
GRTGHAQSPGSARQARGVLRLWAPVGGCLGSAFPGAGWAQRPLSPSDTRPAVPDPAPGRAAPFWNPGAPNFAPSSEPPSEGDMKKMSRNVLLQMEEEEDDDDGDIGDVPASRRPFLTPHTHLPSSLVLENLGQTIVPDLGSLESQHDFRTPEFEEFNGKPDSLFFNDGQRRIDFVLVYEDESRKETNKKGTNEKQRRKRQAYESNLICHGLQLEATRSVSTGPFFSPRLTTVLGQLRATWNTWVTLETCSPGHILVIDWERSQSKSALCRMYSFFLIKTSRSFLIANEFYNECMYE

SEQ ID NO: 907552 - protein, 235 aa, Homo sapiens
MDGHHYRRVARVDLRKKTETFSTRRVKSGLCKESQLPSTSALGKGEQVEVTFPVLRLAPCDLSLIPNSACGCLSSENTRCVWIGSSVGLFVFNLANLEVEAALYYKDFQSLSILLAGSCALRNRTADQKVLCLLASLFGGKIAVLEINPAALVRAQQCPSMGQSLSVPASSCVLPTSPLYLGIAKEKSTKAASEQRRATCPRLTAVPLVPVAVGVQSGPSAITDCENIFFPFFLC

SEQ ID NO: 907553 - protein, 235 aa, Homo sapiens; identical to SEQ ID NO: 907552

SEQ ID NO: 907554 - protein, 295 aa, Homo sapiens
MDGHHYRRVARVDLRKKTETFSTRRVKSGLCKESQLPSTSALGKGEQVEVTFPVLRLAPCDLSLIPNSACGCLSSENTRCVWIGSSVGLFVFNLANLEVEAALYYKDFQSLSILLAGSCALRNRTADQKVLCLLASLFGGKIAVLEINPAALVRAQQCPSMGQSLSVPASSCVLPTSPLYLGIAKEKSTKAASEQRRAARNVMKDQRLVFHSKVRSSGYASAPHVTMFSPKTNIKSEGKGSSRSRSTCAREAYPVECAVPTKPGPQVVPPPPAHVYAASSTQVRHVLRELGSISL

SEQ ID NO: 907555 - protein, 198 aa, Homo sapiens
MDGHHYRRVARVDLRKKTETFSTRRVKSGLCKESQLPSTSALGKGEQVEVTFPVLRLAPCDLSLIPNSACGCLSSENTRCVWIGSSVGLFVFNLANLEVEAALYYKDFQSLSILLAGSCALRNRTADQKVLCLLASLFGGKIAVLEINPAALVRAQQCPSMGQSLSVPASSCVLPTSPLYLGIAKEKSTKAASEQRRV

SEQ ID NO: 907556 - protein, 109 aa, Homo sapiens
WAFLFWRSKARLLSDKMPEYPGKLSLLLSVETHPRTSGVGRARTALSIQRDLGVRHTWPHGQVLSTCAARECQGPCVLPSDGFLLVNEAGTRPHSYSIDGAGVRPRSTA

SEQ ID NO: 907557 - protein, 235 aa, Homo sapiens; identical to SEQ ID NO: 907552

SEQ ID NO: 907558 - protein, 203 aa, Homo sapiens
MDGHHYRRVARVDLRKKTETFSTRRVKSGLCKESQLPSTSALGKGEQVEVTFPVLRLAPCDLSLIPNSACGCLSSENTRCVWIGSSVGLFVFNLANLEVEAALYYKDFQSLSILLAGSCALRNRTADQKVLCLLASLFGGKIAVLEINPAALVRAQQCPSMGQSLSVPASSCVLPTSPLYLGIAKEKSTKAASEQRRGQYRVL

SEQ ID NO: 907559 - protein, 303 aa, Homo sapiens
MDGHHYRRVARVDLRKKTETFSTRRVKSGLCKESQLPSTSALGKGEQVEVTFPVLRLAPCDLSLIPNSACGCLSSENTRCVWIGSSVGLFVFNLANLEVEAALYYKDFQSLSILLAGSCALRNRTADQKVLCLLASLFGGKIAVLEINPAALVRAQQCPSMGQSLSVPASSCVLPTSPLYLGIAKEKSTKAASEQRRAARNVMKDQRLVFHSKVRSSGYASAPHVTMFSPKTNIKSEGKGSSRSRSTCAREAYPVECAVPTKPGPQVVPPPPAHVYAASSTQEMGSGWPVGWPTICYSFLMPA

SEQ ID NO: 907560 - protein, 285 aa, Homo sapiens
MGTPGEGLGRCSHALIRGVPESLASGEGAGAGLPALDLAKAQREHGVLGGKLRQRLGLQLLELPPEESLPLGPLLGDTAVIQGDTALITRPWSPARRPEVDGVRKALQDLGLRIVEIGDENATLDGTDVLFTGREFFVGLSKWTNHRGAEIVADTFRDFAVSTVPVSGPSHLRGLCGMGGPRTVVAGSSDAAQKAVRAMAVLTDHPYASLTLPDDAAADCLFLRPGLPGVPPFLLHRGGGDLPNSQEALQKLSDVTLVPVSCSELEKAGAGLSSLCLVLSTRPHS

SEQ ID NO: 907561 - protein, 285 aa, Homo sapiens; identical to SEQ ID NO: 907560

SEQ ID NO: 907562 - protein, 285 aa, Homo sapiens; identical to SEQ ID NO: 907560

SEQ ID NO: 907563 - protein, 108 aa, Homo sapiens [sequence omitted]

SEQ ID NO: 907564 - protein, 108 aa, Homo sapiens [sequence omitted]

SEQ ID NO: 907565 - protein, 200 aa, Homo sapiens
MGTPGEGLGRCSHALIRGVPESLASGEGAGAGLPALDLAKAQREHGVLGGKLRQRLGLQLLELPPEESLPLGPLLGDTAVIQGDTALITRPWSPARRPEVDGVRKALQDLGLRIVEIGDENATLDGTDVLFTGREFFVGLSKWTNHRGAEIVADTFRDFAVSTVPVSGPSHLRGLCGMGGPRTVVAGSSDAAQKAVRPPR

SEQ ID NO: 907566 - protein, 154 aa, Homo sapiens
MGTPGEGLGRCSHALIRGVPESLASGEGAGAGLPALDLAKAQREHGVLGGKLRQRLGLQLLELPPEESLPLGPLLGDTAVIQGDTALITRPWSPARRPEVDGVRKALQDLGLRIVEIGDENATLDGTDVLFTGREFFVGLSKWTNHRGGTAEAL

SEQ ID NO: 907567 - protein, 285 aa, Homo sapiens; identical to SEQ ID NO: 907560

SEQ ID NO: 907568 - protein, 285 aa, Homo sapiens; identical to SEQ ID NO: 907560

SEQ ID NO: 907569 - protein, 291 aa, Homo sapiens
MLCVDGMGTPGEGLGRCSHALIRGVPESLASGEGAGAGLPALDLAKAQREHGVLGGKLRQRLGLQLLELPPEESLPLGPLLGDTAVIQGDTALITRPWSPARRPEVDGVRKALQDLGLRIVEIGDENATLDGTDVLFTGREFFVGLSKWTNHRGAEIVADTFRDFAVSTVPVSGPSHLRGLCGMGGPRTVVAGSSDAAQKAVRAMAVLTDHPYASLTLPDDAAADCLFLRPGLPGVPPFLLHRGGGDLPNSQEALQKLSDVTLVPVSCSELEKAGAGLSSLCLVLSTRPHS

SEQ ID NO: 907570 - protein, 325 aa, Homo sapiens
MGTPGEGLGRCSHALIRGVPESLASGEGAGAGLPALDLAKAQREHGVLGGKLRQRLGLQLLELPPEESLPLGPLLGDTAVIQGDTALITRPWSPARRPEVDGVRKALQDLGLRIVEIGDENATLDGTDVLFTGEAGGRHRSWHREVEFGRLGRLEPCSNSLPPSNLRGLPDSGREFFVGLSKWTNHRGAEIVADTFRDFAVSTVPVSGPSHLRGLCGMGGPRTVVAGSSDAAQKAVRAMAVLTDHPYASLTLPDDAAADCLFLRPGLPGVPPFLLHRGGGDLPNSQEALQKLSDVTLVPVSCSELEKAGAGLSSLCLVLSTRPHS

SEQ ID NO: 907571 - protein, 136 aa, Homo sapiens [sequence omitted]

SEQ ID NO: 907572 - protein, 501 aa, Homo sapiens
MFTLPQKDFRAPTTCLGPTCMQDLGSSHGEDLEGECSRKLDQKLPELRGVGDPAMISSDTSYLSSRGRMIKWFWDSAEEGYRTYHMDEYDEDKNPSGIINLGTSENKLCFDLLSWRLSQRDMQRVEPSLLQYADWRGHLFLREEVAKFLSFYCKSPVPLRPENVVVLNGGASLFSALATVLCEAGEAFLIPTPYYGAITQHVCLYGNIRLAYVYLDSEVTGLDTRPFQLTVEKLEMALREAHSEGVKVKGLILISPQNPLGDVYSPEELQEYLVFAKRHRLHVIVDEVYMLSVFEKSVGYRSVLSLERLPDPQRTHVMWATSKDFGMSGLRFGTLYTENQDVATAVASLCRYHGLSGLVQYQMAQLLRDRDWINQVYLPENHARLKAAHTYVSEELRALGIPFLSRGAGFFIWVDLRKYLPKGTFEEEMLLWRRFLDNKVLLSFGKAFECKEPGWFRFVFSDQVHRLCLGMQRVQQVLAGKSQVAEDPRPSQSQEPSDQRR

SEQ ID NO: 907573 - protein, 501 aa, Homo sapiens; identical to SEQ ID NO: 907572

SEQ ID NO: 907574 - protein, 475 aa, Homo sapiens
MFTLPQKDFRAPTTCLGPTCMQDLGSSHGEDLEGECSRKLDQKLPELRGVGDPAMISSDTSYLSSRGRMIKWFWDSAEEGYRTYHMDEYDEDKNPSGIINLGTSENKLCFDLLSWRLSQRDMQRVEPSLLQYADWRGHLFLREEVAKFLSFYCKSPVPLRPENVVVLNGGASLFSALATVLCEAGEAFLIPTPYYGAITQHVCLYGNIRLAYVYLDSEVTGLDTRPFQLTVEKLEMALREAHSEGVKVKGLILISPQNPLGDVYSPEELQEYLVFAKRHRLHVIVDEVYMLSVFEKSVGYRSVLSLERLPDPQRTHVMWATSKDFGMSGLRFGTLYTENQDVATAVASLCRYHGLSGLVQYQMAQLLRDRDWINQVYLPENHARLKAAHTYVSEELRALGIPFLSRGAGFFIWVDLRKGCRGSSRCLQANPKWQKTPVPLRARSQVTNAGELVIVSWPEGPAATVDLGRSGAAED

SEQ ID NO: 907575 - protein, 557 aa, Homo sapiens
LHLWRFPFLPSLSSYPPSASEHHIISSYPLHHKTPRTPRQYSALTQEILTWHLVIEMFTLPQKDFRAPTTCLGPTCMQDLGSSHGEDLEGECSRKLDQKLPELRGVGDPAMISSDTSYLSSRGRMIKWFWDSAEEGYRTYHMDEYDEDKNPSGIINLGTSENKLCFDLLSWRLSQRDMQRVEPSLLQYADWRGHLFLREEVAKFLSFYCKSPVPLRPENVVVLNGGASLFSALATVLCEAGEAFLIPTPYYGAITQHVCLYGNIRLAYVYLDSEVTGLDTRPFQLTVEKLEMALREAHSEGVKVKGLILISPQNPLGDVYSPEELQEYLVFAKRHRLHVIVDEVYMLSVFEKSVGYRSVLSLERLPDPQRTHVMWATSKDFGMSGLRFGTLYTENQDVATAVASLCRYHGLSGLVQYQMAQLLRDRDWINQVYLPENHARLKAAHTYVSEELRALGIPFLSRGAGFFIWVDLRKYLPKGTFEEEMLLWRRFLDNKVLLSFGKAFECKEPGWFRFVFSDQVHRLCLGMQRVQQVLAGKSQVAEDPRPSQSQEPSDQRR

SEQ ID NO: 907576 - protein, 308 aa, Homo sapiens
MFTLPQKDFRAPTTCLGPTCMQDLGSSHGEDLEGECSRKLDQKLPELRGVGDPAMISSDTSYLSSRGRMIKWFWDSAEEGYRTYHMDEYDEDKNPSGIINLGTSENKLCFDLLSWRLSQRDMQRVEPSLLQYADWRGHLFLREEVAKFLSFYCKSPVPLRPENVVVLNGGASLFSALATVLCEAGEAFLIPTPYYGAITQHVCLYGNIRLAYVYLDSEVTGLDTRPFQLTVEKLEMALREAHSEGVKVKGLILISPQNPLGDVYSPEELQEYLVFAKRHRLHVIVDEVYMLSVFEKSVGYRSVLSLER

SEQ ID NO: 907577 - protein, 158 aa, Homo sapiens
MFTLPQKDFRAPTTCLGPTCMQDLGSSHGEDLEGECSRKLDQKLPELRGVGDPAMISSDTSYLSSRGRMIKWFWDSAEEGYRTYHMDEYDEDKNPSGIINLGTSENKLCFDLLSWRPPGGSGQVPVFLLQEPSTPQTRECGCPEWWCLALLCSGHGAV

SEQ ID NO: 907578 - protein, 67 aa, Homo sapiens
DIDLLASFTQTDWINQVYLPENHARLKAAHTYVSEELRALGIPFLSRGAGFFIWVDLRKVMLVEVRA

SEQ ID NO: 907579 - protein, 119 aa, Homo sapiens
HLLCMCGFLFEKNRRKNGVLGITSPPCGTHLPYTLSLSSPPLPHSRHRLHVIVDEVYMLSVFEKSVGYRSVLSLERLHDPQEDPCDVTTSMDSGCLKSVCTLDTRNTMCHLRALICRST

SEQ ID NO: 907580 - protein, 132 aa, Homo sapiens
MYWINQVYLPENHARLKAAHTYVSEELRALGIPFLSRGAGFFIWVDLRKYLPKGTFEEEMLLWRRFLDNKVLLSFGKAFECKEPGWFRFVFSDQVHRLCLGMQRVQQVLAGKSQVAEDPRPSQSQEPSDQRR

SEQ ID NO: 907581 - protein, 238 aa, Homo sapiens
MLSVFEKSVGYRSVLSLERLPDPQRTHVMWATSKDFGMSGLRFGTLYTENQDVATAVASLCRYHGLSGLVQYQMAQLLRDRDEENEDQILPQLTIVAKSFKNSDNIKYWINQVYLPENHARLKAAHTYVSEELRALGIPFLSRGAGFFIWVDLRKYLPKGTFEEEMLLWRRFLDNKVLLSFGKAFECKEPGWFRFVFSDQVHRLCLGMQRVQQVLAGKSQVAEDPRPSQSQEPSDQRR

SEQ ID NO: 907582 - protein, 430 aa, Homo sapiens
MFTLPQKDFRAPTTCLGPTCMQDLGSSHGEDLEGECSRKLDQKLPELRGVGDPAMISSDTSYLSSRGRMIKWFWDSAEEGYRTYHMDEYDEDKNPSGIINLGTSENKLCFDLLSWRLSQRDMQRVEPSLLQYADWRGHLFLREEVAKFLSFYCKSPVPLRPENVVVLNGGASLFSALATVLCEAGEAFLIPTPYYGAITQHVCLYGNIRLAYVYLDSEVTGLDTRPFQLTVEKLEMALREAHSEGVKVKGLILISPQNPLGDVYSPEELQEYLVFAKRHRLHVIVDEVYMLSVFEKSVGYRSVLSLERLPDPQRTHVMWATSKDFGMSGLRFGTLYTENQDVATAVASLCRYHGLSGLVQYQMAQLLRDRDWINQVYLPENHARLKAAHTYVSEELRALGIPFLSRGAGFFIWVDLRKIQRSSTMQHGTA

SEQ ID NO: 907583 - protein, 69 aa, Homo sapiens
KGLERDWGQWTEGLGCSGQKVTGPRPLLPPEAFLIPTPYYGAITQHVCLYGNIRLAYVYLDSEVRVLTS

SEQ ID NO: 907584 - protein, 932 aa, Homo sapiens
RSAALQRPRPGPARPRRRQFRLKKLIDQEIKSQEEKEQEKEKRVTTLKEELTKLKSFALMVVDEQQRLTAQLTLQRQKIQELTTNAKETHTKLALAEARVQEEEQKATRLEKELQTQTTKFHQDQDTIMAKLTNEDSQNRQLQQKLAALSRQIDELEETNRSLRKAEEELQDIKEKISKGEYGNAGIMAEVEELIKMEEQCRDLNKRLERETLQSKDFKLEVEKLSKRIMALEKLEDAFNKSKQECYSLKCNLEKERMTTKQLSQELESLKVRIKELEAIESRLEKTEFTLKEDLTKLKTLTVMFVDERKTMSEKLKKTEDKLQAASSQLQVEQNKVTTVTEKLIEETKRALKSKTDVEEKMYSVTKERDDLKNKLKAEEEKGNDLLSRVNMLKNRLQSLEAIEKDFLKNKLNQDSGKSTTALHQENNKIKELSQEVERLKLKLKDMKAIEDDLMKTEDEYETLERRYANERDKAQFLSKELEHVKMELAKYKLAEKTETSHEQWLFKRLQEEEAKSGHLSREVDALKEKIHEYMATEDLICHLQGDHSVLQKKLNQQENRNRDLGREIENLTKELERYRHFSKSLRPSLNGRRISDPQVFSKEVQTEAVDNEPPDYKSLIPLERAVINGQLYEESENQDEDPNDEGSVLSFKCSQSTPCPVNRKLWIPWMKSKEGHLQNGKMQTKPNANFVQPGDLVLSHTPGQPLHIKVTPDHVQNTATLEITSPTTESPHSYTSTAVIPNCGTPKQRITILQNASITPVKSKTSTEDLMNLEQGMSPITMATFARAQTPESCGSLTPERTMSPIQVLAVTGSASSPEQGRSPEPTEISAKHAIFRVSPDRQSSWQFQRSNSNSSSVITTEDNKIHIHLGSPYMQAVASPSAPLQDNRTQGLINGALNKTTNKVTSSITITPTATPLPRQSQITVSNIYN

SEQ ID NO: 907585 - protein, 121 aa, Homo sapiens
IRAPISSGPNNEHSAKHAIFRVSPDRQSSWQFQRSNSNSSSVITTEDNKIHIHLGSPYMQAVASPVRPASPSAPLQDNRTQGLINGALNKTTNKVTSSITITPTATPLPRQSQITVSNIYN

SEQ ID NO: 907586 - protein, 938 aa, Homo sapiens
AARHYSGPGPAPARPRRRQFRLKKLIDQEIKSQEEKEQEKEKRVTTLKEELTKLKSFALMVVDEQQRLTAQLTLQRQKIQELTTNAKETHTKLALAEARVQEEEQKATRLEKELQTQTTKFHQDQDTIMAKLTNEDSQNRQLQQKLAALSRQIDELEETNRSLRKAEEELQDIKEKISKGEYGNAGIMAEVEELRKRVLDMEGKDEELIKMEEQCRDLNKRLERETLQSKDFKLEVEKLSKRIMALEKLEDAFNKSKQECYSLKCNLEKERMTTKQLSQELESLKVRIKELEAIESRLEKTEFTLKEDLTKLKTLTVMFVDERKTMSEKLKKTEDKLQAASSQLQVEQNKVTTVTEKLIEETKRALKSKTDVEEKMYSVTKERDDLKNKLKAEEEKGNDLLSRVNMLKNRLQSLEAIEKDFLKNKLNQDSGKSTTALHQENNKIKELSQEVERLKLKLKDMKAIEDDLMKTEDEYETLERRYANERDKAQFLSKELEHVKMELAKYKLAEKTETSHEQWLFKRLQEEEAKSGHLSREVDALKEKIHEYMATEDLICHLQGDHSVLQKKLNQQENRNRDLGREIENLTKELERYRHFSKSLRPSLNGRRISDPQVFSKEVQTEAVDNEPPDYKSLIPLERAVINGQLYEESENQDEDPNDEGSVLSFKCSQSTPCPVNRKLWIPWMKSKEGHLQNGKMQTKPNANFVQPGDLVLSHTPGQPLHIKVTPDHVQNTATLEITSPTTESPHSYTSTAVIPNCGTPKQRITILQNASITPVKSKTSTEDLMNLEQGMSPITMATFARAQTPESCGSLTPERTMSPIQVLAVTGSASSPEQGRSPEPTEISAKHAIFRVSPDRQSSWQFQRSNSNSSSVITTEDNKIHIHLGSPYMQAVASPVRPASPSAPLQDNRTQGSWTMTEAYNALSKARDRTHIRNGYY

SEQ ID NO: 907587 - protein, 932 aa, Homo sapiens; identical to SEQ ID NO: 907584

SEQ ID NO: 907588 - protein, 952 aa, Homo sapiens
AARHYSGPGPAPARPRRRQFRLKKLIDQEIKSQEEKEQEKEKRVTTLKEELTKLKSFALMVVDEQQRLTAQLTLQRQKIQELTTNAKETHTKLALAEARVQEEEQKATRLEKELQTQTTKFHQDQDTIMAKLTNEDSQNRQLQQKLAALSRQIDELEETNRSLRKAEEELQDIKEKISKGEYGNAGIMAEVEELRKRVLDMEGKDEELIKMEEQCRDLNKRLERETLQSKDFKLEVEKLSKRIMALEKLEDAFNKSKQECYSLKCNLEKERMTTKQLSQELESLKVRIKELEAIESRLEKTEFTLKEDLTKLKTLTVMFVDERKTMSEKLKKTEDKLQAASSQLQVEQNKVTTVTEKLIEETKRALKSKTDVEEKMYSVTKERDDLKNKLKAEEEKGNDLLSRVNMLKNRLQSLEAIEKDFLKNKLNQDSGKSTTALHQENNKIKELSQEVERLKLKLKDMKAIEDDLMKTEDEYETLERRYANERDKAQFLSKELEHVKMELAKYKLAEKTETSHEQWLFKRLQEEEAKSGHLSREVDALKEKIHEYMATEDLICHLQGDHSVLQKKLNQQENRNRDLGREIENLTKELERYRHFSKSLRPSLNGRRISDPQVFSKEVQTEAVDNEPPDYKSLIPLERAVINGQLYEESENQDEDPNDEGSVLSFKCSQSTPCPVNRKLWIPWMKSKEGHLQNGKMQTKPNANFVQPGDLVLSHTPGQPLHIKVTPDHVQNTATLEITSPTTESPHSYTSTAVIPNCGTPKQRITILQNASITPVKSKTSTEDLMNLEQGMSPITMATFARAQTPESCGSLTPERTMSPIQVLAVTGSASSPEQGRSPEPTEISAKHAIFRVSPDRQSSWQFQRSNSNSSSVITTEDNKIHIHLGSPYMQAVASPVRPASPSAPLQDNRTQGLINGALNKTTNKVTSSITITPTATPLPRQSQITVSNIYN

SEQ ID NO: 907589 - protein, 327 aa, Homo sapiens
AARHYSGPGPAPARPRRRQFRLKKLIDQEIKSQEEKEQEKEKRVTTLKEELTKLKSFALMVVDEQQRLTAQLTLQRQKIQELTTNAKETHTKLALAEARVQEEEQKATRLEKELQTQTTKFHQDQDTIMAKLTNEDSQNRQLQQKLAALSRQIDELEETNRSLRKAEEELQDIKEKISKGEYGNAGIMAEVEELRKRVLDMEGKDEELIKMEEQCRDLNKRLERETLQSKDFKLEVEKLSKRIMALEKLEDAFNKSKQECYSLKCNLEKERMTTKQLSQELESLKVRIKELEAIESRLEKTEFTLKEDLTKLKTLTVMFVDELYKSI

SEQ ID NO: 907590 - protein, 329 aa, Homo sapiens
MVRTKTWTLKKHFVGYPTNSDFELKTSELPPLKNGEVLLEALFLTVDPYMRVAAKRLKEGDTMMGQQVAKVVESKNVALPKGTIVLASPGWTTHSISDGKDLEKLLTEWPDTIPLSLALGTVGMPGLTAYFGLLEICGVKGGETVMVNAAAGAVGSVVGQIAKLKGCKVVGAVGSDEKVAYLQKLGFDVVFNYKTVESLEETLKKASPDGYDCYFDNVGGEFSNTVIGQMKKFGRIAICGAISTYNRTGPLPPGPPPEIVIYQELRMEAFVVYRWQGDARQKALKDLLKWVLEGKIQYKEYIIEGFENMPAAFMGMLKGDNLGKTIVKA

SEQ ID NO: 907591 - protein, 293 aa, Homo sapiens
MVRTKTWTLKKHFVGYPTNSDFELKTSELPPLKNGEVLLEALFLTVDPYMRVAAKRLKEGDTMMGQQVAKVVESKNVALPKGTIVLASPGWTTHSISDGKDLEKLLTEWPDTIPLSLALGTVGMPGLTAYFGLLEICGVKGGETVMVNAAAGAVGSVVGQIAKLKGCKVVGAVGSDEKVAYLQKLGFDVVFNYKTVESLEETLKKASPDGYDCYFDNVGGEFSNTVIGQMKKFGRIAICGAISTYNRTGPLPPGPPPEIVIYQELRMEAFVVYRWQGDARQKALKDLLKWVLE

SEQ ID NO: 907592 - protein, 274 aa, Homo sapiens
MVRTKTWTLKKHFVGYPTNSDFELKTSELPPLKNGEVLLEALFLTVDPYMRVVESKNVALPKGTIVLASPGWTTHSISDGKDLEKLLTEWPDTIPLSLALGTVGMPGLTAYFGLLEICGVKGGETVMVNAAAGAVGSVVGQIAKLKGCKVVGAVGSDEKVAYLQKLGFDVVFNYKTVESLEETLKKASPDGYDCYFDNVGGEFSNTVIGQMKKFGRIAICGAISTYNRTGPLPPGPPPEIVIYQELRMEAFVVYRWQGDARQKALKDLLKWVLE

SEQ ID NO: 907593 - protein, 170 aa, Homo sapiens
MPGLTAYFGLLEICGVKGGETVMVNAAAGAVGSVVGQIAKLKGCKVVGAVGSDEKVAYLQKLGFDVVFNYKTVESLEETLKKASPDGYDCYFDNVGGEFSNTVIGQMKKFGRIAICGAISTYNRTGPLPPGPPPEIVIYQELRMEAFVVYRWQGDARQKALKDLLKWVLE

SEQ ID NO: 907594 - protein, 68 aa, Homo sapiens
ILTVCPIRSIPLLNIVKIYFSPPPEIVIYQELRMEAFVVYRWQGDARQKALKDLLKWVLEQLPYFVID

SEQ ID NO: 907595 - protein, 329 aa, Homo sapiens; identical to SEQ ID NO: 907590

SEQ ID NO: 907596 - protein, 170 aa, Homo sapiens; identical to SEQ ID NO: 907593

SEQ ID NO: 907597 - protein, 148 aa, Homo sapiens
MVNAAAGAVGSVVGQIAKLKGCKVVGAVGSDEKVAYLQKLGFDVVFNYKTVESLEETLKKASPDGYDCYFDNVGGEFSNTVIGQMKKFGRIAICGAISTYNRTGPLPPGPPPEIVIYQELRMEAFVVYRWQGDARQKALKDLLKWVLE

SEQ ID NO: 907598 - protein, 493 aa, Homo sapiens
MNRTKGDEEEYWNSSKFKAFTFDDEDDELSQLKESKRAVNSLRDFVDDDDDDDLERVSWSGEPVGSISWSIRETAGNSGSTHEGREQLKSRNSFSSYAQLPKPTSTYSLSSFFRGRTRPGSFQSLSDALSDTPAKSYAPELGRPKGEYRDYSNDWSPSDTVRRLRKGKVCSLERFRSLQDKLQLLEEAVSMHDGNVITAVLIFLKRTLSKEILFRELEVRQVALRHLIHFLKEIGDQKLLLDLFRFLDRTEELALSHYREHLNIQDPDKRKEFLKTCVGLPFSAEDSAHIQDHYTLLERQIIIEANDRHLESAGQTEIFRKHPRKASILNMPLVTTLFYSCFYHYTEAEGTFSSPVNLKKTFKIPDKQYVLTALAARAKLRAWNDVDALFTTKNWLGYTKKRAPIGFHRVVEILHKNNAPVQILQEYVNLVEDVDTKLNLATKFKCHDVVIDTYRDLKDRQQLLAYRSKVDKGSAEEEKIDALLSSSQIRWKN

SEQ ID NO: 907599 - protein, 493 aa, Homo sapiens; identical to SEQ ID NO: 907598

SEQ ID NO: 907600 - protein, 493 aa, Homo sapiens; identical to SEQ ID NO: 907598

SEQ ID NO: 907601 - protein, 493 aa, Homo sapiens; identical to SEQ ID NO: 907598

SEQ ID NO: 907602 - protein, 273 aa, Homo sapiens [sequence omitted]

SEQ ID NO: 907603 - protein, 133 aa, Homo sapiens
NVTQDTATHMTAKTMTAHPSSLPPKWLRRTAFVVDEVSNIVKEAIESAIGGNAYQHSKVNQWTTNVVEQTLSQLTKLGKPFKYIVTCVIMQKNGAGLHTASSCFWDSSTDGSCTVRWENKTMYCIVSAFGLSI

SEQ ID NO: 907604 - protein, 129 aa, Homo sapiens
RSPRHSGSRRRRAGGKMEDYQAAEETAFVVDEVSNIVKEAIESAIGGNAYQHSKVNQWTTNVVEQTLSQLTKLGKPFKYIVTCVIMQKNGAGLHTASSCFWDSSTDGSCTVRWENKTMYCIVSAFGLSI

SEQ ID NO: 907605 - protein, 108 aa, Homo sapiens
RSPRHSGSRRRRAGGKMEDYQAAEETAFVVDEVSNIVKEAIESAIGGNAYQHSKVNQWTTNVVEQTLSQLTKLGKPFKYIGNGVLFLLYLRDGFLTLIRGASSTRNNS

SEQ ID NO: 907606 - protein, 129 aa, Homo sapiens; identical to SEQ ID NO: 907604

SEQ ID NO: 907607 - protein, 129 aa, Homo sapiens; identical to SEQ ID NO: 907604

SEQ ID NO: 907608 - protein, 108 aa, Homo sapiens; identical to SEQ ID NO: 907605

SEQ ID NO: 907609 - protein, 129 aa, Homo sapiens; identical to SEQ ID NO: 907604

SEQ ID NO: 907610 - protein, 115 aa, Homo sapiens
RSPRHSGSRRRRAGGKMEDYQAAEEAIESAIGGNAYQHSKVNQWTTNVVEQTLSQLTKLGKPFKYIVTCVIMQKNGAGLHTASSCFWDSSTDGSCTVRWENKTMYCIVSAFGLSI

SEQ ID NO: 907611 - protein, 111 aa, Homo sapiens
RSPRHSGSRRRRAGGKMEDYQAAEETAFVVDEVSNIVKEAIESAIGGNAYQHSKVNQWTTNVVEQTLSQLTKLGLHTASSCFWDSSTDGSCTVRWENKTMYCIVSAFGLSI

SEQ ID NO: 907612 - protein, 156 aa, Homo sapiens
NVTQDTATHMTAKTMTAHPSSLPPKWLRRTAFVVDEVSNIVKEAIESAIGGNAYQHSKVNQWTTNVVEQTLSQLTKLGKPFKYIVTCVIMQKNGAGLHTASSCFWDSSTDGMIFIHVCEVLLCEIYDWKFPIFECNACLSPFKTFNNRLAKVLCVA

SEQ ID NO: 907613 - protein, 129 aa, Homo sapiens; identical to SEQ ID NO: 907604

SEQ ID NO: 907614 - protein, 132 aa, Homo sapiens
SACITREGARGAGSCRTCGEPSRRRSTRALSRDPRDHVTPGRGAAHVTSAAGRGVFFVPASQWPGLLRLVTPLAGTFLNIKMGVIFIFFCKVIFGLLLTFGVILFCAVYNVRSVRSPDVLPWLGDCTRDQLT

SEQ ID NO: 907615 - protein, 417 aa, Homo sapiens
MAAPGSARRPLLLLLLLLLLGLMHCASAAMFMVKNGNGTACIMANFSAAFSVNYDTKSGPKNMTFDLPSDATVVLNRSSCGKENTSDPSLVIAFGRGHTLTLNFTRNATRYSVQLMSFVYNLSDTHLFPNASSKEIKTVESITDIRADIDKKYRCVSGTQVHMNNVTVTLHDATIQAYLSNSSFSRGETRCEQDRPSPTTAPPAPPSPSPSPVPKSPSVDKYNVSGTNGTCLLASMGLQLNLTYERKDNTTVTRLLNINPNKTSASGSCGAHLVTLELHSEGTTVLLFQFGMNASSSRFFLQGIQLNTILPDARDPAFKAANGSLRALQATVGNSYKCNAEEHVRVTKAFSVNIFKVWVQAFKVEGGQFGSVEECLLDENSMLIPIAVGGALAGLVLIVLIAYLVGRKRSHAGYQTI

SEQ ID NO: 907616 - protein, 393 aa, Homo sapiens
AGAAGGPPWREAAGYACIMANFSAAFSVNYDTKSGPKNMTFDLPSDATVVLNRSSCGKENTSDPSLVIAFGRGHTLTLNFTRNATRYSVQLMSFVYNLSDTHLFPNASSKEIKTVESITDIRADIDKKYRCVSGTQVHMNNVTVTLHDATIQAYLSNSSFSRGETRCEQDRPSPTTAPPAPPSPSPSPVPKSPSVDKYNVSGTNGTCLLASMGLQLNLTYERKDNTTVTRLLNINPNKTSASGSCGAHLVTLELHSEGTTVLLFQFGMNASSSRFFLQGIQLNTILPDARDPAFKAANGSLRALQATVGNSYKCNAEEHVRVTKAFSVNIFKVWVQAFKVEGGQFGSVEECLLDENSMLIPIAVGGALAGLVLIVLIAYLVGRKRSHAGYQTI

SEQ ID NO: 907617 - protein, 252 aa, Homo sapiens
DHNYSRVVRIFPTGVDEGEGETRGEDERPCPIRMKAPPAPPSPSPSPVPKSPSVDKYNVSGTNGTCLLASMGLQLNLTYERKDNTTVTRLLNINPNKTSASGSCGAHLVTLELHSEGTTVLLFQFGMNASSSRFFLQGIQLNTILPDARDPAFKAANGSLRALQATVGNSYKCNAEEHVRVTKAFSVNIFKVWVQAFKVEGGQFGSVEECLLDENSMLIPIAVGGALAGLVLIVLIAYLVGRKRSHAGYQTI

SEQ ID NO: 907618 - protein, 417 aa, Homo sapiens; identical to SEQ ID NO: 907615

SEQ ID NO: 907619 - protein, 186 aa, Homo sapiens
MACITLSNSLNDEPTVEAGVTVDAHLMVISGCMHQRMGHLARIPCVLSMILAIVDCHMFLSTFCSYEGMSRLKYLILFHEAQDDPAFKAANGSLRALQATVGNSYKCNAEEHVRVTKAFSVNIFKVWVQAFKVEGGQFGSVEECLLDENSMLIPIAVGGALAGLVLIVLIAYLVGRKRSHAGYQTI

SEQ ID NO: 907620 - protein, 83 aa, Homo sapiens
TCFRLRLWTFSRFRVGWGDAPVPLQGAVSSCRSEILEVEECLLDENSMLIPIAVGGALAGLVLIVLIAYLVGRKRSHAGYQTI

SEQ ID NO: 907621 - protein, 417 aa, Homo sapiens; identical to SEQ ID NO: 907615

SEQ ID NO: 907622 - protein, 417 aa, Homo sapiens; identical to SEQ ID NO: 907615

SEQ ID NO: 907623 - protein, 417 aa, Homo sapiens; identical to SEQ ID NO: 907615

SEQ ID NO: 907624 - protein, 417 aa, Homo sapiens; identical to SEQ ID NO: 907615

SEQ ID NO: 907625 - protein, 417 aa, Homo sapiens; identical to SEQ ID NO: 907615

SEQ ID NO: 907626 - protein, 417 aa, Homo sapiens; identical to SEQ ID NO: 907615

SEQ ID NO: 907627 - protein, 417 aa, Homo sapiens; identical to SEQ ID NO: 907615

SEQ ID NO: 907628 - protein, 393 aa, Homo sapiens
MAAPGSARRPLLLLLLLLLLGLMHCASAAMFMVKNGNGTACIMANFSAAFSVNYDTKSGPKNMTFDLPSDATVVLNRSSCGKENTSDPSLVIAFGRGHTLTLNFTRNATRYSVQLMSFVYNLSDTHLFPNASSKEIKTVESITDIRADIDKKYRCVSGTQVHMNNVTVTLHDATIQAYLSNSSFSRGETRCEQDRPSPTTAPPAPPSPSPSPVPKSPSVDKYNVSGTNGTCLLASMGLQLNLTYERKDNTTVTRLLNINPNKTSASGSCGAHLVTLELHSEGTTVLLFQFGMNASSSRFFLQGIQLNTILPDARDPAFKAANGSLRALQATVGNSYKCNAEEHVRVTKAFSVNIFKVWVQAFKVEGGQFGSVEECLLTRQIQIPCRRDPQSHL

SEQ ID NO: 907629 - protein, 168 aa, Homo sapiens
SACITREGARGAGSCRTCGEPSRRRSTRALSRDPRDHVTPGRGAAHVTSAAGRGVFFVPASQWPGLLRLVTPLSLTPALGARAPPPQRPAVRGPTAARAPALRTVPGRLAPWRPPAAPGDPCCCYCCCCCSVSCIVRQQQCVMAMNYDTKSGPKNMNFDLSLDATGCS

SEQ ID NO: 907630 - protein, 133 aa, Homo sapiens
PGGAAVLVVLLLLLLLLGLMHCASAAMFMVKNGNGTACIMANFSAAFSVNYDTKSGPKNMTFDLPSDATVVLNRSSCGKENTSDPSLVIAFGRGHTLTLNFTRNATRYSTSTNSLSTSTNSLSTSTIAPARIP

SEQ ID NO: 907631 - protein, 414 aa, Homo sapiens
PGGAAVLVVLLLLLLLLGLMHCASAAMFMVKNGNGTACIMANFSAAFSVNYDTKSGPKNMTFDLPSDATVVLNRSSCGKENTSDPSLVIAFGRGHTLTLNFTRNATRYSVQLMSFVYNLSDTHLFPNASSKEIKTVESITDIRADIDKKYRCVSGTQVHMNNVTVTLHDATIQAYLSNSSFSRGETRCEQDRPSPTTAPPAPPSPSPSPVPKSPSVDKYNVSGTNGTCLLASMGLQLNLTYERKDNTTVTRLLNINPNKTSASGSCGAHLVTLELHSEGTTVLLFQFGMNASSSRFFLQGIQLNTILPDARDPAFKAANGSLRALQATVGNSYKCNAEEHVRVTKAFSVNIFKVWVQAFKVEGGQFGSVEECLLDENSMLIPIAVGGALAGLVLIVLIAYLVGRKRSHAGYQTI

SEQ ID NO: 907632 - protein, 222 aa, Homo sapiens
MQLDAEVIKDPLAKTSPVPKSPSVDKYNVSGTNGTCLLASMGLQLNLTYERKDNTTVTRLLNINPNKTSASGSCGAHLVTLELHSEGTTVLLFQFGMNASSSRFFLQGIQLNTILPDARDPAFKAANGSLRALQATVGNSYKCNAEEHVRVTKAFSVNIFKVWVQAFKVEGGQFGSVEECLLDENSMLIPIAVGGALAGLVLIVLIAYLVGRKRSHAGYQTI

SEQ ID NO: 907633 - protein, 244 aa, Homo sapiens
MAAPGSARRPLLLLLLLLLLGLMHCASAAMFMVKNGNGTACIMANFSAAFSVNYDTKSGPKNMTFDLPSDATVVLNRSSCGKENTSDPSLVIAFGRGHTLTLNFTRNATRYSVQLMSFVYNLSDTHLFPNASSKEIKTVESITDIRADIDKKYRCVSGTQVHMNNVTVTLHDATIQAYLSNSSFSRGETRCEQDRPSPTTAPPAPPSPSPSPVPKSPSVDKYNVSGTNGTCLLASMGLQLNLWA

SEQ ID NO: 907634 - protein, 417 aa, Homo sapiens; identical to SEQ ID NO: 907615

SEQ ID NO: 907635 - protein, 417 aa, Homo sapiens; identical to SEQ ID NO: 907615

SEQ ID NO: 907636 - protein, 417 aa, Homo sapiens; identical to SEQ ID NO: 907615

SEQ ID NO: 907637 - protein, 417 aa, Homo sapiens; identical to SEQ ID NO: 907615

SEQ ID NO: 907638 - protein, 417 aa, Homo sapiens; identical to SEQ ID NO: 907615

SEQ ID NO: 907639 - protein, 417 aa, Homo sapiens; identical to SEQ ID NO: 907615

SEQ ID NO: 907640 - protein, 257 aa, Homo sapiens
MAAPGSARRPLLLLLLLLLLGLMHCASAAMFMVKNGNGTACIMANFSAAFSVNYDTKSGPKNMTFDLPSDATVVLNRSSCGKENTSDPSLVIAFGRGHTLTLNFTRNATRYSVQLMSFVYNLSDTHLFPNASSKEIKTVESITDIRADIDKKYRCVSGTQVHMNNVTVTLHDATIQAYLSNSSFSRGETRCEQDRPSPTTAPPAPPSPSPSPVPKSPSVDKYNVSGTNGTCLLASMGLQLNLTYERKDNTVGLGPHL

SEQ ID NO: 907641 - protein, 74 aa, Homo sapiens
MWGSGGERGLFAGPCVSRALTPSVCLGSGGVSAGREQHADPHRCGWCPGGAGPHRPHRLPRRQEEESRRLPDYL

SEQ ID NO: 907642 - protein, 431 aa, Homo sapiens
MYRTKVGLKDRQQLYKLIISQLLYDGYISIANGLINEIKPQSVCAPSEQLLHLIKLGMENDDTAVQYAIGRSDTVAPGTGIDLEFDADVQTMSPEASEYETCYVTSHKGPCRVATYSRDGQLIATGSADASIKILDTERMLAKSAMPIEVMMNETAQQNMENHPVIRTLYDHVDEVTCLAFHPTEQILASGSRDYTLKLFDYSKPSAKRAFKYIQEAEMLRSISFHPSGDFILVGTQHPTLRLYDINTFQCFVSCNPQDQHTDAICSVNYNSSANMYVTGSKDGCIKLWDGVSNRCITTFEKAHDGAEVCSAIFSKNSKYILSSGKDSVAKLWEISTGRTLVRYTGAGLSGRQVHRTQAVFNHTEDYVLLPDERTISLCCWDSRTAERRNLLSLGHNNIVRCIVHSPTNPGFMTCSDDFRARFWYRRSTTD

SEQ ID NO: 907643 - protein, 431 aa, Homo sapiens; identical to SEQ ID NO: 907642

SEQ ID NO: 907644 - protein, 431 aa, Homo sapiens; identical to SEQ ID NO: 907642

SEQ ID NO: 907645 - protein, 431 aa, Homo sapiens; identical to SEQ ID NO: 907642

SEQ ID NO: 907646 - protein, 431 aa, Homo sapiens; identical to SEQ ID NO: 907642

SEQ ID NO: 907647 - protein, 431 aa, Homo sapiens; identical to SEQ ID NO: 907642

SEQ ID NO: 907648 - protein, 431 aa, Homo sapiens; identical to SEQ ID NO: 907642

SEQ ID NO: 907649 - protein, 431 aa, Homo sapiens; identical to SEQ ID NO: 907642

SEQ ID NO: 907650 - protein, 292 aa, Homo sapiens [sequence omitted]

SEQ ID NO: 907651 - protein, 302 aa, Homo sapiens
MGTRVNLVNPVSGSEAGWREVMMNETAQQNMENHPVIRTLYDHVDEVTCLAFHPTEQILASGSRDYTLKLFDYSKPSAKRAFKYIQEAEMLRSISFHPSGDFILVGTQHPTLRLYDINTFQCFVSCNPQDQHTDAICSVNYNSSANMYVTGSKDGCIKLWDGVSNRCITTFEKAHDGAEVCSAIFSKNSKYILSSGKDSVAKLWEISTGRTLVRYTGAGLSGRQVHRTQAVFNHTEDYVLLPDERTISLCCWDSRTAERRNLLSLGHNNIVRCIVHSPTNPGFMTCSDDFRARFWYRRSTTD

SEQ ID NO: 907652 - protein, 261 aa, Homo sapiens
MRPHNKIWLAFHPTEQILASGSRDYTLKLFDYSKPSAKRAFKYIQEAEMLRSISFHPSGDFILVGTQHPTLRLYDINTFQCFVSCNPQDQHTDAICSVNYNSSANMYVTGSKDGCIKLWDGVSNRCITTFEKAHDGAEVCSAIFSKNSKYILSSGKDSVAKLWEISTGRTLVRYTGAGLSGRQVHRTQAVFNHTEDYVLLPDERTISLCCWDSRTAERRNLLSLGHNNIVRCIVHSPTNPGFMTCSDDFRARFWYRRSTTD

SEQ ID NO: 907653 - protein, 431 aa, Homo sapiens; identical to SEQ ID NO: 907642

SEQ ID NO: 907654 - protein, 421 aa, Homo sapiens
MYRTKVGLKDRQQLYKLIISQLLYDGYISIANGLINEIKPQSVCAPSEQLLHLIKLGMENDDTAVQYAIGRSDTVAPGTGIDLEFDADVQTMSPEASEYETCYVTSHKGPCRVATYSRDGQLIATGSADASIKILDTERMLAKSAMPIEVMMNETAQQNMENHPVIRTLYDHVDEVTCLAFHPTEQILASGSRDYTLKLFDYSKPSAKRAFKYIQHPSGDFILVGTQHPTLRLYDINTFQCFVSCNPQDQHTDAICSVNYNSSANMYVTGSKDGCIKLWDGVSNRCITTFEKAHDGAEVCSAIFSKNSKYILSSGKDSVAKLWEISTGRTLVRYTGAGLSGRQVHRTQAVFNHTEDYVLLPDERTISLCCWDSRTAERRNLLSLGHNNIVRCIVHSPTNPGFMTCSDDFRARFWYRRSTTD

SEQ ID NO: 907655 - protein, 431 aa, Homo sapiens; identical to SEQ ID NO: 907642

SEQ ID NO: 907656 - protein, 431 aa, Homo sapiens; identical to SEQ ID NO: 907642

SEQ ID NO: 907657 - protein, 179 aa, Homo sapiens
MYRTKVGLKDRQQLYKLIISQLLYDGYISIANGLINEIKPQSVCAPSEQLLHLIKLGMENDDTAVQYAIGRSDTVAPGTGIDLEFDADVQTMSPEASEYETCYVTSHKGPCRVATYSRDGQLIATGSADASIKILDTERMLAKSAMPIEVMMNETAQQNMACFPPNRTDPGFWFKGLYS

SEQ ID NO: 907658 - protein, 444 aa, Homo sapiens
MYRTKVGLKDRQQLYKLIISQLLYDGYISIANGLINEIKPQSVCAPSEQLLHLIKLGEIVNTNPYVPWQGMENDDTAVQYAIGRSDTVAPGTGIDLEFDADVQTMSPEASEYETCYVTSHKGPCRVATYSRDGQLIATGSADASIKILDTERMLAKSAMPIEVMMNETAQQNMENHPVIRTLYDHVDEVTCLAFHPTEQILASGSRDYTLKLFDYSKPSAKRAFKYIQEAEMLRSISFHPSGDFILVGTQHPTLRLYDINTFQCFVSCNPQDQHTDAICSVNYNSSANMYVTGSKDGCIKLWDGVSNRCITTFEKAHDGAEVCSAIFSKNSKYILSSGKDSVAKLWEISTGRTLVRYTGAGLSGRQVHRTQAVFNHTEDYVLLPDERTISLCCWDSRTAERRNLLSLGHNNIVRCIVHSPTNPGFMTCSDDFRARFWYRRSTTD

SEQ ID NO: 907659 - protein, 388 aa, Homo sapiens
MTATSASPMASSMKSSLSLCVHPRSSSCISSNSPGTGIDLEFDADVQTMSPEASEYETCYVTSHKGPCRVATYSRDGQLIATGSADASIKILDTERMLAKSAMPIEVMMNETAQQNMENHPVIRTLYDHVDEVTCLAFHPTEQILASGSRDYTLKLFDYSKPSAKRAFKYIQEAEMLRSISFHPSGDFILVGTQHPTLRLYDINTFQCFVSCNPQDQHTDAICSVNYNSSANMYVTGSKDGCIKLWDGVSNRCITTFEKAHDGAEVCSAIFSKNSKYILSSGKDSVAKLWEISTGRTLVRYTGAGLSGRQVHRTQAVFNHTEDYVLLPDERTISLCCWDSRTAERRNLLSLGHNNIVRCIVHSPTNPGFMTCSDDFRARFWYRRSTTD

SEQ ID NO: 907660 - protein, 66 aa, Homo sapiens
RARYRLIVYWRGALGGLGRLFVRPFGGSLGHNNIVRCIVHSPTNPGFMTCSDDFRARFWYRRSTTD

SEQ ID NO: 907661 - protein, 1274 aa, Homo sapiens
MGHLTLEDYQIWSVKNVLANEFLNLLFQVCHIVLGLRPATPEEEGQIIRGWLERESRYGLQAGHNWFIISMQWWQQWKEYVKYDANPVVIEPSSVLNGGKYSFGTAAHPMEQVEDRIGSSLSYVNTTEEKFSDNISTASEASETAGSGFLYSATPGADVCFARQHNTSDNNNQCLLGANGNILLHLNPQKPGAIDNQPLVTQEPVKATSLTLEGGRLKRTPQLIHGRDYEMVPEPVWRALYHWYGANLALPRPVIKNSKTDIPELELFPRYLLFLRQQPATRTQQSNIWVNMGNVPSPNAPLKRVLAYTGCFSRMQTIKEIHEYLSQRLRIKEEDMRLWLYNSENYLTLLDDEDHKLEYLKIQDEQHLVIEVRNKDMSWPEEMSFIANSSKIDRHKVPTEKGATGLSNLGNTCFMNSSIQCVSNTQPLTQYFISGRHLYELNRTNPIGMKGHMAKCYGDLVQELWSGTQKNVAPLKLRWTIAKYAPRFNGFQQQDSQELLAFLLDGLHEDLNRVHEKPYVELKDSDGRPDWEVAAEAWDNHLRRNRSIVVDLFHGQLRSQVKCKTCGHISVRFDPFNFLSLPLPMDSYMHLEITVIKLDGTTPVRYGLRLNMDEKYTGLKKQLSDLCGLNSEQILLAEVHGSNIKNFPQDNQKVRLSVSGFLCAFEIPVPVSPISASSPTQTDFSSSPSTNEMFTLTTNGDLPRPIFIPNGMPNTVVPCGTEKNFTNGMVNGHMPSLPDSPFTGYIIAVHRKMMRTELYFLSSQKNRPSLFGMPLIVPCTVHTRKKDLYDAVWIQVSRLASPLPPQEASNHAQDCDDSMGYQYPFTLRVVQKDGNSCAWCPWYRFCRGCKIDCGEDRAFIGNAYIAVDWDPTALHLRYQTSQERVVDEHESVEQSRRAQAEPINLDSCLRAFTSEEELGENEMYYCSKCKTHCLATKKLDLWRLPPILIIHLKRFQFVNGRWIKSQKIVKFPRESFDPSAFLVPRDPALCQHKPLTPQGDELSEPRILAREVKKVDAQSSAGEEDVLLSKSPSSLSANIISSPKGSPSSSRKSGTSCPSSKNSSPNSSPRTLGRSKGRLRLPQIGSKNKLSSSKENLDASKENGAGQICELADALSRGHVLGGSQPELVTPQDHEVALANGFLYEHEACGNGYSNGQLGNHSEEDSTDDQREDTRIKPIYNLYAISCHSGILGGGHYVTYAKNPNCKWYCYNDSSCKELHPDEIDTDSAYILFYEQQGIDYAQFLPKTDGKKMADTSSMDEDFESDYKKYCVLQ

SEQ ID NO: 907662 - protein, 1308 aa, Homo sapiens
MGAKESRIGFLSYEEALRRVTDVELKRLKDAFKRTCGLSYYMGQHCFIREVLGDGVPPKVAEVCHIVLGLRPATPEEEGQIIRGWLERESRYGLQAGHNWFIISMQWWQQWKEYVKYDANPVVIEPSSVLNGGKYSFGTAAHPMEQVEDRIGSSLSYVNTTEEKFSDNISTASEASETAGSGFLYSATPGADVCFARQHNTSDNNNQCLLGANGNILLHLNPQKPGAIDNQPLVTQEPVKATSLTLEGGRLKRTPQLIHGRDYEMVPEPVWRALYHWYGANLALPRPVIKNSKTDIPELELFPRYLLFLRQQPATRTQQSNIWVNMGNVPSPNAPLKRVLAYTGCFSRMQTIKEIHEYLSQRLRIKEEDMRLWLYNSENYLTLLDDEDHKLEYLKIQDEQHLVIEVRNKDMSWPEEMSFIANSSKIDRHKVPTEKGATGLSNLGNTCFMNSSIQCVSNTQPLTQYFISGRHLYELNRTNPIGMKGHMAKCYGDLVQELWSGTQKNVAPLKLRWTIAKYAPRFNGFQQQDSQELLAFLLDGLHEDLNRVHEKPYVELKDSDGRPDWEVAAEAWDNHLRRNRSIVVDLFHGQLRSQVKCKTCGHISVRFDPFNFLSLPLPMDSYMHLEITVIKLDGTTPVRYGLRLNMDEKYTGLKKQLSDLCGLNSEQILLAEVHGSNIKNFPQDNQKVRLSVSGFLCAFEIPVPVSPISASSPTQTDFSSSPSTNEMFTLTTNGDLPRPIFIPNGMPNTVVPCGTEKNFTNGMVNGHMPSLPDSPFTGYIIAVHRKMMRTELYFLSSQKNRPSLFGMPLIVPCTVHTRKKDLYDAVWIQVSRLASPLPPQEASNHAQDCDDSMGYQYPFTLRVVQKDGNSCAWCPWYRFCRGCKIDCGEDRAFIGNAYIAVDWDPTALHLRYQTSQERVVDEHESVEQSRRAQAEPINLDSCLRAFTSEEELGENEMYYCSKCKTHCLATKKLDLWRLPPILIIHLKRFQFVNGRWIKSQKIVKFPRESFDPSAFLVPRDPALCQHKPLTPQGDELSEPRILAREVKKVDAQSSAGEEDVLLSKSPSSLSANIISSPKGSPSSSRKSGTSCPSSKNSSPNSSPRTLGRSKGRLRLPQIGSKNKLSSSKENLDASKENGAGQICELADALSRGHVLGGSQPELVTPQDHEVALANGFLYEHEACGNGYSNGQLGNHSEEDSTDDQREDTRIKPIYNLYAISCHSGILGGGHYVTYAKNPNCKWYCYNDSSCKELHPDEIDTDSAYILFYEQQGIDYAQFLPKTDGKKMADTSSMDEDFESDYKKYCVLQ

SEQ ID NO: 907663 - protein, 1252 aa, Homo sapiens
MGAKESRIGFLSYEEALRRVTDVELKRLKDAFKRTCGLSYYMGQHCFIREVLGDGVPPKVAEVCHIVLGLRPATPEEEGQIIRGWLERESRYGLQAGHNWFIISMQWWQQWKEYVKYDANPVVIEPSSVLNGGKYSFGTAAHPMEQVEDRIGSSLSYVNTTEEKFSDNISTASEASETAGSGFLYSATPGADVCFARQHNTSDNNNQCLLGANGNILLHLNPQKPGAIDNQPLVTQEPVKATSLTLEGGRLKRTPQLIHGRDYEMVPEPVWRALYHWYGANLALPRPVIKNSKTDIPELELFPRYLLFLRQQPATRTQQSNIWVNMGNVPSPNAPLKRVLAYTGCFSRMQTIKEIHEYLSQRLRIKEEDMRLWLYNSENYLTLLDDEDHKLEYLKIQDEQHLVIEVRNKDMSWPEEMSFIANSSKIDRHKVPTEKGATGLSNLGNTCFMNSSIQCVSNTQPLTQYFISGRHLYELNRTNPIGMKGHMAKCYGDLVQELWSGTQKNVAPLKLRWTIAKYAPRFNGFQQQDSQELLAFLLDGLHEDLNRVHEKPYVELKDSDGRPDWEVAAEAWDNHLRRNRSIVVDLFHGQLRSQVKCKTCGHISVRFDPFNFLSLPLPMDSYMHLEITVIKLDGTTPVRYGLRLNMDEKYTGLKKQLSDLCGLNSEQILLAEVHGSNIKNFPQDNQKVRLSVSGFLCAFEIPVPVSPISASSPTQTDFSSSPSTNEMFTLTTNGDLPRPIFIPNGMPNTVVPCGTEKNFTNGMVNGHMPSLPDSPFTGYIIAVHRKMMRTELYFLSSQKNRPSLFGMPLIVPCTVHTRKKDLYDAVWIQVSRLASPLPPQEASNHAQDCDDSMGYQYPFTLRVVQKDGNSCAWCPWYRFCRGCKIDCGEDRAFIGNAYIAVDWDPTALHLRYQTSQERVVDEHESVEQSRRAQAEPINLDSCLRAFTSEEELGENEMYYCSKCKTHCLATKKLDLWRLPPILIIHLKRFQFVNGRWIKSQKIVKFPRESFDPSAFLVPRDPALCQHKPLTPQGDELSEPRILAREVKKVDAQSSAGEEDVLLSKSPSSLSANIISSPKGSPSSSRKSGTSCPSSKNSSPNSSPRTLGRSKGRLRLPQIGSKNKLSSSKENLDASKENGAGQICELADALSRGHVLGGSQPELVTPQDHEVALANGFLYEHEACGNGYSNGQLGNHSEEDSTDDQREDTRIKPIYNLYAISSHWHSGASRSVPGCSCPMTTGPSLYSVSQGMM

SEQ ID NO: 907664 - protein, 960 aa, Homo sapiens
MQTIKEIHEYLSQRLRIKEEDMRLWLYNSENYLTLLDDEDHKLEYLKIQDEQHLVIEVRNKDMSWPEEMSFIANSSKIDRHKVPTEKGATGLSNLGNTCFMNSSIQCVSNTQPLTQYFISGRHLYELNRTNPIGMKGHMAKCYGDLVQELWSGTQKNVAPLKLRWTIAKYAPRFNGFQQQDSQELLAFLLDGLHEDLNRVHEKPYVELKDSDGRPDWEVAAEAWDNHLRRNRSIVVDLFHGQLRSQVKCKTCGHISVRFDPFNFLSLPLPMDSYMHLEITVIKLDGTTPVRYGLRLNMDEKYTGLKKQLSDLCGLNSEQILLAEVHGSNIKNFPQDNQKVRLSVSGFLCAFEIPVPVSPISASSPTQTDFSSSPSTNEMFTLTTNGDLPRPIFIPNGMPNTVVPCGTEKNFTNGMVNGHMPSLPDSPFTGYIIAVHRKMMRTELYFLSSQKNRPSLFGMPLIVPCTVHTRKKDLYDAVWIQVSRLASPLPPQEASNHAQDCDDSMGYQYPFTLRVVQKDGNSCAWCPWYRFCRGCKIDCGEDRAFIGNAYIAVDWDPTALHLRYQTSQERVVDEHESVEQSRRAQAEPINLDSCLRAFTSEEELGENEMYYCSKCKTHCLATKKLDLWRLPPILIIHLKRFQFVNGRWIKSQKIVKFPRESFDPSAFLVPRDPALCQHKPLTPQGDELSEPRILAREVKKVDAQSSAGEEDVLLSKSPSSLSANIISSPKGSPSSSRKSGTSCPSSKNSSPNSSPRTLGRSKGRLRLPQIGSKNKLSSSKENLDASKENGAGQICELADALSRGHVLGGSQPELVTPQDHEVALANGFLYEHEACGNGYSNGQLGNHSEEDSTDDQREDTRIKPIYNLYAISCHSGILGGGHYVTYAKNPNCKWYCYNDSSCKELHPDEIDTDSAYILFYEQQGIDYAQFLPKTDGKKMADTSSMDEDFESDYKKYCVLQ

SEQ ID NO: 907665 - protein, 1046 aa, Homo sapiens
MGAKESRIGFLSYEEALRRVTDVELKRLKDAFKRTCGLSYYMGQHCFIREVLGDGVPPKVAEVCHIVLGLRPATPEEEGQIIRGWLERESRYGLQAGHNWFIISMQWWQQWKEYVKYDANPVVIEPSSVLNGGKYSFGTAAHPMEQVEDRIGSSLSYVNTTEEKFSDNISTASEASETAGSGFLYSATPGADVCFARQHNTSDNNNQCLLGANGNILLHLNPQKPGAIDNQPLVTQEPVKATSLTLEGGRLKRTPQLIHGRDYEMVPEPVWRALYHWYGANLALPRPVIKNSKTDIPELELFPRYLLFLRQQPATRTQQSNIWVNMGNVPSPNAPLKRVLAYTGCFSRMQTIKEIHEYLSQRLRIKEEDMRLWLYNSENYLTLLDDEDHKLEYLKIQDEQHLVIEVRNKDMSWPEEMSFIANSSKIDRHKVPTEKGATGLSNLGNTCFMNSSIQCVSNTQPLTQYFISGRHLYELNRTNPIGMKGHMAKCYGDLVQELWSGTQKNVAPLKLRWTIAKYAPRFNGFQQQDSQELLAFLLDGLHEDLNRVHEKPYVELKDSDGRPDWEVAAEAWDNHLRRNRSIVVDLFHGQLRSQVKCKTCGHISVRFDPFNFLSLPLPMDSYMHLEITVIKLDGTTPVRYGLRLNMDEKYTGLKKQLSDLCGLNSEQILLAEVHGSNIKNFPQDNQKVRLSVSGFLCAFEIPVPVSPISASSPTQTDFSSSPSTNEMFTLTTNGDLPRPIFIPNGMPNTVVPCGTEKNFTNGMVNGHMPSLPDSPFTGYIIAVHRKMMRTELYFLSSQKNRPSLFGMPLIVPCTVHTRKKDLYDAVWIQVSRLASPLPPQEASNHAQDCDDSMGYQYPFTLRVVQKDGNSCAWCPWYRFCRGCKIDCGEDRAFIGNAYIAVDWDPTALHLRYQTSQERVVDEHESVEQSRRAQAEPINLDSCLRAFTSEEELGENEMYYCSKCKTHCLATKKLDLWRLPPILIIHLKRFQFVNGRWIKSQKIVKFPRESFDPSAFLVPRDPALCASTFFTSLARILGSESSSPWGV

SEQ ID NO: 907666 - protein, 907 aa, Homo sapiens
MGAKESRIGFLSYEEALRRVTDVELKRLKDAFKRTCGLSYYMGQHCFIREVLGDGVPPKVAEVCHIVLGLRPATPEEEGQIIRGWLERESRYGLQAGHNWFIISMQWWQQWKEYVKYDANPVVIEPSSVLNGGKYSFGTAAHPMEQVEDRIGSSLSYVNTTEEKFSDNISTASEASETAGSGFLYSATPGADVCFARQHNTSDNNNQCLLGANGNILLHLNPQKPGAIDNQPLVTQEPVKATSLTLEGGRLKRTPQLIHGRDYEMVPEPVWRALYHWYGANLALPRPVIKNSKTDIPELELFPRYLLFLRQQPATRTQQSNIWVNMGNVPSPNAPLKRVLAYTGCFSRMQTIKEIHEYLSQRLRIKEEDMRLWLYNSENYLTLLDDEDHKLEYLKIQDEQHLVIEVRNKDMSWPEEMSFIANSSKIDRHKVPTEKGATGLSNLGNTCFMNSSIQCVSNTQPLTQYFISGRHLYELNRTNPIGMKGHMAKCYGDLVQELWSGTQKNVAPLKLRWTIAKYAPRFNGFQQQDSQELLAFLLDGLHEDLNRVHEKPYVELKDSDGRPDWEVAAEAWDNHLRRNRSIVVDLFHGQLRSQVKCKTCGHISVRFDPFNFLSLPLPMDSYMHLEITVIKLDGTTPVRYGLRLNMDEKYTGLKKQLSDLCGLNSEQILLAEVHGSNIKNFPQDNQKVRLSVSGFLCAFEIPVPVSPISASSPTQTDFSSSPSTNEMFTLTTNGDLPRPIFIPNGMPNTVVPCGTEKNFTNGMVNGHMPSLPDSPFTGYIIAVHRKMMRTELYFLSSQKNRPSLFGMPLIVPCTVHTRKKDLYDAVWIQVSRLASPLPPQEASNHAQDCDDSMGYQYPFTSAYILFYEQQGIDYAQFLPKTDGKKMADTSSMDEDFESDYKKYCVLQ

SEQ ID NO: 907667 - protein, 204 aa, Homo sapiens
MGAKESRIGFLSYEEALRRVTDVELKRLKDAFKRTCGLSYYMGQHCFIREVLGDGVPPKVAEVCHIVLGLRPATPEEEGQIIRGWLERESRYGLQAGHNWFIISMQWWQQWKEYVKYDANPVVIEPSSVLNGGKYSFGTAAHPMEQVEDRIGSSLSYVNTTEEKFSDNISTASEASETAGSGYIINTRRRTIKTNSTADSWKRL

SEQ ID NO: 907668 - protein, 119 aa, Homo sapiens
MGAKESRIGFLSYEEALRRVTDVELKRLKDAFKRTCGLSYYMGQHCFIREVLGDGVPPKVAEVCHIVLGLRPATPEEEGQIIRGWLERESRYGLQAGHNWFIISMQWWQQWKEYVKYVS

SEQ ID NO: 907669 - protein, 111 aa, Homo sapiens
MGAKESRIGFLSYEEALRRVTDVELKRLKDAFKRTCGLSYYMGQHCFIREVLGDGVPPKVAEVIYCSFGGTSKGLHFNNLIVGLVLLTRGKDEEKAKYIFSLFSSESGNYV

SEQ ID NO: 907670 - protein, 1274 aa, Homo sapiens; identical to SEQ ID NO: 907661

SEQ ID NO: 907671 - protein, 1044 aa, Homo sapiens
MVPEPVWRALYHWYGANLALPRPVIKNSKTDIPELELFPRYLLFLRQQPATRTQQSNIWVNMGNVPSPNAPLKRVLAYTGCFSRMQTIKEIHEYLSQRLRIKEEDMRLWLYNSENYLTLLDDEDHKLEYLKIQDEQHLVIEVRNKDMSWPEEMSFIANSSKIDRHKVPTEKGATGLSNLGNTCFMNSSIQCVSNTQPLTQYFISGRHLYELNRTNPIGMKGHMAKCYGDLVQELWSGTQKNVAPLKLRWTIAKYAPRFNGFQQQDSQELLAFLLDGLHEDLNRVHEKPYVELKDSDGRPDWEVAAEAWDNHLRRNRSIVVDLFHGQLRSQVKCKTCGHISVRFDPFNFLSLPLPMDSYMHLEITVIKLDGTTPVRYGLRLNMDEKYTGLKKQLSDLCGLNSEQILLAEVHGSNIKNFPQDNQKVRLSVSGFLCAFEIPVPVSPISASSPTQTDFSSSPSTNEMFTLTTNGDLPRPIFIPNGMPNTVVPCGTEKNFTNGMVNGHMPSLPDSPFTGYIIAVHRKMMRTELYFLSSQKNRPSLFGMPLIVPCTVHTRKKDLYDAVWIQVSRLASPLPPQEASNHAQDCDDSMGYQYPFTLRVVQKDGNSCAWCPWYRFCRGCKIDCGEDRAFIGNAYIAVDWDPTALHLRYQTSQERVVDEHESVEQSRRAQAEPINLDSCLRAFTSEEELGENEMYYCSKCKTHCLATKKLDLWRLPPILIIHLKRFQFVNGRWIKSQKIVKFPRESFDPSAFLVPRDPALCQHKPLTPQGDELSEPRILAREVKKVDAQSSAGEEDVLLSKSPSSLSANIISSPKGSPSSSRKSGTSCPSSKNSSPNSSPRTLGRSKGRLRLPQIGSKNKLSSSKENLDASKENGAGQICELADALSRGHVLGGSQPELVTPQDHEVALANGFLYEHEACGNGYSNGQLGNHSEEDSTDDQREDTRIKPIYNLYAISCHSGILGGGHYVTYAKNPNCKWYCYNDSSCKELHPDEIDTDSAYILFYEQQGIDYAQFLPKTDGKKMADTSSMDEDFESDYKKYCVLQ

SEQ ID NO: 907672 - protein, 209 aa, Homo sapiens
LVEVHGSGMNTGARNATGQGDKNKLSSSKENLDASKENGAGQICELADALSRGHVLGGSQPELVTPQDHEVALANGFLYEHEACGNGYSNGQLGNHSEEDSTDDQREDTRIKPIYNLYAISCHSGILGGGHYVTYAKNPNCKWYCYNDSSCKELHPDEIDTDSAYILFYEQQGIDYAQFLPKTDGKKMADTSSMDEDFESDYKKYCVLQ

SEQ ID NO: 907673 - protein, 1013 aa, Homo sapiens
MGAKESRIGFLSYEEALRRVTDVELKRLKDAFKRTCGLSYYMGQHCFIREVLGDGVPPKVAEVCHIVLGLRPATPEEEGQIIRGWLERESRYGLQAGHNWFIISMQWWQQWKEYVKYDANPVVIEPSSVLNGGKYSFGTAAHPMEQVEDRIGSSLSYVNTTEEKFSDNISTASEASETAGSGFLYSATPGADVCFARQHNTSDNNNQCLLGANGNILLHLNPQKPGAIDNQPLVTQEPVKATSLTLEGGRLKRTPQLIHGRDYEMVPEPVWRALYHWYGANLALPRPVIKNSKTDIPELELFPRYLLFLRQQPATRTQQSNIWVNMGNVPSPNAPLKRVLAYTGCFSRMQTIKEIHEYLSQRLRIKEEDMRLWLYNSENYLTLLDDEDHKLEYLKIQDEQHLVIEVRNKDMSWPEEMSFIANSSKIDRHKVPTEKGATGLSNLGNTCFMNSSIQCVSNTQPLTQYFISGRHLYELNRTNPIGMKGHMAKCYGDLVQELWSGTQKNVAPLKLRWTIAKYAPRFNGFQQQDSQELLAFLLDGLHEDLNRVHEKPYVELKDSDGRPDWEVAAEAWDNHLRRNRSIVVDLFHGQLRSQVKCKTCGHISVRFDPFNFLSLPLPMDSYMHLEITVIKLDGTTPVRYGLRLNMDEKYTGLKKQLSDLCGLNSEQILLAEVHGSNIKNFPQDNQKVRLSVSGFLCAFEIPVPVSPISASSPTQTDFSSSPSTNEMFTLTTNGDLPRPIFIPNGMPNTVVPCGTEKNFTNGMVNGHMPSLPDSPFTGYIIAVHRKMMRTELYFLSSQKNRPSLFGMPLIVPCTVHTRKKDLYDAVWIQVSRLASPLPPQEASNHAQDCDDSMGYQYPFTLRVVQKDGNSCAWCPWYRFCRGCKIDCGEDRAFIGNAYIAVDWDPTALHLRYQTSQERVVDEHESVEQSRRAQAEPINLDSCLRAFTSEEELGENEMYYCSKCKTHCLATKKLDLWRLPPILIIHLKRFQFVNGRWIKLSRGNLTIFCDFIVD

SEQ ID NO: 907674 - protein, 789 aa, Homo sapiens
MGAKESRIGFLSYEEALRRVTDVELKRLKDAFKRTCGLSYYMGQHCFIREVLGDGVPPKVAEVCHIVLGLRPATPEEEGQIIRGWLERESRYGLQAGHNWFIISMQWWQQWKEYVKYDANPVVIEPSSVLNGGKYSFGTAAHPMEQVEDRIGSSLSYVNTTEEKFSDNISTASEASETAGSGFLYSATPGADVCFARQHNTSDNNNQCLLGANGNILLHLNPQKPGAIDNQPLVTQEPVKATSLTLEGGRLKRTPQLIHGRDYEMVPEPVWRALYHWYGANLALPRPVIKNSKTDIPELELFPRYLLFLRQQPATRTQQSNIWVNMGNVPSPNAPLKRVLAYTGCFSRMQTIKEIHEYLSQRLRIKEEDMRLWLYNSENYLTLLDDEDHKLEYLKIQDEQHLVIEVRNKDMSWPEEMSFIANSSKIDRHKVPTEKGATGLSNLGNTCFMNSSIQCVSNTQPLTQYFISGRHLYELNRTNPIGMKGHMAKCYGDLVQELWSGTQKNVAPLKLRWTIAKYAPRFNGFQQQDSQELLAFLLDGLHEDLNRVHEKPYVELKDSDGRPDWEVAAEAWDNHLRRNRSIVVDLFHGQLRSQVKCKTCGHISVRFDPFNFLSLPLPMDSYMHLEITVIKLDGTTPVRYGLRLNMDEKYTGLKKQLSDLCGLNSEQILLAEVHGSNIKNFPQDNQKVRLSVSGFLCAFEIPVPVSPISASSPTQTDFSSSPSTNEMFTLTTNGDLPRPIFIPNGMPNTVVPCGTEKNFTNGMVNGHMPSLPDSPFTGYIIAVHRKMVS

SEQ ID NO: 907675 - protein, 138 aa, Homo sapiens [sequence omitted]

SEQ ID NO: 907676 - protein, 120 aa, Homo sapiens
MGSYFVARAGCKLLGLKGTSHFSLPKCRNCRREPLPGLFFLFFVFFFLRRSLALSPRLECSGAIVAHCKLGLPGSLHSPASASQVAGTIGTCHNTRIIFCILVETGFHRVSQDGVDLLTL

SEQ ID NO: 907677 - protein, 561 aa, Homo sapiens
ARGCGCGRRGRVAAPGARANRVRRGPTRGDRVSLRKRAMQRAAALVRRGCGPRTPSSWGRSQSSAAAEASAVLKVRPERSRRERILTLESMNPQVKAVEYAVRGPIVLKAGEIELELQRGIKKPFTEVIRANIGDAQAMGQQPITFLRQVMALCTYPNLLDSPSFPEDAKKRARRILQACGGNSLGSYSASQGVNCIREDVAAYITRRDGGVPADPDNIYLTTGASDGISTILKILVSGGGKSRTGVMIPIPQYPLYSAVISELDAIQVNYYLDEENCWALNVNELRRAVQEAKDHCDPKVLCIINPGNPTGQVQSRKCIEDVIHFAWEEKLFLLADEVYQDNVYSPDCRFHSFKKVLYEMGPEYSSNVELASFHSTSKGYMGECGYRGGYMEVINLHPEIKGQLVKLLSVRLCPPVSGQAAMDIVVNPPVAGEESFEQFSREKESVLGNLAKKAKLTEDLFNQVPGIHCNPLQGAMYAFPRIFIPAKAVEAAQAHQMAPDMFYCMKLLEETGICVVPGSGFGQREGTYHFRMTILPPVEKLKTVLQKVKDFHINFLEKYA

SEQ ID NO: 907678 - protein, 594 aa, Homo sapiens
ARGCGCGRRGRVAAPGARANRVRRGPTRGDRVSLRKRAMQRAAALVRRGCGPRTPSSWGRSQSSAAAEASAVLKVRPERSRRERILTLESMNPQVKAVEYAVRGPIVLKAGEIELELQRAGVQWCSYSSLWPQIPGLKVILLPQPLQKLGLQGIKKPFTEVIRANIGDAQAMGQQPITFLRQVMALCTYPNLLDSPSFPEDAKKRARRILQACGGNSLGSYSASQGVNCIREDVAAYITRRDGGVPADPDNIYLTTGASDGISTILKILVSGGGKSRTGVMIPIPQYPLYSAVISELDAIQVNYYLDEENCWALNVNELRRAVQEAKDHCDPKVLCIINPGNPTGQVQSRKCIEDVIHFAWEEKLFLLADEVYQDNVYSPDCRFHSFKKVLYEMGPEYSSNVELASFHSTSKGYMGECGYRGGYMEVINLHPEIKGQLVKLLSVRLCPPVSGQAAMDIVVNPPVAGEESFEQFSREKESVLGNLAKKAKLTEDLFNQVPGIHCNPLQGAMYAFPRIFIPAKAVEAAQAHQMAPDMFYCMKLLEETGICVVPGSGFGQREGTYHFRMTILPPVEKLKTVLQKVKDFHINFLEKYA

SEQ ID NO: 907679 - protein, 346 aa, Homo sapiens [sequence omitted]

SEQ ID NO: 907680 - protein, 246 aa, Homo sapiens
ARGCGCGRRGRVAAPGARANRVRRGPTRGDRVSLRKRAMQRAAALVRRGCGPRTPSSWGRSQSSAAAEASAVLKVRPERSRRERILTLESMNPQVKAVEYAVRGPIVLKAGEIELELQRGIKKPFTEVIRANIGDAQAMGQQPITFLRQVMALCTYPNLLDSPSFPEDAKKRARRILQACGGNSLGSYSASQGVNCIREDVAAYITRRDGGVPADPDNIYLTTGASDGISPGDVFLCALMLRAPLF

SEQ ID NO: 907681 - protein, 561 aa, Homo sapiens; identical to SEQ ID NO: 907677

SEQ ID NO: 907682 - protein, 279 aa, Homo sapiens
ARGCGCGRRGRVAAPGARANRVRRGPTRGDRVSLRKRAMQRAAALVRRGCGPRTPSSWGRSQSSAAAEASAVLKVRPERSRRERILTLESMNPQVKAVEYAVRGPIVLKAGEIELELQRGIKKPFTEVIRANIGDAQAMGQQPITFLRQVMALCTYPNLLDSPSFPEDAKKRARRILQACGGNSLGSYSASQGVNCIREDVAAYITSSLYAVISTPGPCRGNRNSQLSLPTDITAPMKKVATISNNKRECSKTFSSLKNGENCTCACCVVYKPGLVPGS

SEQ ID NO: 907683 - protein, 471 aa, Homo sapiens
ARGCGCGRRGRVAAPGARANRVRRGPTRGDRVSLRKRAMQRAAALVRRGCGPRTPSSWGRSQSSAAAEASAVLKVRPERSRRERILTLESMNPQVKAVEYAVRGPIVLKAGEIELELQRGIKKPFTEVIRANIGDAQAMGQQPITFLRQVMALCTYPNLLDSPSFPEDAKKRARRILQACGGNSLGSYSASQGVNCIREDVAAYITRRDGGVPADPDNIYLTTGASDGISTILKILVSGGGKSRTGVMIPIPQYPLYSAVISELDAIQVNYYLDEENCWALNVNELRRAVQEAKDHCDPKVLCIINPGNPTGQVQSRKCIEDVIHFAWEEKLFLLADEVYQDNVYSPDCRFHSFKKVLYEMGPEYSSNVELASFHSTSKGYMGECGYRGGYMEVINLHPEIKGQLVKLLSVRLCPPVSGQAAMDIVVNPPVAGEESFEQFSREKESVLGNRGSRWLFLSDQFPLRRDWLLG

SEQ ID NO: 907684 - protein, 108 aa, Homo sapiens
MHALGAAFAKAGWVCVGASAAPWRVRVAGGWAPAPKPGWHRSLKEPLAGLVWGSAARLGSARRVCSFSLFVPGFLSASARCSGRRRWSGGAVVPGPPAPGAAARAARP

SEQ ID NO: 907685 - protein, 465 aa, Homo sapiens
KRVRTKGPLRVWPDNVQCNQYETGIKKPFTEVIRANIGDAQAMGQQPITFLRQVMALCTYPNLLDSPSFPEDAKKRARRILQACGGNSLGSYSASQGVNCIREDVAAYITRRDGGVPADPDNIYLTTGASDGISTILKILVSGGGKSRTGVMIPIPQYPLYSAVISELDAIQVNYYLDEENCWALNVNELRRAVQEAKDHCDPKVLCIINPGNPTGQVQSRKCIEDVIHFAWEEKLFLLADEVYQDNVYSPDCRFHSFKKVLYEMGPEYSSNVELASFHSTSKGYMGECGYRGGYMEVINLHPEIKGQLVKLLSVRLCPPVSGQAAMDIVVNPPVAGEESFEQFSREKESVLGNLAKKAKLTEDLFNQVPGIHCNPLQGAMYAFPRIFIPAKAVEAAQAHQMAPDMFYCMKLLEETGICVVPGSGFGQREGTYHFRMTILPPVEKLKTVLQKVKDFHINFLEKYA

SEQ ID NO: 907686 - protein, 201 aa, Homo sapiens
MGPEYSSNVELASFHSTSKGYMGECGYRGGYMEVINLHPEIKGQLVKLLSVRLCPPVSGQAAMDIVVNPPVAGEESFEQFSREKESVLGNLAKKAKLTEDLFNQVPGIHCNPLQGAMYAFPRIFIPAKAVEAAQAHQMAPDMFYCMKLLEETGICVVPGSGFGQREGTYHFRMTILPPVEKLKTVLQKVKDFHINFLEKYA

SEQ ID NO: 907687 - protein, 561 aa, Homo sapiens; identical to SEQ ID NO: 907677

SEQ ID NO: 907688 - protein, 175 aa, Homo sapiens
ARGCGCGRRGRVAAPGARANRVRRGPTRGDRVSLRKRAMQRAAALVRRGCGPRTPSSWGRSQSSAAAEASAVLKVRPERSRRERILTLESMNPQVKAVEYAVRGPIVLKAGEIELELQRGIKKPFTEVIRANIGDAQAMGQQPITFLRQVMALCTYPNLLDSPTSPSSLPSPVGS

SEQ ID NO: 907689 - protein, 561 aa, Homo sapiens; identical to SEQ ID NO: 907677

SEQ ID NO: 907690 - protein, 182 aa, Homo sapiens
ARGCGCGRRGRVAAPGARANRVRRGPTRGDRVSLRKRAMQRAAALVRRGCGPRTPSSWGRSQSSAAAEASAVLKVRPERSRRERILTLESMNPQVKAVEYAVRGPIVLKAGEIELELQRVSARWAPGRLGPLSKGKTAAAPAGVLPTTSTPMASSSVSQAWLKRENAPSRPFTYWCPAPGTQ

SEQ ID NO: 907691 - protein, 195 aa, Homo sapiens
MVAVRRPRLSAGRHDLPISQRPVWEILRLCPYRPQTRACRLEAQFYVMMTPQDVLQTGTQRTIAPRTHPYSPKIDGTRTPRDERRRAQHNEVERRRRDKINNWIVQLSKIIPDCNADNSKTGASKGGILSKACDYIRELRQTNQRMQETFKEAERLQMDNELLRQQIEELKNENALLRAQLQQHNLEMVGEGTRQ

SEQ ID NO: 907692 - protein, 195 aa, Homo sapiens; identical to SEQ ID NO: 907691

SEQ ID NO: 907693 - protein, 195 aa, Homo sapiens; identical to SEQ ID NO: 907691

SEQ ID NO: 907694 - protein, 195 aa, Homo sapiens; identical to SEQ ID NO: 907691

SEQ ID NO: 907695 - protein, 147 aa, Homo sapiens
MTPQDVLQTGTQRTIAPRTHPYSPKIDGTRTPRDERRRAQHNEVERRRRDKINNWIVQLSKIIPDCNADNSKTGASKGGILSKACDYIRELRQTNQRMQETFKEAERLQMDNELLRQQIEELKNENALLRAQLQQHNLEMVGEGTRQ

SEQ ID NO: 907696 - protein, 195 aa, Homo sapiens; identical to SEQ ID NO: 907691

SEQ ID NO: 907697 - protein, 195 aa, Homo sapiens; identical to SEQ ID NO: 907691

SEQ ID NO: 907698 - protein, 225 aa, Homo sapiens
MDMLDPGLDPAASATAAAAASHDKGPEAEEGVELQEGGDGPGAEEQTAVAITSVQQAAFGDHNIQYQFRTETNGGQVTYRVVQVTDGQLDGQGDTAGAVSVVSTAAFAGGQQAVTQVGVDGAAQRPGPAAASVPPGPAAPFPLAVIQNPFSNGGSPAAEAVSGEARFAYFPASSVGDTTAVSVQTTDQSLQAGGAVLRHDDAPGCASDRNTEDDRPPDTPLLSKN

SEQ ID NO: 907699 - protein, 225 aa, Homo sapiens; identical to SEQ ID NO: 907698

SEQ ID NO: 907700 - protein, 225 aa, Homo sapiens; identical to SEQ ID NO: 907698

SEQ ID NO: 907701 - protein, 183 aa, Homo sapiens
MPVLKACVALEGPRFFVPLEKLGWGPAGLRVRPLTSQGCGLGGACTVPGCPRAEPLPCEDGRSGMSRQRTRGCDSVFLQLERRRRDKINNWIVQLSKIIPDCNADNSKTGASKGGILSKACDYIRELRQTNQRMQETFKEAERLQMDNELLRQQIEELKNENALLRAQLQQHNLEMVGEGTRQ

SEQ ID NO: 907702 - protein, 153 aa, Homo sapiens
PRRPLQPPSPAPRTHPYSPKIAGTRTPRDERRRSPVNQNPDKKFGGIERLERRRRDKINNWIVQLSKIIPDCNADNSKTGASKGGILSKACDYIRELRQTNQRMQETFKEAERLQMDNELLRQQIEELKNENALLRAQLQQHNLEMVGEGTRQ

SEQ ID NO: 907703 - protein, 199 aa, Homo sapiens
MTPQDVLQTGTQRTIAPRTHPYSPKIDGTRTPRDERRRAQHNEVERRRRDKINNWIVQLSKIIPDCNADNSKTGAVSTPDPQCLRWSRPPTLACRKSNSHGARESSLGWRPVGGACPKAPGPLSPPESKGGILSKACDYIRELRQTNQRMQETFKEAERLQMDNELLRQQIEELKNENALLRAQLQQHNLEMVGEGTRQ

SEQ ID NO: 907704 - protein, 225 aa, Homo sapiens; identical to SEQ ID NO: 907698

SEQ ID NO: 907705 - protein, 103 aa, Homo sapiens
MRGRDGGTEKAKGSLCPPTPQAVIQNPFSNGGSPAAEAVSGEARFAYFPASSVGDTTAVSVQTTDQSLQAGGAVLRHDDAPGCASDRNTEDDRPPDTPLLSKN

SEQ ID NO: 907706 - protein, 195 aa, Homo sapiens; identical to SEQ ID NO: 907691

SEQ ID NO: 907707 - protein, 195 aa, Homo sapiens; identical to SEQ ID NO: 907691

SEQ ID NO: 907708 - protein, 195 aa, Homo sapiens; identical to SEQ ID NO: 907691

SEQ ID NO: 907709 - protein, 195 aa, Homo sapiens; identical to SEQ ID NO: 907691

SEQ ID NO: 907710 - protein, 147 aa, Homo sapiens; identical to SEQ ID NO: 907695

SEQ ID NO: 907711 - protein, 195 aa, Homo sapiens; identical to SEQ ID NO: 907691

SEQ ID NO: 907712 - protein, 150 aa, Homo sapiens
SNLILSRCLGKQLCDNTCPLFFSSSCRKIDGTRTPRDERRRAQHNEVERRRRDKINNWIVQLSKIIPDCNADNSKTGASKGGILSKACDYIRELRQTNQRMQETFKEAERLQMDNELLRQQIEELKNENALLRAQLQQHNLEMVGEGTRQ

SEQ ID NO: 907713 - protein, 200 aa, Homo sapiens
MVAVRRPRLSAGRHDLPISQRPVWEILRLCPYRPQTRACRLEAQFYVMMTPQDVLQTGTQRTIAPRTHPYSPKIDGTRTPRDERRRAQHNEVERRRRDKINNWIVQLSKIIPDCNADNSKTGASKGGILSKACDYIRELRQTNQRMQETFKEAERLQMDNELLRQQVGAGPGAGQGPGAPDARRWPSAPLTSVVSARSRS

SEQ ID NO: 907714 - protein, 225 aa, Homo sapiens; identical to SEQ ID NO: 907698

SEQ ID NO: 907715 - protein, 235 aa, Homo sapiens
MPVLKACVALEGPRFFVPLEKLGWGPAGLRVRPLTSQGCGLGGACTVPGCPRAEPLPCEDGRSGMSRQRTRGCDSVFLQLERRRRDKINNWIVQLSKIIPDCNADNSKTGAVSTPDPQCLRWSRPPTLACRKSNSHGARESSLGWRPVGGACPKAPGPLSPPESKGGILSKACDYIRELRQTNQRMQETFKEAERLQMDNELLRQQIEELKNENALLRAQLQQHNLEMVGEGTRQ

SEQ ID NO: 907716 - protein, 179 aa, Homo sapiens
MDMLDPGLDPAASATAAAAASHDKGPEAEEGVELQEGGDGPGAEEQTAVAITSVQQAAFGDHNIQYQFRTETNGGQVTYRVVQVTDGQLDGQGDTAGAVSVVSTAAFAGGQQAVTQVGVDGAAQRPGPAAASVPPGPAAPFPLAGLCCPLPQPLAQRGTHAPPPAAFFYSRFLTKNGEK

SEQ ID NO: 907717 - protein, 688 aa, Homo sapiens
MADLEAVLADVSYLMAMEKSKATPAARASKRIVLPEPSIRSVMQKYLAERNEITFDKIFNQKIGFLLFKDFCLNEINEAVPQVKFYEEIKEYEKLDNEEDRLCRSRQIYDAYIMKELLSCSHPFSKQAVEHVQSHLSKKQVTSTLFQPYIEEICESLRGDIFQKFMESDKFTRFCQWKNVELNIHLTMNEFSVHRIIGRGGFGEVYGCRKADTGKMYAMKCLDKKRIKMKQGETLALNERIMLSLVSTGDCPFIVCMTYAFHTPDKLCFILDLMNGGDLHYHLSQHGVFSEKEMRFYATEIILGLEHMHNRFVVYRDLKPANILLDEHGHARISDLGLACDFSKKKPHASVGTHGYMAPEVLQKGTAYDSSADWFSLGCMLFKLLRGHSPFRQHKTKDKHEIDRMTLTVNVELPDTFSPELKSLLEGLLQRDVSKRLGCHGGGSQEVKEHSFFKGVDWQHVYLQKYPPPLIPPRGEVNAADAFDIGSFDEEDTKGIKLLDCDQELYKNFPLVISERWQQEVTETVYEAVNADTDKIEARKRAKNKQLGHEEDYALGKDCIMHGYMLKLGNPFLTQWQRRYFYLFPNRLEWRGEGESRQNLLTMEQILSVEETQIKDKKCILFRIKGGKQFVLQCESDPEFVQWKKELNETFKEAQRLLRRAPKFLNKPRSGTVELPKPSLCHRNSNGL

SEQ ID NO: 907718 - protein, 688 aa, Homo sapiens; identical to SEQ ID NO: 907717

SEQ ID NO: 907719 - protein, 688 aa, Homo sapiens
MELWGYVAASIRSVMQKYLAERNEITFDKIFNQKIGFLLFKDFCLNEINEAVPQVKFYEEIKEYEKLDNEEDRLCRSRQIYDAYIMKELLSCSHPFSKQAVEHERSSFMMYGIIKELLSCSHPFSKQAVEHVQSHLSKKQVTSTLFQPYIEEICESLRGDIFQKFMESDKFTRFCQWKNVELNIHLTMNEFSVHRIIGRGGFGEVYGCRKADTGKMYAMKCLDKKRIKMKQGETLALNERIMLSLVSTGDCPFIVCMTYAFHTPDKLCFILDLMNGGDLHYHLSQHGVFSEKEMRFYATEIILGLEHMHNRFVVYRDLKPANILLDEHGHARISDLGLACDFSKKKPHASVGTHGYMAPEVLQKGTAYDSSADWFSLGCMLFKLLRGHSPFRQHKTKDKHEIDRMTLTVNVELPDTFSPELKSLLEGLLQRDVSKRLGCHGGGSQEVKEHSFFKGVDWQHVYLQKYPPPLIPPRGEVNAADAFDIGSFDEEDTKGIKLLDCDQELYKNFPLVISERWQQEVTETVYEAVNADTDKIEARKRAKNKQLGHEEDYALGKDCIMHGYMLKLGNPFLTQWQRRYFYLFPNRLEWRGEGESRQNLLTMEQILSVEETQIKDKKCILFRIKGGKQFVLQCESDPEFVQWKKELNETFKEAQRLLRRAPKFLNKPRSGTVELPKPSLCHRNSNGL

SEQ ID NO: 907720 - protein, 688 aa, Homo sapiens; identical to SEQ ID NO: 907719

SEQ ID NO: 907721 - protein, 575 aa, Homo sapiens
MKELLSCSHPFSKQAVEHVQSHLSKKQVTSTLFQPYIEEICESLRGDIFQKFMESDKFTRFCQWKNVELNIHLTMNEFSVHRIIGRGGFGEVYGCRKADTGKMYAMKCLDKKRIKMKQGETLALNERIMLSLVSTGDCPFIVCMTYAFHTPDKLCFILDLMNGGDLHYHLSQHGVFSEKEMRFYATEIILGLEHMHNRFVVYRDLKPANILLDEHGHARISDLGLACDFSKKKPHASVGTHGYMAPEVLQKGTAYDSSADWFSLGCMLFKLLRGHSPFRQHKTKDKHEIDRMTLTVNVELPDTFSPELKSLLEGLLQRDVSKRLGCHGGGSQEVKEHSFFKGVDWQHVYLQKYPPPLIPPRGEVNAADAFDIGSFDEEDTKGIKLLDCDQELYKNFPLVISERWQQEVTETVYEAVNADTDKIEARKRAKNKQLGHEEDYALGKDCIMHGYMLKLGNPFLTQWQRRYFYLFPNRLEWRGEGESRQNLLTMEQILSVEETQIKDKKCILFRIKGGKQFVLQCESDPEFVQWKKELNETFKEAQRLLRRAPKFLNKPRSGTVELPKPSLCHRNSNGL

SEQ ID NO: 907722 - protein, 432 aa, Homo sapiens [sequence omitted]

SEQ ID NO: 907723 - protein, 688 aa, Homo sapiens; identical to SEQ ID NO: 907717

SEQ ID NO: 907724 - protein, 131 aa, Homo sapiens
MTMYPASTPMATRRRCHLCGCGVACGLATSTLATVGCSTCWRRETTRTAATLGPVTLRDMDEAGNHHSQQTNTEAENQTPHVLTHKWELNSENTWTQGGEHHTPRPVREWGTRGRESIGTNTKCMHGLKPR

SEQ ID NO: 907725 - protein, 131 aa, Homo sapiens; identical to SEQ ID NO: 907724

SEQ ID NO: 907726 - protein, 106 aa, Homo sapiens
MTMYPASTPMATRRRCHLCGCGVACGLATSTLATVGCSTCWRRETTRTAATLGPVTLRYSPCAASTTCRGTNVVPSTPPTSAHPTMPPSQDPGLLPRNPPDLPESE

SEQ ID NO: 907727 - protein, 688 aa, Homo sapiens; identical to SEQ ID NO: 907717

SEQ ID NO: 907728 - protein, 688 aa, Homo sapiens; identical to SEQ ID NO: 907717

SEQ ID NO: 907729 - protein, 688 aa, Homo sapiens; identical to SEQ ID NO: 907719

SEQ ID NO: 907730 - protein, 688 aa, Homo sapiens; identical to SEQ ID NO: 907717

SEQ ID NO: 907731 - protein, 338 aa, Homo sapiens
VCVCVCVCVCVCVGFLCCFVLFFETQSHSVAQSWSALGQSRRTRTHMCTSKVCVCVCVCVCVCVCTFSPELKSLLEGLLQRDVSKRLGCHGGGSQEVKEHSFFKGVDWQHVYLQKYPPPLIPPRGEVNAADAFDIGSFDEEDTKGIKLLDCDQELYKNFPLVISERWQQEVTETVYEAVNADTDKIEARKRAKNKQLGHEEDYALGKDCIMHGYMLKLGNPFLTQWQRRYFYLFPNRLEWRGEGESRQNLLTMEQILSVEETQIKDKKCILFRIKGGKQFVLQCESDPEFVQWKKELNETFKEAQRLLRRAPKFLNKPRSGTVELPKPSLCHRNSNGL

SEQ ID NO: 907732 - protein, 131 aa, Homo sapiens; identical to SEQ ID NO: 907724

SEQ ID NO: 907733 - protein, 106 aa, Homo sapiens; identical to SEQ ID NO: 907726

SEQ ID NO: 907734 - protein, 385 aa, Homo sapiens
FFFSSAQKSRSGSLRARSRNQAPGAGAGAAGRRRLRSLRRARPGRPSLLGLGEQRRRRHPGRGNTEHCAACRGLLAALIRNSVWPRSEYWRRDHEIDEFALGVGKKVKPGANMGQKVTGGIKTVDMRDPTYRPLKQELQGLDYCKPTRLDLLLDMPPVSYDVQLLHSWNNNDRSLNVFVKEDDKLIFHRHPVAQSTDAIRGKVGYTRGLHVWQITWAMRQRGTHAVVGVATADAPLHSVGYTTLVGNNHESWGWDLGRNRLYHDGKNQPSKTYPAFLEPDETFIVPDSFLVALDMDDGTLSFIVDGQYMGVAFRGLKGKKLYPVVSAVWGHCEIRMRYLNGLDPEPLPLMDLCRRSVRLALGRERLGEIHTLPLPASLKAYLLYQ

SEQ ID NO: 907735 - protein, 161 aa, Homo sapiens
FFFSSAQKSRSGSLRARSRNQAPGAGAGAAGRRRLRSLRRARPGRPSLLGLGEQRRRRHPGRGNTEHCAACRGLLAALIRNSVWPRSEYWRRDHEIDEFALGVGKKVKPGANMGQKVPGLPSSSVAASMGQGPIPTQAPLSPFPTSAEGSIPACRPYTTPL

SEQ ID NO: 907736 - protein, 385 aa, Homo sapiens; identical to SEQ ID NO: 907734

SEQ ID NO: 907737 - protein, 385 aa, Homo sapiens; identical to SEQ ID NO: 907734

SEQ ID NO: 907738 - protein, 385 aa, Homo sapiens; identical to SEQ ID NO: 907734

SEQ ID NO: 907739 - protein, 332 aa, Homo sapiens
FFFSSAQKSRSGSLRARSRNQAPGAGAGAAGRRRLRSLRRARPGRPSLLGLGEQRRRRHPGRGNTEHCAACRGLLAALIRNSVWPRSEYWRRDHEIDEFALGVGKKVKPGANMGQKVTGGIKTVDMRDPTYRPLKQELQGLDYCKPTRLDLLLDMPPVSYDVQLLHSWNNNDRSLNVFVKEDDKLIFHRHPVAQSTDAIRGKVGYTRGLHVWQITWAMRQRGTHAVVGVATADAPLHSVGYTTLVGNNHESWGWDLGRNRLYHDGKNQPSKTYPAFLEPDETFIVPDSFLVALDMDDGTLSFIVDETVHGSGFSGTQGQKTVSCSECRLGPL

SEQ ID NO: 907740 - protein, 385 aa, Homo sapiens; identical to SEQ ID NO: 907734

SEQ ID NO: 907741 - protein, 385 aa, Homo sapiens; identical to SEQ ID NO: 907734

SEQ ID NO: 907742 - protein, 116 aa, Homo sapiens
SPSRKKGAETKNCLQANKHPAPILAAGAPYPVFILLTITKAIYLFHLERKPCFSPLSLAVLLLSFHLCPPWDMYASPALPGHMCTRAQAQVCLWVPCPAVSRGLCSKFPSGPLREK

SEQ ID NO: 907743 - protein, 385 aa, Homo sapiens; identical to SEQ ID NO: 907734

SEQ ID NO: 907744 - protein, 385 aa, Homo sapiens; identical to SEQ ID NO: 907734

SEQ ID NO: 907745 - protein, 1396 aa, Homo sapiens
RPKGAFASRGAAGAVCYARPPPGEGTARPGTVAEMDRGPAAVACTLLLALVACLAPASGQECDSAHFRCGSGHCIPADWRCDGTKDCSDDADEIGCAVVTCQQGYFKCQSEGQCIPSSWVCDQDQDCDDGSDERQDCSQSTCSSHQITCSNGQCIPSEYRCDHVRDCPDGADENDCQYPTCEQLTCDNGACYNTSQKCDWKVDCRDSSDEINCTEICLHNEFSCGNGECIPRAYVCDHDNDCQDGSDEHACNYPTCGGYQFTCPSGRCIYQNWVCDGEDDCKDNGDEDGCESGPHDVHKCSPREWSCPESGRCISIYKVCDGILDCPGREDENNTSTGKYCSMTLCSALNCQYQCHETPYGGACFCPPGYIINHNDSRTCVEFDDCQIWGICDQKCESRPGRHLCHCEEGYILERGQYCKANDSFGEASIIFSNGRDLLIGDIHGRSFRILVESQNRGVAVGVAFHYHLQRVFWTDTVQNKVFSVDINGLNIQEVLNVSVETPENLAVDWVNNKIYLVETKVNRIDMVNLDGSYRVTLITENLGHPRGIAVDPTVGYLFFSDWESLSGEPKLERAFMDGSNRKDLVKTKLGWPAGVTLDMISKRVYWVDSRFDYIETVTYDGIQRKTVVHGGSLIPHPFGVSLFEGQVFFTDWTKMAVLKANKFTETNPQVYYQASLRPYGVTVYHSLRQPYATNPCKDNNGGCEQVCVLSHRTDNDGLGFRCKCTFGFQLDTDERHCIAVQNFLIFSSQVAIRGIPFTLSTQEDVMVPVSGNPSFFVGIDFDAQDSTIFFSDMSKHMIFKQKIDGTGREILAANRVENVESLAFDWISKNLYWTDSHYKSISVMRLADKTRRTVVQYLNNPRSVVVHPFAGYLFFTDWFRPAKIMRAWSDGSHLLPVINTTLGWPNGLAIDWAASRLYWVDAYFDKIEHSTFDGLDRRRLGHIEQMTHPFGLAIFGEHLFFTDWRLGAIIRVRKADGGEMTVIRSGIAYILHLKSYDVNIQTGSNACNQPTHPNGDCSHFCFPVPNFQRVCGCPYGMRLASNHLTCEGDPTNEPPTEQCGLFSFPCKNGRCVPNYYLCDGVDDCHDNSDEQLCGTLNNTCSSSAFTCGHGECIPAHWRCDKRNDCVDGSDEHNCPTHAPASCLDTQYTCDNHQCISKNWVCDTDNDCGDGSDEKNCNSTETCQPSQFNCPNHRCIDLSFVCDGDKDCVDGSDEVGCVLNCTASQFKCASGDKCIGVTNRCDGVFDCSDNSDEAGCPTRPPGMCHSDEFQCQEDGICIPNFWECDGHPDCLYGSDEHNACVPKTCPSSYFHCDNGNCIHRAWLCDRDNDCGDMSDEKDCPTQPFRCPSWQWQCLGHNICVNLSVVCDGIFDCPNGTDESPLCSKFPDHSLLAINSF

SEQ ID NO: 907746 - protein, 4365 aa, Homo sapiens
MDRGPAAVACTLLLALVACLAPASGQECDSAHFRCGSGHCIPADWRCDGTKDCSDDADEIGCAVVTCQQGYFKCQSEGQCIPSSWVCDQDQDCDDGSDERQDCSQSTCSSHQITCSNGQCIPSEYRCDHVRDCPDGADENDCQYPTCEQLTCDNGACYNTSQKCDWKVDCRDSSDEINCTEICLHNEFSCGNGECIPRAYVCDHDNDCQDGSDEHACNYPTCGGYQFTCPSGRCIYQNWVCDGEDDCKDNGDEDGCESGPHDVHKCSPREWSCPESGRCISIYKVCDGILDCPGREDENNTSTGKYCSMTLCSALNCQYQCHETPYGGACFCPPGYIINHNDSRTCVEFDDCQIWGICDQKCESRPGRHLCHCEEGYILERGQYCKANDSFGEASIIFSNGRDLLIGDIHGRSFRILVESQNRGVAVGVAFHYHLQRVFWTDTVQNKVFSVDINGLNIQEVLNVSVETPENLAVDWVNNKIYLVETKVNRIDMVNLDGSYRVTLITENLGHPRGIAVDPTVGYLFFSDWESLSGEPKLERAFMDGSNRKDLVKTKLGWPAGVTLDMISKRVYWVDSRFDYIETVTYDGIQRKTVVHGGSLIPHPFGVSLFEGQVFFTDWTKMAVLKANKFTETNPQVYYQASLRPYGVTVYHSLRQPYATNPCKDNNGGCEQVCVLSHRTDNDGLGFRCKCTFGFQLDTDERHCIAVQNFLIFSSQVAIRGIPFTLSTQEDVMVPVSGNPSFFVGIDFDAQDSTIFFSDMSKHMIFKQKIDGTGREILAANRVENVESLAFDWISKNLYWTDSHYKSISVMRLADKTRRTVVQYLNNPRSVVVHPFAGYLFFTDWFRPAKIMRAWSDGSHLLPVINTTLGWPNGLAIDWAASRLYWVDAYFDKIEHSTFDGLDRRRLGHIEQMTHPFGLAIFGEHLFFTDWRLGAIIRVRKADGGEMTVIRSGIAYILHLKSYDVNIQTGSNACNQPTHPNGDCSHFCFPVPNFQRVCGCPYGMRLASNHLTCEGDPTNEPPTEQCGLFSFPCKNGRCVPNYYLCDGVDDCHDNSDEQLCGTLNNTCSSSAFTCGHGECIPAHWRCDKRNDCVDGSDEHNCPTHAPASCLDTQYTCDNHQCISKNWVCDTDNDCGDGSDEKNCNSTETCQPSQFNCPNHRCIDLSFVCDGDKDCVDGSDEVGCVLNCTASQFKCASGDKCIGVTNRCDGVFDCSDNSDEAGCPTRPPGMCHSDEFQCQEDGICIPNFWECDGHPDCLYGSDEHNACVPKTCPSSYFHCDNGNCIHRAWLCDRDNDCGDMSDEKDCPTQPFRCPSWQWQCLGHNICVNLSVVCDGIFDCPNGTDESPLCNGNSCSDFNGGCTHECVQEPFGAKCLCPLGFLLANDSKTCEDIDECDILGSCSQHCYNMRGSFRCSCDTGYMLESDGRTCKVTASESLLLLVASQNKIIADSVTSQVHNIYSLVENGSYIVAVDFDSISGRIFWSDATQGKTWSAFQNGTDRRVVFDSSIILTETIAIDWVGRNLYWTDYALETIEVSKIDGSHRTVLISKNLTNPRGLALDPRMNEHLLFWSDWGHHPRIERASMDGSMRTVIVQDKIFWPCGLTIDYPNRLLYFMDSYLDYMDFCDYNGHHRRQVIASDLIIRHPYALTLFEDSVYWTDRATRRVMRANKWHGGNQSVVMYNIQWPLGIVAVHPSKQPNSVNPCAFSRCSHLCLLSSQGPHFYSCVCPSGWSLSPDLLNCLRDDQPFLITVRQHIIFGISLNPEVKSNDAMVPIAGIQNGLDVEFDDAEQYIYWVENPGEIHRVKTDGTNRTVFASISMVGPSMNLALDWISRNLYSTNPRTQSIEVLTLHGDIRYRKTLIANDGTALGVGFPIGITVDPARGKLYWSDQGTDSGVPAKIASANMDGTSVKTLFTGNLEHLECVTLDIEEQKLYWAVTGRGVIERGNVDGTDRMILVHQLSHPWGIAVHDSFLYYTDEQYEVIERVDKATGANKIVLRDNVPNLRGLQVYHRRNAAESSNGCSNNMNACQQICLPVPGGLFSCACATGFKLNPDNRSCSPYNSFIVVSMLSAIRGFSLELSDHSETMVPVAGQGRNALHVDVDVSSGFIYWCDFSSSVASDNAIRRIKPDGSSLMNIVTHGIGENGVRGIAVDWVAGNLYFTNAFVSETLIEVLRINTTYRRVLLKVTVDMPRHIVVDPKNRYLFWADYGQRPKIERSFLDCTNRTVLVSEGIVTPRGLAVDRSDGYVYWVDDSLDIIARIRINGENSEVIRYGSRYPTPYGITVFENSIIWVDRNLKKIFQASKEPENTEPPTVIRDNINWLRDVTIFDKQVQPRSPAEVNNNPCLENNGGCSHLCFALPGLHTPKCDCAFGTLQSDGKNCAISTENFLIFALSNSLRSLHLDPENHSPPFQTINVERTVMSLDYDSVSDRIYFTQNLASGVGQISYATLSSGIHTPTVIASGIGTADGIAFDWITRRIYYSDYLNQMINSMAEDGSNRTVIARVPKPRAIVLDPCQGYLYWADWDTHAKIERATLGGNFRVPIVNSSLVMPSGLTLDYEEDLLYWVDASLQRIERSTLTGVDREVIVNAAVHAFGLTLYGQYIYWTDLYTQRIYRANKYDGSGQIAMTTNLLSQPRGINTVVKNQKQQCNNPCEQFNGGCSHICAPGPNGAECQCPHEGNWYLANNRKHCIVDNGERCGASSFTCSNGRCISEEWKCDNDNDCGDGSDEMESVCALHTCSPTAFTCANGRCVQYSYRCDYYNDCGDGSDEAGCLFRDCNATTEFMCNNRRCIPREFICNGVDNCHDNNTSDEKNCPDRTCQSGYTKCHNSNICIPRVYLCDGDNDCGDNSDENPTYCTTHTCSSSEFQCASGRCIPQHWYCDQETDCFDASDEPASCGHSERTCLADEFKCDGGRCIPSEWICDGDNDCGDMSDEDKRHQCQNQNCSDSEFLCVNDRPPDRRCIPQSWVCDGDVDCTDGYDENQNCTRRTCSENEFTCGYGLCIPKIFRCDRHNDCGDYSDERGCLYQTCQQNQFTCQNGRCISKTFVCDEDNDCGDGSDELMHLCHTPEPTCPPHEFKCDNGRCIEMMKLCNHLDDCLDNSDEKGCGINECHDPSISGCDHNCTDTLTSFYCSCRPGYKLMSDKRTCVDIDECTEMPFVCSQKCENVIGSYICKCAPGYLREPDGKTCRQNSNIEPYLIFSNRYYLRNLTIDGYFYSLILEGLDNVVALDFDRVEKRLYWIDTQRQVIERMFLNKTNKETIINHRLPAAESLAVDWVSRKLYWLDARLDGLFVSDLNGGHRRMLAQHCVDANNTFCFDNPRGLALHPQYGYLYWADWGHRAYIGRVGMDGTNKSVIISTKLEWPNGITIDYTNDLLYWADAHLGYIEYSDLEGHHRHTVYDGALPHPFAITIFEDTIYWTDWNTRTVEKGNKYDGSNRQTLVNTTHRPFDIHVYHPYRQPIVSNPCGTNNGGCSHLCLIKPGGKGFTCECPDDFRTLQLSGSTYCMPMCSSTQFLCANNEKCIPIWWKCDGQKDCSDGSDELALCPQRFCRLGQFQCSDGNCTSPQTLCNAHQNCPDGSDEDRLLCENHHCDSNEWQCANKRCIPESWQCDTFNDCEDNSDEDSSHCASRTCRPGQFRCANGRCIPQAWKCDVDNDCGDHSDEPIEECMSSAHLCDNFTEFSCKTNYRCIPKWAVCNGVDDCRDNSDEQGCEERTCHPVGDFRCKNHHCIPLRWQCDGQNDCGDNSDEENCAPRECTESEFRCVNQQCIPSRWICDHYNDCGDNSDERDCEMRTCHPEYFQCTSGHCVHSELKCDGSADCLDASDEADCPTRFPDGAYCQATMFECKNHVCIPPYWKCDGDDDCGDGSDEELHLCLDVPCNSPNRFRCDNNRCIYSHEVCNGVDDCGDGTDETEEHCRKPTPKPCTEYEYKCGNGHCIPHDNVCDDADDCGDWSDELGCNKGKERTCAENICEQNCTQLNEGGFICSCTAGFETNVFDRTSCLDINECEQFGTCPQHCRNTKGSYECVCADGFTSMSDRPGKRCAAEGSSPLLLLPDNVRIRKYNLSSERFSEYLQDEEYIQAVDYDWDPKDIGLSVVYYTVRGEGSRFGAIKRAYIPNFESGRNNLVQEVDLKLKYVMQPDGIAVDWVGRHIYWSDVKNKRIEVAKLDGRYRKWLISTDLDQPAAIAVNPKLGLMFWTDWGKEPKIESAWMNGEDRNILVFEDLGWPTGLSIDYLNNDRIYWSDFKEDVIETIKYDGTDRRVIAKEAMNPYSLDIFEDQLYWISKEKGEVWKQNKFGQGKKEKTLVVNPWLTQVRIFHQLRYNKSVPNLCKQICSHLCLLRPGGYSCACPQGSSFIEEEHH

SEQ ID NO: 907747 - protein, 1785 aa, Homo sapiens
RPKGAFASRGAAGAVCYARPPPGEGTARPGTVAEMDRGPAAVACTLLLALVACLAPASGQECDSAHFRCGSGHCIPADWRCDGTKDCSDDADEIGCAVVTCQQGYFKCQSEGQCIPSSWVCDQDQDCDDGSDERQDCSQSTCSSHQITCSNGQCIPSEYRCDHVRDCPDGADENDCQYPTCEQLTCDNGACYNTSQKCDWKVDCRDSSDEINCTEICLHNEFSCGNGECIPRAYVCDHDNDCQDGSDEHACNYPTCGGYQFTCPSGRCIYQNWVCDGEDDCKDNGDEDGCESGPHDVHKCSPREWSCPESGRCISIYKVCDGILDCPGREDENNTSTGKYCSMTLCSALNCQYQCHETPYGGACFCPPGYIINHNDSRTCVEFDDCQIWGICDQKCESRPGRHLCHCEEGYILERGQYCKANDSFGEASIIFSNGRDLLIGDIHGRSFRILVESQNRGVAVGVAFHYHLQRVFWTDTVQNKVFSVDINGLNIQEVLNVSVETPENLAVDWVNNKIYLVETKVNRIDMVNLDGSYRVTLITENLGHPRGIAVDPTVGYLFFSDWESLSGEPKLERAFMDGSNRKDLVKTKLGWPAGVTLDMISKRVYWVDSRFDYIETVTYDGIQRKTVVHGGSLIPHPFGVSLFEGQVFFTDWTKMAVLKANKFTETNPQVYYQASLRPYGVTVYHSLRQPYATNPCKDNNGGCEQVCVLSHRTDNDGLGFRCKCTFGFQLDTDERHCIAVQNFLIFSSQVAIRGIPFTLSTQEDVMVPVSGNPSFFVGIDFDAQDSTIFFSDMSKHMIFKQKIDGTGREILAANRVENVESLAFDWISKNLYWTDSHYKSISVMRLADKTRRTVVQYLNNPRSVVVHPFAGYLFFTDWFRPAKIMRAWSDGSHLLPVINTTLGWPNGLAIDWAASRLYWVDAYFDKIEHSTFDGLDRRRLGHIEQMTHPFGLAIFGEHLFFTDWRLGAIIRVRKADGGEMTVIRSGIAYILHLKSYDVNIQTGSNACNQPTHPNGDCSHFCFPVPNFQRVCGCPYGMRLASNHLTCEGDPTNEPPTEQCGLFSFPCKNGRCVPNYYLCDGVDDCHDNSDEQLCGTLNNTCSSSAFTCGHGECIPAHWRCDKRNDCVDGSDEHNCPTHAPASCLDTQYTCDNHQCISKNWVCDTDNDCGDGSDEKNCNSTETCQPSQFNCPNHRCIDLSFVCDGDKDCVDGSDEVGCVLNCTASQFKCASGDKCIGVTNRCDGVFDCSDNSDEAGCPTRPPGMCHSDEFQCQEDGICIPNFWECDGHPDCLYGSDEHNACVPKTCPSSYFHCDNGNCIHRAWLCDRDNDCGDMSDEKDCPTQPFRCPSWQWQCLGHNICVNLSVVCDGIFDCPNGTDESPLCNGNSCSDFNGGCTHECVQEPFGAKCLCPLGFLLANDSKTCEDIDECDILGSCSQHCYNMRGSFRCSCDTGYMLESDGRTCKVTASESLLLLVASQNKIIADSVTSQVHNIYSLVENGSYIVAVDFDSISGRIFWSDATQGKTWSAFQNGTDRRVVFDSSIILTETIAIDWVGRNLYWTDYALETIEVSKIDGSHRTVLISKNLTNPRGLALDPRMNEHLLFWSDWGHHPRIERASMDGSMRTVIVQDKIFWPCGLTIDYPNRLLYFMDSYLDYMDFCDYNGHHRRQVIASDLIIRHPYALTLFEDSVYWTDRATRRVMRANKWHGGNQSVVMYNIQWPLGIVAVHPSKQPNSVNPCAFSRCSHLCLLSSQGPHFYSCVCPSGWSLSPDLLNCLRGIVCSLCEL

SEQ ID NO: 907748 - protein, 444 aa, Homo sapiens
MEVTADQPRWVSHHHPAVLNGQHPDTHHPGLSHSYMDAAQYPLPEEVDVLFNIDGQGNHVPPYYGNSVRATVQRYPPTHHGSQVCRPPLLHGSLPWLDGGKALGSHHTASPWNLSPFSKTSIHHGSPGPLSVYPPASSSSLSGGHASPHLFTFPPTPPKDVSPDPSLSTPGSAGSARQDEKECLKYQVPLPDSMKLESSHSRGSMTALGGASSSTHHPITTYPPYVPEYSSGLFPPSSLLGGSPTGFGCKSRPKARSSTEGRECVNCGATSTPLWRRDGTGHYLCNACGLYHKMNGQNRPLIKPKRRLSAARRAGTSCANCQTTTTTLWRRNANGDPVCNACGLYYKLHNINRPLTMKKEGIQTRNRKMSSKSKKCKKVHDSLEDFPKNSSFNPAALSRHMSSLSHISPFSHSSHMLTTPTPMHPPSSLSFGPHHPSSMVTAMG

SEQ ID NO: 907749 - protein, 444 aa, Homo sapiens; identical to SEQ ID NO: 907748

SEQ ID NO: 907750 - protein, 444 aa, Homo sapiens; identical to SEQ ID NO: 907748

SEQ ID NO: 907751 - protein, 195 aa, Homo sapiens
MENHKSNNKENITIVDISRKINQLPEAERNLLENGSVYVGLNAALCGLIANSLFRRILNVTKARIAAGLPMAGIPFLTTDLTYRCFVSFPLNTGDLDCETCTITRSGLTGLVIGGLYPVFLAIPVNGGLAARYQSALLPHKGNILSYWIRTSKPVFRKMLFPILLQTMFSAYLGSEQYKLLIKALQLSEPGKEIH

SEQ ID NO: 907752 - protein, 104 aa, Homo sapiens
MFCDLDCETCTITRSGLTGLVIGGLYPVFLAIPVNGGLAARYQSALLPHKGNILSYWIRTSKPVFRKMLFPILLQTMFSAYLGSEQYKLLIKALQLSEPGKEIH

SEQ ID NO: 907753 - protein, 195 aa, Homo sapiens; identical to SEQ ID NO: 907751

SEQ ID NO: 907754 - protein, 198 aa, Homo sapiens
MLKMENHKSNNKENITIVDISRKINQLPEAERNLLENGSVYVGLNAALCGLIANSLFRRILNVTKARIAAGLPMAGIPFLTTDLTYRCFVSFPLNTGDLDCETCTITRSGLTGLVIGGLYPVFLAIPVNGGLAARYQSALLPHKGNILSYWIRTSKPVFRKMLFPILLQTMFSAYLGSEQYKLLIKALQLSEPGKEIH

SEQ ID NO: 907755 - protein, 125 aa, Homo sapiens
MAGIPFLTTDLTYRCFVSFPLNTGDLDCETCTITRSGLTGLVIGGLYPVFLAIPVNGGLAARYQSALLPHKGNILSYWIRTSKPVFRKMLFPILLQTMFSAYLGSEQYKLLIKALQLSEPGKEIH

SEQ ID NO: 907756 - protein, 104 aa, Homo sapiens; identical to SEQ ID NO: 907752

SEQ ID NO: 907757 - protein, 125 aa, Homo sapiens; identical to SEQ ID NO: 907755

SEQ ID NO: 907758 - protein, 195 aa, Homo sapiens; identical to SEQ ID NO: 907751

SEQ ID NO: 907759 - protein, 195 aa, Homo sapiens; identical to SEQ ID NO: 907751

SEQ ID NO: 907760 - protein, 257 aa, Homo sapiens
LNHKKPPDSPEITYKSCYQDSHEDPTKMKRFLFLLLTISLLVYGTDTNWTLRTNWEESIRLKMENHKSNNKENITIVDISRKINQLPEAERNLLENGSVYVGLNAALCGLIANSLFRRILNVTKARIAAGLPMAGIPFLTTDLTYRCFVSFPLNTGDLDCETCTITRSGLTGLVIGGLYPVFLAIPVNGGLAARYQSALLPHKGNILSYWIRTSKPVFRKMLFPILLQTMFSAYLGSEQYKLLIKALQLSEPGKEIH

SEQ ID NO: 907761 - protein, 69 aa, Homo sapiens
QSLGIRSLGVAPRPDFHFWPALSPPGRGSGCQSLNNLSMGPTKMFPDPWNAKFKFSYVSRRGRWKKQRE

SEQ ID NO: 907762 - protein, 248 aa, Homo sapiens
MGSVQENRMPEPRSRQPSSCLASRCLPGEQILAWAPGVRKGLEPELSGTLICTNFRVTFQPCGWQWNQDTPLNSEYDFALVNIGRLEAVSGLSRVQLLRPGSLHKFIPEEILIHGRDFRLLRVGFEAGGLEPQAFQVTMAIVQARAQSNQAQQYSGITLSKAGQGSGSRKPPIPLMETAEDWETERKKQAARGWRVSTVNERFDVATSLPRYFWVPNRILDSEVRRAFGHFHQGRGPVSVMVRVMAVD

SEQ ID NO: 907763 - protein, 368 aa, Homo sapiens
KFPRRLLRLGWTHLSKGLEPELSGTLICTNFRVTFQPCGWQWNQDTPLNSEYDFALVNIGRLEAVSGLSRVQLLRPGSLHKFIPEEILIHGRDFRLLRVGFEAGGLEPQAFQVTMAIVQARAQSNQAQQYSGITLSKAGQGSGSRKPPIPLMETAEDWETERKKQAARGWRVSTVNERFDVATSLPRYFWVPNRILDSEVRRAFGHFHQGRGPRLSWHHPGGSDLLRCGGFYTASDPNKEDIRAVELMLQAGHSDVVLVDTMDELPSLADVQLAHLRLRALCLPDSSVAEDKWLSALEGTRWLDYVRACLRKASDISVLVTSRVRSVILQAAFSPRSPNTVWLPITSTARVGGSWTSLPDSAWGNWGQ

SEQ ID NO: 907764 - protein, 224 aa, Homo sapiens
KFPRRLLRLGWTHLSKGLEPELSGTLICTNFRVTFQPCGWQWNQDTPLNSEYDFALVNIGRLEAVSGLSRVQLLRPGSLHKFIPEEILIHGRDFRLLRVGFEAGGLEPQAFQVTMAIVQARAQSNQAQQYSGITLSKAGQGSGSRKPPIPLMETAEDWETERKKQAARGWRVSTVNERFDVATSLPRYFWVPNRILDSEVRRAFGHFHQGRGPVSVMVRVMAVD

SEQ ID NO: 907765 - protein, 637 aa, Homo sapiens
MPPRVTFQPCGWQWNQDTPLNSEYDFALVNIGRLEAVSGLSRVQLLRPGSLHKFIPEEILIHGRDFRLLRVGFEAGGLEPQAFQVTMAIVQARAQSNQAQQYSGITLSKAGQGSGSRKPPIPLMETAEDWETERKKQAARGWRVSTVNERFDVATSLPRYFWVPNRILDSEVRRAFGHFHQGRGPRLSWHHPGGSDLLRCGGFYTASDPNKEDIRAVELMLQAGHSDVVLVDTMDELPSLADVQLAHLRLRALCLPDSSVAEDKWLSALEGTRWLDYVRACLRKASDISVLVTSRVRSVILQERGDRDLNGLLSSLVQLLSAPEARTLFGFQSLVQREWVAAGHPFLTRLGGTGASEEAPVFLLFLDCVWQLLQQFPADFEFSEFFLLALHDSVRVPDTLTFLRNTPWERGKQSGQLNSYTQVYTPGYSQPPAGNSFNLQLSVWDWDLRYSNAQILQFQNPGYDPEHCPDSWLPRPQPSFMVPGPPSSVWLFSRGALTPLNQLCPWRDSPSLLAVSSRWLPRPAISSESLADQEWGLPSHWGACPLPPGLLLPGYLGPQIRLWRRCYLRGRPEVQMGLSSPTISGLQDELSHLQELLRKWTPRISPEDHSKKRDPHTILNPTEIAGILKGRAEGDLG

SEQ ID NO: 907766 - protein, 118 aa, Homo sapiens [sequence omitted]

SEQ ID NO: 907767 - protein, 340 aa, Homo sapiens
MPPRVTFQPCGWQWNQDTPLNSEYDFALVNIGRLEAVSGLSRVQLLRPGSLHKFIPEEILIHGRDFRLLRVGFEAGGLEPQAFQVTMAIVQARAQSNQAQQYSGITLSKAGQGSGSRKPPIPLMETAEDWETERKKQAARGWRVSTVNERFDVATSLPRYFWVPNRILDSEVRRAFGHFHQGRGPRLSWHHPGGSDLLRCGGFYTASDPNKEDIRAVELMLQAGHSDVVLVDTMDELPSLADVQLAHLRLRALCLPDSSVAEDKWLSALEGTRWLDYVRACLRKASDISVLVTSRVRSVILQAAFSPRSPNTVWLPITSTARVGGSWTSLPDSAWGNWGQ

SEQ ID NO: 907768 - protein, 252 aa, Homo sapiens
MGSVQENRMPEPRSRQPSSCLASRCLPGEQILAWAPGVRKGLEPELSGTLICTNFRVTFQPCGWQWNQDTPLNSEYDFALVNIGRLEAVSGLSRVQLLRPGSLHKFIPEEILIHGRDFRLLRVGFEAGGLEPQAFQVTMAIVQARAQSNQAQQYSGITLSKAGQGSGSRKPPIPLMETAEDWETERKKQAARGWRVSTVNERFDVATRLRCFSSSLIVSGSSSSSFQLILNSLSFSFLLFMTVSGFLTPLPS

SEQ ID NO: 907769 - protein, 340 aa, Homo sapiens; identical to SEQ ID NO: 907767

SEQ ID NO: 907770 - protein, 254 aa, Homo sapiens
MAIVQARAQSNQAQQYSGITLSKAGQGSGSRKPPIPLMETAEDWETERKKQAARGWRVSTVNERFDVATSLPRYFWVPNRILDSEVRRAFGHFHQGRGPRLSWHHPGGSDLLRCGGFYTASDPNKEDIRAVELMLQAGHSDVVLVDTMDELPSLADVQLAHLRLRALCLPDSSVAEDKWLSALEGTRWLDYVRACLRKASDISVLVTSRVRSVILQAAFSPRSPNTVWLPITSTARVGGSWTSLPDSAWGNWGQ

SEQ ID NO: 907771 - protein, 334 aa, Homo sapiens
FYVLSQSSYPKPFPSVPLTSPCRISLLILFCPSFLDPSSLSLLPLYHPERGDRDLNGLLSSLVQLLSAPEARTLFGFQSLVQREWVAAGHPFLTRLGGTGASEEAPVFLLFLDCVWQLLQQFPADFEFSEFFLLALHDSVRVPDTLTFLRNTPWERGKQSGQLNSYTQVYTPGYSQPPAGNSFNLQLSVWDWDLRYSNAQILQFQNPGYDPEHCPDSWLPRPQPSFMVPGPPSSVWLFSRGALTPLNQLCPWRDSPSLLAVSSRWLPRPAISSESLADQEWGLPSHWGACPLPPGLLLPGYLGPQIRLWRRCYLRGRPEVQVRRENRLGVGQGT

SEQ ID NO: 907772 - protein, 108 aa, Homo sapiens [sequence omitted]

SEQ ID NO: 907773 - protein, 340 aa, Homo sapiens; identical to SEQ ID NO: 907767

SEQ ID NO: 907774 - protein, 183 aa, Homo sapiens
MTKSNGEEPKMGGRMERFQQGVRKRTLLAKKKVQNITKEDVKSYLFRNAFVLLTVTAVIVGTILGFTLRPYRMSYREVKYFSFPGELLMRMLQMLVLPLIISSLVTGMAALDSKASGKMGMRAVVYYMTTTIIAVVIGIIIVIIIHPGKGTKENMHREGKIVRVTAADAFLDLIRNMFPSKIW

SEQ ID NO: 907775 - protein, 153 aa, Homo sapiens
ALQDRILCSMTMRKPFIPAWEKVKESFVYVIGEQMERFQQGVRKRTLLAKKKVQNITKEDVKSYLFRNAFVLLTVTAVIVGTILGFTLRPYRMSYREVKYFSFPGELLMRMLQMLVLPLIISSLVTGTISSCWFVWFFLSVFIAKDCLEKPVL

SEQ ID NO: 907776 - protein, 524 aa, Homo sapiens
MTKSNGEEPKMGGRMERFQQGVRKRTLLAKKKVQNITKEDVKSTILGFTLRPYRMSYREVKYFSFPGELLMRMLQMLVLPLIISSLVTGMAALDSKASGKMGMRAVVYYMTTTIIAVVIGIIIVIIIHPGKGTKENMHREGKIVRVTAADAFLDLIRNMFPPNLVEACFKQFKTNYEKRSFKVPIQANETLVGAVINNVSEAMETLTRITEELVPVPGSVNGVNALGLVVFSMCFGFVIGNMKEQGQALREFFDSLNEAIMRLVAVIMWYAPVGILFLIAGKIVEMEDMGVIGGQLAMYTVTVIVGLLIHAVIVLPLLYFLVTRKNPWVFIGGLLQALITALGTSSSSATLPITFKCLEENNGVDKRVTRFVLPVGATINMDGTALYEALAAIFIAQVNNFELNFGQIITISITATAASIGAAGIPQAGLVTMVIVLTSVGLPTDDITLIIAVDWFLDRLRTTTNVLGDSLGAGIVEHLSRHELKNRDVEMGNSVIEENEMKKPYQLIAQDNETEKPIDSETKM

SEQ ID NO: 907777 - protein, 145 aa, Homo sapiens
MTKSNGEEPKMGGRMERFQQGVRKRTLLAKKKVQNITKEDVKSTILGFTLRPYRMSYREVKYFSFPGELLMRMLQMLVLPLIISSLVTGMAALDSKASGKMGMRAVVYYMTTTIIAVVIGIIIVIIIHPGKGTKENMHREGKIVR

SEQ ID NO: 907778 - protein, 542 aa, Homo sapiens
MTKSNGEEPKMGGRMERFQQGVRKRTLLAKKKVQNITKEDVKSYLFRNAFVLLTVTAVIVGTILGFTLRPYRMSYREVKYFSFPGELLMRMLQMLVLPLIISSLVTGMAALDSKASGKMGMRAVVYYMTTTIIAVVIGIIIVIIIHPGKGTKENMHREGKIVRVTAADAFLDLIRNMFPPNLVEACFKQFKTNYEKRSFKVPIQANETLVGAVINNVSEAMETLTRITEELVPVPGSVNGVNALGLVVFSMCFGFVIGNMKEQGQALREFFDSLNEAIMRLVAVIMWYAPVGILFLIAGKIVEMEDMGVIGGQLAMYTVTVIVGLLIHAVIVLPLLYFLVTRKNPWVFIGGLLQALITALGTSSSSATLPITFKCLEENNGVDKRVTRFVLPVGATINMDGTALYEALAAIFIAQVNNFELNFGQIITISITATAASIGAAGIPQAGLVTMVIVLTSVGLPTDDITLIIAVDWFLDRLRTTTNVLGDSLGAGIVEHLSRHELKNRDVEMGNSVIEENEMKKPYQLIAQDNETEKPIDSETKM

SEQ ID NO: 907779 - protein, 173 aa, Homo sapiens
MTKSNGEEPKMGGRMERFQQGVRKRTLLAKKKVQNITKEDVKSYLFRNAFVLLTVTAVIVGTILGFTLRPYRMSYREVKYFSFPGELLMRMLQMLVLPLIISSLVTGMAALDSKASGKMGMRAVVYYMTTTIIAVVIGIIIVIIIHPGKGTMAGCLFLVVPGSCEQVPVFQLS

SEQ ID NO: 907780 - protein, 542 aa, Homo sapiens; identical to SEQ ID NO: 907778

SEQ ID NO: 907781 - protein, 129 aa, Homo sapiens
MTKSNGEEPKMGGRMERFQQGVRKRTLLAKKKVQNITKEDVKSYLFRNAFVLLTVTAVIVGTILGFTLRPYRMSYREVKYFSFPGELLMRMLQMLVLPLIISSLVTDNIWLDSLLAIDARMLVLRTTRT

SEQ ID NO: 907782 - protein, 559 aa, Homo sapiens
SGSRRVSRARRWRGRLGRSCPRSAPAAPLAATATWARSLHDLARRLWAGAPPDRSSEIQVFKMKFLLTTAFLILISLWVEEAYSKEKSSKKGKGKKKQYLCPSQQSAEDLARVPANSTSNILNRLLVSYDPRIRPNFKGIPVDVVVNIFINSFGSIQETTMDYRVNIFLRQKWNDPRLKLPSDFRGSDALTVDPTMYKCLWKPDLFFANEKSANFHDVTQENILLFIFRDGDVLVSMRLSITLSCPLDLTLFPMDTQRCKMQLESFGYTTDDLRFIWQSGDPVQLEKIALPQFDIKKEDIEYGNCTKYYKGTGYYTCVEVIFTLRRQVGFYMMGVYAPTLLIVVLSWLSFWINPDASAARVPLGIFSVLSLASECTTLAAELPKVSYVKALDVWLIACLLFGFASLVEYAVVQVMLNNPKRVEAEKARIAKAEQADGKGGNVAKKNTVNGTGTPVHISTLQVGETRCKKVCTSKSDLRSNDFSIVGSLPRDFELSNYDCYGKPIEVNNGLGKSQAKNNKKPPPAKPVIPTAAKRIDLYARALFPFCFLFFNVIYWSIYL

SEQ ID NO: 907783 - protein, 559 aa, Homo sapiens; identical to SEQ ID NO: 907782

SEQ ID NO: 907784 - protein, 365 aa, Homo sapiens
SGSRRVSRARRWRGRLGRSCPRSAPAAPLAATATWARSLHDLARRLWAGAPPDRSSEIQVFKMKFLLTTAFLILISLWVEEAYSKEKSSKKGKGKKKQYLCPSQQSAEDLARVPANSTSNILNRLLVSYDPRIRPNFKGIPVDVVVNIFINSFGSIQETTMDYRVNIFLRQKWNDPRLKLPSDFRGSDALTVDPTMYKCLWKPDLFFANEKSANFHDVTQENILLFIFRDGDVLVSMRLSITLSCPLDLTLFPMDTQRCKMQLESFGYTTDDLRFIWQSGDPVQLEKIALPQFDIKKEDIEYGNCTKYYKGTGYYTCVEVIFTLRRQVGFYMMGVYAPTLLIVVLSWLSFWINPDASAARVPLGW

SEQ ID NO: 907785 - protein, 118 aa, Homo sapiens
SGSRRVSRARRWRGRLGRSCPRSAPAAPLAATATWARSLHDLARRLWAGAPPDRSSEIQVFKMKFLLTTAFLILISLWVEEAYSKEKSSKKGKGKKKQYLCPSLVRPDAKKFVLLSLI

SEQ ID NO: 907786 - protein, 552 aa, Homo sapiens
ALRRAREDARCPARERGAGRLAAAAGSPLRWRPRRRSGWRDAEGRDRSSEIQVFKMKFLLTTAFLILISLWVEEAYSKEKSSKKGKGKKKQYLCPSQQSAEDLARVPANSTSNILNRLLVSYDPRIRPNFKGIPVDVVVNIFINSFGSIQETTMDYRVNIFLRQKWNDPRLKLPSDFRGSDALTVDPTMYKCLWKPDLFFANEKSANFHDVTQENILLFIFRDGDVLVSMRLSITLSCPLDLTLFPMDTQRCKMQLESFGYTTDDLRFIWQSGDPVQLEKIALPQFDIKKEDIEYGNCTKYYKGTGYYTCVEVIFTLRRQVGFYMMGVYAPTLLIVVLSWLSFWINPDASAARVPLGIFSVLSLASECTTLAAELPKVSYVKALDVWLIACLLFGFASLVEYAVVQVMLNNPKRVEAEKARIAKAEQADGKGGNVAKKNTVNGTGTPVHISTLQVGETRCKKVCTSKSDLRSNDFSIVGSLPRDFELSNYDCYGKPIEVNNGLGKSQAKNNKKPPPAKPVIPTAAKRIDLYARALFPFCFLFFNVIYWSIYL

SEQ ID NO: 907787 - protein, 432 aa, Homo sapiens
FVPLIIVTLFVLGPNKFLKIAINIHMCTHVLFLQDYRVNIFLRQKWNDPRLKLPSDFRGSDALTVDPTMYKCLWKPDLFFANEKSANFHDVTQENILLFIFRDGDVLVSMRLSITLSCPLDLTLFPMDTQRCKMQLESFGYTTDDLRFIWQSGDPVQLEKIALPQFDIKKEDIEYGNCTKYYKGTGYYTCVEVIFTLRRQVGFYMMGVYAPTLLIVVLSWLSFWINPDASAARVPLGIFSVLSLASECTTLAAELPKVSYVKALDVWLIACLLFGFASLVEYAVVQVMLNNPKRVEAEKARIAKAEQADGKGGNVAKKNTVNGTGTPVHISTLQVGETRCKKVCTSKSDLRSNDFSIVGSLPRDFELSNYDCYGKPIEVNNGLGKSQAKNNKKPPPAKPVIPTAAKRIDLYARALFPFCFLFFNVIYWSIYL

SEQ ID NO: 907788 - protein, 382 aa, Homo sapiens
MGAFLDKPKMEKHNAQGQGNGLRYGLSSMQGWRVEMEDAHTAVIGLPSGLESWSFFAVYDGHAGSQVAKYCCEHLLDHITNNQDFKGSAGAPSVENVKNGIRTGFLEIDEHMRVMSEKKHGADRSGSTAVGVLISPQHTYFINCGDSRGLLCRNRKVHFFTQDHKPSNPLEKERIQNAGGSVMIQRVNGSLAVSRALGDFDYKCVHGKGPTEQLVSPEPEVHDIERSEEDDQFIILACDGIWDVMGNEELCDFVRSRLEVTDDLEKVCNEVVDTCLYKGSRDNMSVILICFPNAPKVSPEAVKKEAELDKYLECRVEEIIKKQGEGVPDLVHVMRTLASENIPSLPPGGELASKRNVIEAVYNRLNPYKNDDTDSTSTDDMW

SEQ ID NO: 907789 - protein, 324 aa, Homo sapiens
MGAFLDKPKMEKHNAQGQGNGLRYGLSSMQGWRVEMEDAHTAVIGLPSGLESWSFFAVYDGHAGSQVAKYCCEHLLDHITNNQDFKGSAGAPSVENVKNGIRTGFLEIDEHMRVMSEKKHGADRSGSTAVGVLISPQHTYFINCGDSRGLLCRNRKVHFFTQDHKPSNPLEKERIQNAGGSVMIQRVNGSLAVSRALGDFDYKCVHGKGPTEQLVSPEPEVHDIERSEEDDQFIILACDGIWDVMGNEELCDFVRSRLEVTDDLEKVCNEVVDTCLYKGSRDNMSVILICFPNAPKVSPEAVKKEAELDKYLECRVEGGSFNKK

SEQ ID NO: 907790 - protein, 382 aa, Homo sapiens; identical to SEQ ID NO: 907788

SEQ ID NO: 907791 - protein, 382 aa, Homo sapiens; identical to SEQ ID NO: 907788

SEQ ID NO: 907792 - protein, 354 aa, Homo sapiens
MGAFLDKPKMEKHNAQGQGNGLRYGLSSMQGWRVEMEDAHTAVIGLPSGLESWSFFAVYDGHAGSQVAKYCCEHLLDHITNNQDFKGSAGAPSVENVKNGIRTGFLEIDEHMRVMSEKKHGADRSGSTAVGVLISPQHTYFINCGDSRGLLCRNRKVHFFTQDHKPSNPLEKERIQNAGGSVMIQRVNGSLAVSRALGDFDYKCVHGKGPTEQLVSPEPEVHDIERSEEDDQFIILACDGIWDVMGNEELCDFVRSRLEVTDDLEKVCNEVVDTCLYKGSRDNMSVILICFPNAPKVSPEAVKKEAELDKYLECRVEEIIKKQGEGVPDLVHVMRTLASENIPSLPPGGELASK

SEQ ID NO: 907793 - protein, 455 aa, Homo sapiens
MFCSGRKWVAEATICTKLMKREKRRMGKRRAKKAKREEKKKGGERRRNEKRGNQMKRMCERKKYETDLEDQDIMGAFLDKPKMEKHNAQGQGNGLRYGLSSMQGWRVEMEDAHTAVIGLPSGLESWSFFAVYDGHAGSQVAKYCCEHLLDHITNNQDFKGSAGAPSVENVKNGIRTGFLEIDEHMRVMSEKKHGADRSGSTAVGVLISPQHTYFINCGDSRGLLCRNRKVHFFTQDHKPSNPLEKERIQNAGGSVMIQRVNGSLAVSRALGDFDYKCVHGKGPTEQLVSPEPEVHDIERSEEDDQFIILACDGIWDVMGNEELCDFVRSRLEVTDDLEKVCNEVVDTCLYKGSRDNMSVILICFPNAPKVSPEAVKKEAELDKYLECRVEEIIKKQGEGVPDLVHVMRTLASENIPSLPPGGELASKRNVIEAVYNRLNPYKNDDTDSTSTDDMW

SEQ ID NO: 907794 - protein, 382 aa, Homo sapiens; identical to SEQ ID NO: 907788

SEQ ID NO: 907795 - protein, 382 aa, Homo sapiens; identical to SEQ ID NO: 907788

SEQ ID NO: 907796 - protein, 159 aa, Homo sapiens
MALETICRPSGRKSSKMQAFRIWDVNQKTFYLRNNQLVAGYLQGPNVNLEEKIDVVPIEPHALFLGIHGGKMCLSCVKSGDETRLQLEAVNITDLSENRKQDKRFAFIRSDSGPTTSFESAACPGWFLCTAMEADQPVSLTNMPDEGVMVTKFYFQEDE

SEQ ID NO: 907797 - protein, 159 aa, Homo sapiens; identical to SEQ ID NO: 907796

SEQ ID NO: 907798 - protein, 180 aa, Homo sapiens
MALADLYEEGGGGGGEGEDNADSKETICRPSGRKSSKMQAFRIWDVNQKTFYLRNNQLVAGYLQGPNVNLEEKIDVVPIEPHALFLGIHGGKMCLSCVKSGDETRLQLEAVNITDLSENRKQDKRFAFIRSDSGPTTSFESAACPGWFLCTAMEADQPVSLTNMPDEGVMVTKFYFQEDE

SEQ ID NO: 907799 - protein, 143 aa, Homo sapiens
MQAFRIWDVNQKTFYLRNNQLVAGYLQGPNVNLEEKIDVVPIEPHALFLGIHGGKMCLSCVKSGDETRLQLEAVNITDLSENRKQDKRFAFIRSDSGPTTSFESAACPGWFLCTAMEADQPVSLTNMPDEGVMVTKFYFQEDE

SEQ ID NO: 907800 - protein, 94 aa, Homo sapiens
YGHATARREEAGRAVGERPDPAEAVNITDLSENRKQDKRFAFIRSDSGPTTSFESAACPGWFLCTAMEADQPVSLTNMPDEGVMVTKFYFQEDE

SEQ ID NO: 907801 - protein, 159 aa, Homo sapiens; identical to SEQ ID NO: 907796

SEQ ID NO: 907802 - protein, 177 aa, Homo sapiens
MEICRGLRSHLITLLLFLFHSETICRPSGRKSSKMQAFRIWDVNQKTFYLRNNQLVAGYLQGPNVNLEEKIDVVPIEPHALFLGIHGGKMCLSCVKSGDETRLQLEAVNITDLSENRKQDKRFAFIRSDSGPTTSFESAACPGWFLCTAMEADQPVSLTNMPDEGVMVTKFYFQEDE

SEQ ID NO: 907803 - protein, 143 aa, Homo sapiens; identical to SEQ ID NO: 907799

SEQ ID NO: 907804 - protein, 143 aa, Homo sapiens; identical to SEQ ID NO: 907799

SEQ ID NO: 907805 - protein, 119 aa, Homo sapiens
FLYKPQLWARNGSPLPCCSHRMEICRGLRSHLITLLLFLFHSETICRPSGRKSSKMQAFRIWDVNQKTFYLRNNQLVAGYLQGPNVNLEGEWLPGKPMYVGITSLCPSVCSSMACLHKP

SEQ ID NO: 907806 - protein, 159 aa, Homo sapiens; identical to SEQ ID NO: 907796

SEQ ID NO: 907807 - protein, 930 aa, Homo sapiens
MPRAPHFMPLLLLLLLLSLPHTQAAFPQDPLPLLISDLQGTSPLSWFRGLEDDAVAAELGLDFQRFLTLNRTLLVAARDHVFSFDLQAEEEGEGLVPNKYLTWRSQDVENCAVRGKLTDECYNYIRVLVPWDSQTLLACGTNSFSPVCRSYGITSLQQEGEELSGQARCPFDATQSNVAIFAEGSLYSATAADFQASDAVVYRSLGPQPPLRSAKYDSKWLREPHFVQALEHGDHVYFFFREVSVEDARLGRVQFSRVARVCKRDMGGSPRALDRHWTSFLKLRLNCSVPGDSTFYFDVLQALTGPVNLHGRSALFGVFTTQTNSIPGSAVCAFYLDEIERGFEGKFKEQRSLDGAWTPVSEDRVPSPRPGSCAGVGGAALFSSSRDLPDDVLTFIKAHPLLDPAVPPVTHQPLLTLTSRALLTQVAVDGMAGPHSNITVMFLGSNDGTVLKVLTPGGRSGGPEPILLEEIDAYSPARCSGKRTAQTARRIIGLELDTEGHRLFVAFSGCIVYLPLSRCARHGACQRSCLASQDPYCGWHSSRGCVDIRGSGGTDVDQAGNQESMEHGDCQDGATGSQSGPGDSAYGVRRDLPPASASRSVPIPLLLASVAAAFALGASVSGLLVSCACRRAHRRRGKDIETPGLPRPLSLRSLARLHGGGPEPPPPSKDGDAVQTPQLYTTFLPPPEGVPPPELACLPTPESTPELPVKHLRAAGDPWEWNQNRNNAKEGPGRSRGGHAAGGPAPRVLVRPPPPGCPGQAVEVTTLEELLRYLHGPQPPRKGAEPPAPLTSRALPPEPAPALLGGPSPRPHECASPLRLDVPPEGRCASAPARPALSAPAPRLGVGGGRRLPFSGHRAPPALLTRVPSGGPSRYSGGPGKHLLYLGRPEGYRGRALKRVDVEKPQLSLKPPLVGPSSRQAVPNGGRFNF

SEQ ID NO: 907808 - protein, 879 aa, Homo sapiens
MPRAPHFMPLLLLLLLLSLPHTQAAFPQDPLPLLISDLQGTSPLSWFRGLEDDAVAAELGLDFQRFLTLNRTLLVAARDHVFSFDLQAEEEGEGLVPNKYLTWRSQDVENCAVRGKLTDECYNYIRVLVPWDSQTLLACGTNSFSPVCRSYGITSLQQEGEELSGQARCPFDATQSNVAIFAEGSLYSATAADFQASDAVVYRSLGPQPPLRSAKYDSKWLREPHFVQALEHGDHVYFFFREVSVEDARLGRVQFSRVARVCKRDMGGSPRALDRHWTSFLKLRLNCSVPGDSTFYFDVLQALTGPVNLHGRSALFGVFTTQTNSIPGSAVCAFYLDEIERGFEGKFKEQRSLDGAWTPVSEDRVPSPRPGSCAGVGGAALFSSSRDLPDDVLTFIKAHPLLDPAVPPVTHQPLLTLTSRALLTQVAVDGMAGPHSNITVMFLGSNDGTVLKVLTPGGRSGGPEPILLEEIDAYSPARCSGKRTAQTARRIIGLELDTEGHRLFVAFSGCIVYLPLSRCARHGACQRSCLASQDPYCGWHSSRGCVDIRGSGGTDVDQAGNQESMEHGDCQDGATGSQSGPGDSAYGVRRDLPPASASRSVPIPLLLASVAAAFALGASVSGLLVSCACRRAHRRRGKDIETPGLPRPLSLRSLARLHGGGPEPPPPSKDGDAVQTPQLYTTFLPPPEGVPPPELACLPTPESTPELPVKHLRAAGDPWEWNQNRNNAKEGPGRSRGGHAAGGPAPRVLVRPPPPGCPGQAVEVTTLEELLRYLHGPQPPRKGAEPPAPLTSRALPPEPAPALLGGPSPRPHECASPLRLDVPPEGRERSTASSVGSARVLSATSWTLFRTFHRPLAPHLQPSRLAESPEAPFRLGFIY

SEQ ID NO: 907809 - protein, 615 aa, Homo sapiens
MPRAPHFMPLLLLLLLLSLPHTQAAFPQDPLPLLISDLQGTSPLSWFRGLEDDAVAAELGLDFQRFLTLNRTLLVAARDHVFSFDLQAEEEGEGLVPNKYLTWRSQDVENCAVRGKLTDECYNYIRVLVPWDSQTLLACGTNSFSPVCRSYGITSLQQEGEELSGQARCPFDATQSNVAIFAEGSLYSATAADFQASDAVVYRSLGPQPPLRSAKYDSKWLREPHFVQALEHGDHVYFFFREVSVEDARLGRVQFSRVARVCKRDMGGSPRALDRHWTSFLKLRLNCSVPGDSTFYFDVLQALTGPVNLHGRSALFGVFTTQTNSIPGSAVCAFYLDEIERGFEGKFKEQRSLDGAWTPVSEDRVPSPRPGSCAGVGGAALFSSSRDLPDDVLTFIKAHPLLDPAVPPVTHQPLLTLTSRALLTQVAVDGMAGPHSNITVMFLGSNDGTVLKVLTPGGRSGGPEPILLEEIDAYSPARCSGKRTAQTARRIIGLELDTEGHRLFVAFSGCIVYLPLSRCARHGACQRSCLASQDPYCGWHSSRGCVDIRGSGGTDVDQAGNQESMEHGDCQDGATGSQSGPGDSAYGESSCPNLTFPCSAHIPECVSCSSSRAAF

SEQ ID NO: 907810 - protein, 930 aa, Homo sapiens; identical to SEQ ID NO: 907807

SEQ ID NO: 907811 - protein, 611 aa, Homo sapiens
MPRAPHFMPLLLLLLLLSLPHTQAAFPQDPLPLLISDLQGTSPLSWFRGLEDDAVAAELGLDFQRFLTLNRTLLVAARDHVFSFDLQAEEEGEGLVPNKYLTWRSQDVENCAVRGKLTDECYNYIRVLVPWDSQTLLACGTNSFSPVCRSYGITSLQQEGEELSGQARCPFDATQSNVAIFAEGSLYSATAADFQASDAVVYRSLGPQPPLRSAKYDSKWLREPHFVQALEHGDHVYFFFREVSVEDARLGRVQFSRVARVCKRDMGGSPRALDRHWTSFLKLRLNCSVPGDSTFYFDVLQALTGPVNLHGRSALFGVFTTQTNSIPGSAVCAFYLDEIERGFEGKFKEQRSLDGAWTPVSEDRVPSPRPGSCAGVGGAALFSSSRDLPDDVLTFIKAHPLLDPAVPPVTHQPLLTLTSRALLTQVAVDGMAGPHSNITVMFLGSNDGTVLKVLTPGGRSGGPEPILLEEIDAYSPARCSGKRTAQTARRIIGLELDTEGHRLFVAFSGCIVYLPLSRCARHGACQRSCLASQDPYCGWHSSRGCVDIRGSGGTDVDQAGNQESMEHGDCQDGATGSQSGPGDSAYGVRRDLPPASASRSGPAGGQSGKVS

SEQ ID NO: 907812 - protein, 614 aa, Homo sapiens
MPRAPHFMPLLLLLLLLSLPHTQAAFPQDPLPLLISDLQGTSPLSWFRGLEDDAVAAELGLDFQRFLTLNRTLLVAARDHVFSFDLQAEEEGEGLVPNKYLTWRSQDVENCAVRGKLTDECYNYIRVLVPWDSQTLLACGTNSFSPVCRSYGITSLQQEGEELSGQARCPFDATQSNVAIFAEGSLYSATAADFQASDAVVYRSLGPQPPLRSAKYDSKWLREPHFVQALEHGDHVYFFFREVSVEDARLGRVQFSRVARVCKRDMGGSPRALDRHWTSFLKLRLNCSVPGDSTFYFDVLQALTGPVNLHGRSALFGVFTTQTNSIPGSAVCAFYLDEIERGFEGKFKEQRSLDGAWTPVSEDRVPSPRPGSCAGVGGAALFSSSRDLPDDVLTFIKAHPLLDPAVPPVTHQPLLTLTSRALLTQVAVDGMAGPHSNITVMFLGSNDGTVLKVLTPGGRSGGPEPILLEEIDAYSPARCSGKRTAQTARRIIGLELDTEGHRLFVAFSGCIVYLPLSRCARHGACQRSCLASQDPYCGWHSSRGCVDIRGSGGTDVDQAGNQESMEHGDCQGKQKRQLLLQPKLHMAMMATDTIPGLAFCPSLLLWHSHPISSS

SEQ ID NO: 907813 - protein, 399 aa, Homo sapiens
MARRFQEELAAFLFEYDTPRMVLVRNKKVGVIFRLIQLVVLVYVIGWVFLYEKGYQTSSGLISSVSVKLKGLAVTQLPGLGPQVWDVADYVFPAQGDNSFVVMTNFIVTPKQTQGYCAEHPEGGICKEDSGCTPGKAKRKAQGIRTGKCVAFNDTVKTCEIFGWCPVEVDDDIPRPALLREAENFTLFIKNSISFPRFKVNRRNLVEEVNAAHMKTCLFHKTLHPLCPVFQLGYVVQESGQNFSTLAEKGGVVGITIDWHCDLDWHVRHCRPIYEFHGLYEEKNLSPGFNFRFARHFVENGTNYRHLFKVFGIRFDILVDGKAGKFDIIPTMTTIGSGIGIFGVATVLCDLLLLHILPKRHYYKQKKFKYAEDMGPGAAERDLAATSSTLGLQENMRTS

SEQ ID NO: 907814 - protein, 399 aa, Homo sapiens; identical to SEQ ID NO: 907813

SEQ ID NO: 907815 - protein, 175 aa, Homo sapiens
MARRFQEELAAFLFEYDTPRMVLVRNKKVGVIFRLIQLVVLVYVIGWVFLYEKGYQTSSGLISSVSVKLKGLAVTQLPGLGPQVWDVADYVFPAQGDNSFVVMTNFIVTPKQTQGYCAEHPEGGICKEDSGCTPGKAKRKAQGIRTGKCVAFNDTVKTCEIFGWCPVEVDDDIPR

SEQ ID NO: 907816 - protein, 160 aa, Homo sapiens
RRGLSQSMFAVEPQPLATPKMPIPEPMVVIVGMMSNFPAWGRTELGWNHLGPLRVLQGLIHPPGNWPPVRSDPARASPPGTEVGCGGLRTHPRIPTLSPCPSLTQATVLCDLLLLHILPKRHYYKQKKFKYAEDMGPGAAERDLAATSSTLGLQENMRTS

SEQ ID NO: 907817 - protein, 145 aa, Homo sapiens
MATWALLLLAAMLLGNPGLVFSRLSPEYYDLARAHLRDEEKSCPCLAQEGPQGDLLTKTQELGRDYRTCLTIVQKLKKMVDKPTQRSVSNAATRVCRTGRSRWRDVCRNFMRRYQSRVTQGLVAGETAQQICEDLRLCIPSTGPL

SEQ ID NO: 907818 - protein, 130 aa, Homo sapiens
MEGLVFSRLSPEYYDLARAHLRDEEKSCPCLAQEGPQGDLLTKTQELGRDYRTCLTIVQKLKKMVDKPTQRSVSNAATRVCRTGRSRWRDVCRNFMRRYQSRVTQGLVAGETAQQICEDLRLCIPSTGPL

SEQ ID NO: 907819 - protein, 130 aa, Homo sapiens; identical to SEQ ID NO: 907818

SEQ ID NO: 907820 - protein, 116 aa, Homo sapiens
MEGLVFSRLSPEYYDLARAHLRDEEKSCPCLAQEGPQGDLLTKTQELGRDYRTCLTIVQKLKKMVDKPTQDLTLRPRLECTGVILAHCNLSSLAQAILLSKPPEYLGLQVCATMPS

SEQ ID NO: 907821 - protein, 116 aa, Homo sapiens; identical to SEQ ID NO: 907820

SEQ ID NO: 907822 - protein, 162 aa, Homo sapiens
MATWALLLLAAMLLGNPGLVFSRLSPEYYDLARAHLRDEEKSCPCLAQEGPQGDLLTKTQELGRDYRTCLTIVQKLKKMVDKPTQRSVSNAATRVCRTGRSRWRDVCRNFMRRYQSRVTQGLVAGETAQQICEDLRLCIPSTGPNNLLRLPTGFQDVPLGPL

SEQ ID NO: 907823 - protein, 104 aa, Homo sapiens
MATWALLLLAAMLLGNPGLVFSRLSPEYYDLARAHLRDEEKSCPCLAQEGPQGDLLTKTQELGRDYRTCLTIVQKLKKMVDKPTQVRPRGYRASCLLLNGGASL

SEQ ID NO: 907824 - protein, 131 aa, Homo sapiens
MWTGLVFSRLSPEYYDLARAHLRDEEKSCPCLAQEGPQGDLLTKTQELGRDYRTCLTIVQKLKKMVDKPTQRSVSNAATRVCRTGRSRWRDVCRNFMRRYQSRVTQGLVAGETAQQICEDLRLCIPSTGPL

SEQ ID NO: 907825 - protein, 130 aa, Homo sapiens
MGTRCQLLAPSTPIARAAGTCRVAELGRTHPITMSTVVLLLQRSVSNAATRVCRTGRSRWRDVCRNFMRRYQSRVTQGLVAGETAQQICEDLRLCIPSTGPTTCSGCRLASRMCLWVCSVGSGGSGTLSK

SEQ ID NO: 907826 - protein, 102 aa, Homo sapiens
MGTRCQLLAPSTPIARAAGTCRVAELGRTHPITMSTVVLLLQRSVSNAATRVCRTGRSRWRDVCRNFMRRYQSRVTQGLVAGETAQQICEDLRLCIPSTGPL

SEQ ID NO: 907827 - protein, 111 aa, Homo sapiens [sequence omitted]

SEQ ID NO: 907828 - protein, 183 aa, Homo sapiens [sequence omitted]

SEQ ID NO: 907829 - protein, 308 aa, Homo sapiens
MATFISFSRRGIGAKTKGGSDIHCLVQVVLQGSRASVRQQHDNSLKFLGYCPQENSLWPKLTMKEHLELYAAVKGLGKEDAALSISRLVEALKLQEQLKAPVKTLSEGIKRKLCFVLSILGNPSVVLLDEPFTGMDPEGQQQMWQILQATVKNKERGTLLTTHYMSEAEAVCDRMAMMVSGTLRCIGSIQHLKNKFGRDYLLEIKMKEPTQVEALHTEILKLFPQAAWQERYSSLMAYKLPVEDVHPLSRAFFKLEAMKQTFNLEEYSLSQATLEQVFLELCKEQELGNVDDKIDTTVEWKLLPQEDP

SEQ ID NO: 907830 - protein, 308 aa, Homo sapiens; identical to SEQ ID NO: 907829

SEQ ID NO: 907831 - protein, 215 aa, Homo sapiens
RGFPVHPWLGADGLFLALQLCFVLSILGNPSVVLLDEPFTGMDPEGQQQMWQILQATVKNKERGTLLTTHYMSEAEAVCDRMAMMVSGTLRCIGSIQHLKNKFGRDYLLEIKMKEPTQVEALHTEILKLFPQAAWQERYSSLMAYKLPVEDVHPLSRAFFKLEAMKQTFNLEEYSLSQATLEQVFLELCKEQELGNVDDKIDTTVEWKLLPQEDP

SEQ ID NO: 907832 - protein, 108 aa, Homo sapiens
ISPRSRETHPNPEEPEEEDEDVQAERVQAANALTAPNLEEEPVITASCLHKEYYETKKSCFSTRKKKIAIRNVSFCVKKGLNNCSFYYYYNVPYSLDLRLQRGQIFIH

SEQ ID NO: 907833 - protein, 276 aa, Homo sapiens
MATFISFSRRGIGAKTKGGSDIHCLVQVVLQGSRASVRQQHDNSLKFLGYCPQENSLWPKLTMKEHLELYAAVKGLGKEDAALSISRLVEALKLQEQLKAPVKTLSEGIKRKLCFVLSILGNPSVVLLDEPFTGMDPEGQQQMWQILQATVKNKERGTLLTTHYMSEAEAVCDRMAMMVSGTLRCIGSIQHLKNKFGRDYLLEIKMKEPTQVEALHTEILKLFPQAAWQERYSSLMAYKLPVEDVHPLSRAFFKLEAMKQTFNLEEYSLSQATLEQ

SEQ ID NO: 907834 - protein, 102 aa, Homo sapiens
FLPPFSSPDPPLRRPVSSGSRAPEPYSSLMAYKLPVEDVHPLSRAFFKLEAMKQTFNLEEYSLSQATLEQVFLELCKEQELGNVDDKIDTTVEWKLLPQEDP

SEQ ID NO: 907835 - protein, 391 aa, Homo sapiens
ISPRSRETHPNPEEPEEEDEDVQAERVQAANALTAPNLEEEPVITASCLHKEYYETKKSCFSTRKKKIAIRNVSFCVKKGEVLGLLGHNGAGKSTSIKMITGCTKPTAGVVVLQGSRASVRQQHDNSLKFLGYCPQENSLWPKLTMKEHLELYAAVKGLGKEDAALSISRLVEALKLQEQLKAPVKTLSEGIKRKLCFVLSILGNPSVVLLDEPFTGMDPEGQQQMWQILQATVKNKERGTLLTTHYMSEAEAVCDRMAMMVSGTLRCIGSIQHLKNKFGRDYLLEIKMKEPTQVEALHTEILKLFPQAAWQERYSSLMAYKLPVEDVHPLSRAFFKLEAMKQTFNLEEYSLSQATLEQVFLELCKEQELGNVDDKIDTTVEWKLLPQEDP

SEQ ID NO: 907836 - protein, 183 aa, Homo sapiens [sequence omitted]

SEQ ID NO: 907837 - protein, 306 aa, Homo sapiens
MATFISFSRRGIGAKTKGGSDIHCLVQVVLQGSRASVRQQHDNSLKFLGYCPQENSLWPKLTMKEHLELYAAVKGLGKEDAALSISRLVEALKLQEQLKAPVKTLSEGIKRKLCFVLSILGNPSVVLLDEPFTGMDPEGQQQMWQILQATVKNKERGTLLTTHYMSEAEAVCDRMAMMVSGTLRCIGSIQHLKNKFGRDYLLEIKMKEPTQVEALHTEILKLFPQAAWQERYSSLMAYKLPVEDVHPLSRAFFKLEAMKQTFNLEEYSLSQATLEQKQCEASLDADIGTTLLVQPVVSESQLKKSA

SEQ ID NO: 907838 - protein, 398 aa, Homo sapiens
RTSARAHCSPADSWARVRACASLGSWRGPRGEGWKMSMDVTFLGTGAAYPSPTRGASAVVLRCEGECWLFDCGEGTQTQLMKSQLKAGRITKIFITHLHGDHFFGLPGLLCTISLQSGSMVSKQPIEIYGPVGLRDFIWRTMELSHTELVFHYVVHELVPTADQCPAEELKEFAHVNRADSPPKEEQGRTILLDSEENSYLLFDDEQFVVKAFRLFHRIPSFGFSVVEKKRPGKLNAQKLKDLGVPPGPAYGKLKNGISVVLENGVTISPQDVLKKPIVGRKICILGDCSGVVGDGGVKLCFEADLLIHEATLDDAQMDKAKEHGHSTPQMAATFAKLCRAKRLVLTHFSQRYKPVALAREGETDGIAELKKQAESVLDLQEVTLAEDFMVISIPIKK

SEQ ID NO: 907839 - protein, 380 aa, Homo sapiens
RTSARAHCSPADSWARVRACASLGSWRGPRGEGWKMSMDVTFLGTGAAYPSPTRGASAVVLRCEGECWLFDCGEGTQTQLHGDHFFGLPGLLCTISLQSGSMVSKQPIEIYGPVGLRDFIWRTMELSHTELVFHYVVHELVPTADQCPAEELKEFAHVNRADSPPKEEQGRTILLDSEENSYLLFDDEQFVVKAFRLFHRIPSFGFSVVEKKRPGKLNAQKLKDLGVPPGPAYGKLKNGISVVLENGVTISPQDVLKKPIVGRKICILGDCSGVVGDGGVKLCFEADLLIHEATLDDAQMDKAKEHGHSTPQMAATFAKLCRAKRLVLTHFSQRYKPVALAREGETDGIAELKKQAESVLDLQEVTLAEDFMVISIPIKK

SEQ ID NO: 907840 - protein, 398 aa, Homo sapiens; identical to SEQ ID NO: 907838

SEQ ID NO: 907841 - protein, 123 aa, Homo sapiens
RTSARAHCSPADSWARVRACASLGSWRGPRGEGWKMSMDVTFLGTGAAYPSPTRGASAVVLRCEGECWLFDCGEGTQTQLMKSQLKAEFPHLGFQSWKRNAQVNSMHRNLKTLVFHQVLPMGS

SEQ ID NO: 907842 - protein, 165 aa, Homo sapiens
DNFQQEEVERIKWILHHGNLTAPHVTVAGLLLVFFLFGAPLDSLPSMKALSPVRGCYEAVCCLSERSLAIARGRGKGPAAEEPLSLLDDMNHCYSRLRELVPGVPRGTQLSQVEILQRVIDYILDLQVVLAEPAPGPPDGPHLPIQTAELAPELVISNDKRSFCH

SEQ ID NO: 907843 - protein, 67 aa, Homo sapiens
LSAFMLGSEIQRCPKEKENQKKSRYSDLQVVLAEPAPGPPDGPHLPIQTAELAPELVISNDKRSFCH

SEQ ID NO: 907844 - protein, 119 aa, Homo sapiens
MKALSPVRGCYEAVCCLSERSLAIARGRGKGPAAEEPLSLLDDMNHCYSRLRELVPGVPRGTQLSQVEILQRVIDYILDLQVVLAEPAPGPPDGPHLPIQTAELAPELVISNDKRSFCH

SEQ ID NO: 907845 - protein, 165 aa, Homo sapiens; identical to SEQ ID NO: 907842

SEQ ID NO: 907846 - protein, 160 aa, Homo sapiens
MKALSPVRGCYEAVCCLSERSLAIARGRGKGPAAEEPLSLLDDMNHCYSRLRELVPGVPRGTQLSQVEILQRVIDYILDLQVVLAEPAPGPPDGPHLPIQVSLEVGTGLNTQARMLRDPRSSRLPRVTLPSFPLIRQPSSLRNLSSPTTKGAFATDSAVS

SEQ ID NO: 907847 - protein, 160 aa, Homo sapiens; identical to SEQ ID NO: 907846

SEQ ID NO: 907848 - protein, 160 aa, Homo sapiens; identical to SEQ ID NO: 907846

SEQ ID NO: 907849 - protein, 119 aa, Homo sapiens; identical to SEQ ID NO: 907844

SEQ ID NO: 907850 - protein, 119 aa, Homo sapiens; identical to SEQ ID NO: 907844

SEQ ID NO: 907851 - protein, 119 aa, Homo sapiens; identical to SEQ ID NO: 907844

SEQ ID NO: 907852 - protein, 119 aa, Homo sapiens; identical to SEQ ID NO: 907844

SEQ ID NO: 907853 - protein, 174 aa, Homo sapiens
MKALSPVRGCYEAVCCLSERSLAIARGRGKGPAAEEPLSLLDDMNHCYSRLRELSCRKPDGRDGPQLRPAHLTSPNPFLETKPGAQERRTVNLWPERARASSGHQLGDVTLLPPHPQVLRSFQSVEVWKEWLLSKLCQGGGRAGLLVSLEKGSVALIYELYNRVYRFCTFFTGR

SEQ ID NO: 907854 - protein, 125 aa, Homo sapiens
MGFPCYVRPMRQAARGRTWKRKRWSGGVLSSPGRKSQTLPMEASSEPPLDAKSDVTNQLVDFQWKLGMAVSSDTCRSLKYPYVAVMLKVADHSGQVKTKCFEMTIPQFQNFYRQFKEIAAVIETV

SEQ ID NO: 907855 - protein, 125 aa, Homo sapiens; identical to SEQ ID NO: 907854

SEQ ID NO: 907856 - protein, 125 aa, Homo sapiens; identical to SEQ ID NO: 907854

SEQ ID NO: 907857 - protein, 125 aa, Homo sapiens; identical to SEQ ID NO: 907854

SEQ ID NO: 907858 - protein, 138 aa, Homo sapiens
MGFPCYVRPMRQAARGRTWKRKRWSGGVLSSPGRKSQTLPMEASSEPPLDAKSDVTNQLVDFQWKLGMAVSSDTCRSLKYPYVAVMLKVADHSGQVKTKCFEMTIPQFQPQLLATSSLLSASNFYRQFKEIAAVIETV

SEQ ID NO: 907859 - protein, 138 aa, Homo sapiens; identical to SEQ ID NO: 907858

SEQ ID NO: 907860 - protein, 125 aa, Homo sapiens; identical to SEQ ID NO: 907854

SEQ ID NO: 907861 - protein, 125 aa, Homo sapiens; identical to SEQ ID NO: 907854

SEQ ID NO: 907862 - protein, 135 aa, Homo sapiens
NHYHHTYLSIILHYQLIFLSLSHLLILILFNITTPPTPLSSPGRKSQTLPMEASSEPPLDAKSDVTNQLVDFQWKLGMAVSSDTCRSLKYPYVAVMLKVADHSGQVKTKCFEMTIPQFQNFYRQFKEIAAVIETV

SEQ ID NO: 907863 - protein, 125 aa, Homo sapiens; identical to SEQ ID NO: 907854

SEQ ID NO: 907864 - protein, 96 aa, Homo sapiens
RRAAESYSETDARWLPIARQQGRRTPCSTLVDFQWKLGMAVSSDTCRSLKYPYVAVMLKVADHSGQVKTKCFEMTIPQFQNFYRQFKEIAAVIETV

SEQ ID NO: 907865 - protein, 128 aa, Homo sapiens
MSASAQQLAEELQIFGLDCEEALIEKLVELCVQYGQNEEGMVGELIAFCTSTHKVGLTSEILNSFEHEFLSKRLSKARHSTCKDSGHAGARDIVSIQELIEVEEEEEILLNSYTTPSKLFFCFRVHHK

SEQ ID NO: 907866 - protein, 520 aa, Homo sapiens
MSASAQQLAEELQIFGLDCEEALIEKLVELCVQYGQNEEGMVGELIAFCTSTHKVGLTSEILNSFEHEFLSKRLSKARHSTCKDSGHAGARDIVSIQELIEVEEEEEILLNSYTTPSKGSQKRAISTPETPLTKRSVSTRSPHQLLSPSSFSPSATPSQKYNSRSNRGEVVTSFGLAQGVSWSGRGGAGNISLKVLGCPEALTGSYKSMFQKLPDIREVLTCKIEELGSELKEHYKIEAFTPLLAPAQEPVTLLGQIGCDSNGKLNNKSVILEGDREHSSGAQIPVDLSELKEYSLFPGQVVIMEGINTTGRKLVATKLYEGVPLPFYQPTEEDADFEQSMVLVACGPYTTSDSITYDPLLDLIAVINHDRPDVCILFGPFLDAKHEQVENCLLTSPFEDIFKQCLRTIIEGTRSSGSHLVFVPSLRDVHHEPVYPQPPFSYSDLSREDKKQVQFVSEPCSLSINGVIFGLTSTDLLFHLGAEEISSSSGTSDRFSRILKHILTQRSCLSPQMSSSSRQS

SEQ ID NO: 907867 - protein, 598 aa, Homo sapiens
MSASAQQLAEELQIFGLDCEEALIEKLVELCVQYGQNEEGMVGELIAFCTSTHKVGLTSEILNSFEHEFLSKRLSKARHSTCKDSGHAGARDIVSIQELIEVEEEEEILLNSYTTPSKGSQKRAISTPETPLTKRSVSTRSPHQLLSPSSFSPSATPSQKYNSRSNRGEVVTSFGLAQGVSWSGRGGAGNISLKVLGCPEALTGSYKSMFQKLPDIREVLTCKIEELGSELKEHYKIEAFTPLLAPAQEPVTLLGQIGCDSNGKLNNKSVILEGDREHSSGAQIPVDLSELKEYSLFPGQVVIMEGINTTGRKLVATKLYEGVPLPFYQPTEEDADFEQSMVLVACGPYTTSDSITYDPLLDLIAVINHDRPDVCILFGPFLDAKHEQVENCLLTSPFEDIFKQCLRTIIEGTRSSGSHLVFVPSLRDVHHEPVYPQPPFSYSDLSREDKKQVQFVSEPCSLSINGVIFGLTSTDLLFHLGAEEISSSSGTSDRFSRILKHILTQRSYYPLYPPQEDMAIDYESFYVYAQLPVTPDVLIIPSELRYFVKDVLGCVCVNPGRLTKGQVGGTFARLYLRRPAADGAERQSPCIAVQVVRI

SEQ ID NO: 907868 - protein, 139 aa, Homo sapiens
VRKELCAEQLLATAAEDHRCNDGPQLNSSSGTSDRFSRILKHILTQRSYYPLYPPQEDMAIDYESFYVYAQLPVTPDVLIIPSELRYFVKDVLGCVCVNPGRLTKGQVGGTFARLYLRRPAADGAERQSPCIAVQVVRI

SEQ ID NO: 907869 - protein, 598 aa, Homo sapiens; identical to SEQ ID NO: 907867

SEQ ID NO: 907870 - protein, 390 aa, Homo sapiens [sequence omitted]

SEQ ID NO: 907871 - protein, 569 aa, Homo sapiens
MSASAQQLAEELQIFGLDCEEALIEKLVELCVQYGQNEEGMVGELIAFCTSTHKVGLTSEILNSFEHEFLSKRLSKARHSTCKDSGHAGARDIVSIQELIEVEEEEEILLNSYTTPSKGSQKRAISTPETPLTKRSVSTRSPHQLLSPSSFSPSATPSQKYNSRSNRGEVVTSFGLAQGVSWSGRGGAGNISLKVLGCPEALTGSYKSMFQKLPDIREVLTCKIEELGSELKEHYKIEAFTPLLAPAQEPVTLLGQIGCDSNGKLNNKSVILEGDREHSSGAQIPVDLSELKEYSLFPGQVVIMEGINTTGRKLVATKLYEGVPLPFYQPTEEDADFEQSMVLVACGPYTTSDSITYDPLLDLIAVINHDRPDVCILFGPFLDAKHEQVENCLLTSPFEDIFKQCLRTIIEGTRSSGSHLVFVPSLRDVHHEPVYPQPPFSYSDLSREDKKQVQFVSEPCSLSINGVIFGLTSTDLLFHLGAEEISSSSGTSDRFSRILKHILTQRSYYPLYPPQEDMAIDYESFYVYAQLPVTPDVLIIPSELRYFVKVGLNSAFSQKHQNPVFDFPF

SEQ ID NO: 907872 - protein, 394 aa, Homo sapiens
MSASAQQLAEELQIFGLDCEEALIEKLVELCVQYGQNEEGMVGELIAFCTSTHKVGLTSEILNSFEHEFLSKRLSKARHSTCKDSGHAGARDIVSIQELIEVEEEEEILLNSYTTPSKGSQKRAISTPETPLTKRSVSTRSPHQLLSPSSFSPSATPSQKYNSRSNRGEVVTSFGLAQGVSWSGRGGAGNISLKVLGCPEALTGSYKSMFQKLPDIREVLTCKIEELGSELKEHYKIEAFTPLLAPAQEPVTLLGQIGCDSNGKLNNKSVILEGDREHSSGAQIPVDLSELKEYSLFPGQVVIMEGINTTGRKLVATKLYEGVPLPFYQPTEEDADFEQSMVLVACGPYTTSDSITYDPLLDLIAVINHDRPDVCILLGLSWMLRHEPGGAIVY

SEQ ID NO: 907873 - protein, 1500 aa, Homo sapiens
VAPVKLLGVGGEGMGSGGLRCLEMAAPSPASSPGGSGCRVASMALQGPYLGLEVGVHGQQAHEGQGIEPHTEADVQVREAPSQHLQPLASAPSSSGLQLALRDVDQLLGAAAHAPDLQRAPEAVLLSPGLSQQCSPCVSLAQVPLPKRLLLLIPLKLCHVLRRLLAWCSSEARGSFGGRLASGPSAGTCGVVFVGDFIISGFPGSRVEFRLSSSRAPIASSGAAATFCTSLRAADPAAGKSRMMLLGEKWALRKLRVASTSHTGTSRRSLWQAEQSSRGGHCTLGNWGSSLGAPARRALTLLWLDQSQRTAALGLPTRCMEAAAICSKWLAQSRQPEEVAHVASDGWEDLLGLGCFLCVVYILPSCLHSQEVEEDPQGAGKAPEMRLTPLAANPVHLLGKNGTLFPVVQGSFKETVGNFISLLPLEPFIHGVQEVLDYGPAREILGQHCHKLFQGHQALPFQDREPAHFYPQDVVQCRFQVSHVDLGAICQFPNSGSYLVSSGWCNCGLGSLPGEPRESLQVSGIEGPGFHEHGDSGDRAIPEQQVARGEVGDTKLSHHIGLCVQHPAHRHAFVLGQVQSHLSTQVGASLFKDQTASLDVYAKYVLRSICQQEWVGERCLKSLCEDSNDLQDPVLSSAQAQRLMQLICYPHRLLDNEDGENPQRQRIKRILQNLDQWTMRQSSLELQLMIKQTPNNEMNSLLENIAKATIEVFQQSAETGSSSGSTASNMPSSSKTKPVLSSLERSGVWLVAPLIAKLPTSVQGHVLKAAGEELEKGQHLGSSSRKERDRQKQKSMSLLSQQPFLSLVLTCLKGQDEQREGLLTSLYSQVHQIVNNWRDDQYLDDCKPKQLMHEALKLRLNLVGGMFDTVQRSTQQTTEWAMLLLEIIISGTVDMQSNNELFTTVLDMLSVLINGTLAADMSSISQGSMEENKRAYMNLAKKLQKELGERQSDSLEKVRQLLPLPKQTRDVITCEPQGSLIDTKGNKIAGFDSIFKKEGLQVSTKQKISPWDLFEGLKPSAPLSWGWFGTVRVDRRVARGEEQQRLLLYHTHLRPRPRAYYLEPLPLPPEDEEPPAPTLLEPEKKAPEPPKTDKPGAAPPSTEERKKKSTKGKKRSQPATKTEDYGMGPGRSGPYGVTVPPDLLHHPNPGSITHLNYRQGSIGLYTQNQPLPAGGPRVDPYRPVRLPMQKLPTRPTYPGVLPTTMTGVMGLEPSSYKTSVYRQQQPAVPQGQRLRQQLQQSQGMLGQSSVHQMTPSSSYGLQTSQGYTPYVSHVGLQQHTGPAGTMVPPSYSSQPYQSTHPSTNPTLVDPTRHLQQRPSGYVHQQAPTYGHGLTSTQRFSHQTLQQTPMISTMTPMSAQGVQAGVRSTAILPEQQQQQQQQQQQQQQQQQQQQQQQQQQYHIRQQQQQQILRQQQQQQQQQQQQQQQQQQQQQQQQQQHQQQQQQQAAPPQPQPQSQPQFQRQGLQQTQQQQQTAALVRQLQQQLSNTQPQPSTNIFGRY

SEQ ID NO: 907874 - protein, 2210 aa, Homo sapiens
MKQSMPSLHTKKILFCYFHLTNSWCLRRYGLGKMAAFGILSYEHRPLKRPRLGPPDVYPQDPKQKEDELTALNVKQGFNNQPAVSGDEHGSAKNVSFNPAKISSNFSSIIAEKLRCNTLPDTGRRKPQVNQKDNFWLVTARSQSAINTWFTDLAGTKPLTQLAKKVPIFSKKEEVFGYLAKYTVPVMRAAWLIKMTCAYYAAISETKVKKRHVDPFMEWTQIITKYLWEQLQKMAEYYRPGPAGSGGCGSTIGPLPHDVEVAIRQWDYTEKLAMFMFQDGMLDRHEFLTWVLECFEKIRPGEDELLKLLLPLLLRYSGEFVQSAYLSRRLAYFCTRRLALQLDGVSSHSSHVISAQSTSTLPTTPAPQPPTSSTPSTPFSDLLMCPQHRPLVFGLSCILQTILLCCPSALVWHYSLTDSRIKTGSPLDHLPIAPSNLPMPEGNSAFTQQVRAKLREIEQQIKERGQAVEVRWSFDKCQEATAGFTIGRVLHTLEVLDSHSFERSDFSNSLDSLCNRIFGLGPSKDGHEISSDDDAVVSLLCEWAVSCKRSGRHRAMVVAKLLEKRQAEIEAERCGESEAADEKGSIASGSLSAPSAPIFQDVLLQFLDTQAPMLTDPRSESERVEFFNLVLLFCELIRHDVFSHNMYTCTLISRGDLAFGAPGPRPPSPFDDPADDPEHKEAEGSSSSKLEDPGLSESMDIDPSSSVLFEDMEKPDFSLFSPTMPCEGKGSPSPEKPDVEKEVKPPPKEKIEGTLGVLYDQPRHVQYATHFPIPQEESCSHECNQRLVVLFGVGKQRDDARHAIKKITKDILKVLNRKGTAETDQLAPIVPLNPGDLTFLGGEDGQKRRRNRPEAFPTAEDIFAKFQHLSHYDQHQVTAQVSRNVLEQITSFALGMSYHLPLVQHVQFIFDLMEYSLSISGLIDFAIQLLNELSVVEAELLLKSSDLVGSYTTSLCLCIVAVLRHYHACLILNQDQMAQVFEGLCGVVKHGMNRSDGSSAERCILAYLYDLYTSCSHLKNKFGELFSDFCSKVKNTIYCNVEPSESNMRWAPEFMIDTLENPAAHTFTYTGLGKSLSENPANRYSFVCNALMHVCVGHHDPDRVNDIAILCAELTGYCKSLSAEWLGVLKALCCSSNNGTCGFNDLLCNVDVSDLSFHDSLATFVAILIARQCLLLEDLIRCAAIPSLLNAACSEQDSEPGARLTCRILLHLFKTPQLNPCQSDGNKPTVGIRSSCDRHLLAASQNRIVDGAVFAVLKAVFVLGDAELKGSGFTVTGGTEELPEEEGGGGSGGRRQGGRNISVETASLDVYAKYVLRSICQQEWVGERCLKSLCEDSNDLQDPVLSSAQAQRLMQLICYPHRLLDNEDGENPQRQRIKRILQNLDQWTMRQSSLELQLMIKQTPNNEMNSLLENIAKATIEVFQQSAETGSSSGSTASNMPSSSKTKPVLSSLERSGVWLVAPLIAKLPTSVQGHVLKAAGEELEKGQHLGSSSRKERDRQKQKSMSLLSQQPFLSLVLTCLKGQDEQREGLLTSLYSQVHQIVNNWRDDQYLDDCKPKQLMHEALKLRLNLVGGMFDTVQRSTQQTTEWAMLLLEIIISGTVDMQSNNELFTTVLDMLSVLINGTLAADMSSISQGSMEENKRAYMNLAKKLQKELGERQSDSLEKVRQLLPLPKQTRDVITCEPQGSLIDTKGNKIAGFDSIFKKEGLQVSTKQKISPWDLFEGLKPSAPLSWGWFGTVRVDRRVARGEEQQRLLLYHTHLRPRPRAYYLEPLPLPPEDEEPPAPTLLEPEKKAPEPPKTDKPGAAPPSTEERKKKSTKGKKRSQPATKTEDYGMGPGRSGPYGVTVPPDLLHHPNPGSITHLNYRQGSIGLYTQNQPLPAGGPRVDPYRPVRLPMQKLPTRPTYPGVLPTTMTGVMGLEPSSYKTSVYRQQQPAVPQGQRLRQQLQQSQGMLGQSSVHQMTPSSSYGLQTSQGYTPYVSHVGLQQHTGPAGTMVPPSYSSQPYQSTHPSTNPTLVDPTRHLQQRPSGYVHQQAPTYGHGLTSTQRFSHQTLQQTPMISTMTPMSAQGVQAGVRSTAILPEQQQQQQQQQQQQQQQQQQQQQQQQQQYHIRQQQQQQILRQQQQQQQQQQQQQQQQQQQQQQQQQQHQQQQQQQAAPPQPQPQSQPQFQRQGLQQTQQQQQTAALVRQLQQQLSNTQPQPSTNIFGRY

SEQ ID NO: 907875 - protein, 2155 aa, Homo sapiens
KKQLNAAFLPQDELTALNVKQGFNNQPAVSGDEHGSAKNVSFNPAKISSNFSSIIAEKLRCNTLPDTGRRKPQVNQKDNFWLVTARSQSAINTWFTDLAGTKPLTQLAKKVPIFSKKEEVFGYLAKYTVPVMRAAWLIKMTCAYYAAISETKVKKRHVDPFMEWTQIITKYLWEQLQKMAEYYRPGPAGSGGCGSTIGPLPHDVEVAIRQWDYTEKLAMFMFQDGMLDRHEFLTWVLECFEKIRPGEDELLKLLLPLLLRYSGEFVQSAYLSRRLAYFCTRRLALQLDGVSSHSSHVISAQSTSTLPTTPAPQPPTSSTPSTPFSDLLMCPQHRPLVFGLSCILQTILLCCPSALVWHYSLTDSRIKTGSPLDHLPIAPSNLPMPEGNSAFTQQVRAKLREIEQQIKERGQAVEVRWSFDKCQEATAGFTIGRVLHTLEVLDSHSFERSDFSNSLDSLCNRIFGLGPSKDGHEISSDDDAVVSLLCEWAVSCKRSGRHRAMVVAKLLEKRQAEIEAERCGESEAADEKGSIASGSLSAPSAPIFQDVLLQFLDTQAPMLTDPRSESERVEFFNLVLLFCELIRHDVFSHNMYTCTLISRGDLAFGAPGPRPPSPFDDPADDPEHKEAEGSSSSKLEDPGLSESMDIDPSSSVLFEDMEKPDFSLFSPTMPCEGKGSPSPEKPDVEKEVKPPPKEKIEGTLGVLYDQPRHVQYATHFPIPQEESCSHECNQRLVVLFGVGKQRDDARHAIKKITKDILKVLNRKGTAETDQLAPIVPLNPGDLTFLGGEDGQKRRRNRPEAFPTAEDIFAKFQHLSHYDQHQVTAQVSRNVLEQITSFALGMSYHLPLVQHVQFIFDLMEYSLSISGLIDFAIQLLNELSVVEAELLLKSSDLVGSYTTSLCLCIVAVLRHYHACLILNQDQMAQVFEGLCGVVKHGMNRSDGSSAERCILAYLYDLYTSCSHLKNKFGELFSDFCSKVKNTIYCNVEPSESNMRWAPEFMIDTLENPAAHTFTYTGLGKSLSENPANRYSFVCNALMHVCVGHHDPDRVNDIAILCAELTGYCKSLSAEWLGVLKALCCSSNNGTCGFNDLLCNVDVSDLSFHDSLATFVAILIARQCLLLEDLIRCAAIPSLLNAACSEQDSEPGARLTCRILLHLFKTPQLNPCQSDGNKPTVGIRSSCDRHLLAASQNRIVDGAVFAVLKAVFVLGDAELKGSGFTVTGGTEELPEEEGGGGSGGRRQGGRNISVETASLDVYAKYVLRSICQQEWVGERCLKSLCEDSNDLQDPVLSSAQAQRLMQLICYPHRLLDNEDGENPQRQRIKRILQNLDQWTMRQSSLELQLMIKQTPNNEMNSLLENIAKATIEVFQQSAETGSSSGSTASNMPSSSKTKPVLSSLERSGVWLVAPLIAKLPTSVQGHVLKAAGEELEKGQHLGSSSRKERDRQKQKSMSLLSQQPFLSLVLTCLKGQDEQREGLLTSLYSQVHQIVNNWRDDQYLDDCKPKQLMHEALKLRLNLVGGMFDTVQRSTQQTTEWAMLLLEIIISGTVDMQSNNELFTTVLDMLSVLINGTLAADMSSISQGSMEENKRAYMNLAKKLQKELGERQSDSLEKVRQLLPLPKQTRDVITCEPQGSLIDTKGNKIAGFDSIFKKEGLQVSTKQKISPWDLFEGLKPSAPLSWGWFGTVRVDRRVARGEEQQRLLLYHTHLRPRPRAYYLEPLPLPPEDEEPPAPTLLEPEKKAPEPPKTDKPGAAPPSTEERKKKSTKGKKRSQPATKTEDYGMGPGRSGPYGVTVPPDLLHHPNPGSITHLNYRQGSIGLYTQNQPLPAGGPRVDPYRPVRLPMQKLPTRPTYPGVLPTTMTGVMGLEPSSYKTSVYRQQQPAVPQGQRLRQQLQQSQGMLGQSSVHQMTPSSSYGLQTSQGYTPYVSHVGLQQHTGPAGTMVPPSYSSQPYQSTHPSTNPTLVDPTRHLQQRPSGYVHQQAPTYGHGLTSTQRFSHQTLQQTPMISTMTPMSAQGVQAGVRSTAILPEQQQQQQQQQQQQQQQQQQQQQQQQQQYHIRQQQQQQILRQQQQQQQQQQQQQQQQQQQQQQQQQQHQQQQQQQAAPPQPQPQSQPQFQRQGLQQTQQQQQTAALVRQLQQQLSNTQPQPSTNIFGRY

SEQ ID NO: 907876 - protein, 2352 aa, Homo sapiens
MKQSMPSLHTKKILFCYFHLTNSWCLRRYGLGKMAAFGILSYEHRPLKRPRLGPPDVYPQDPKQKEDELTALNVKQGFNNQPAVSGDEHGSAKNVSFNPAKISSNFSSIIAEKLRCNTLPDTGRRKPQVNQKDNFWLVTARSQSAINTWFTDLAGTKPLTQLAKKVPIFSKKEEVFGYLAKYTVPVMRAAWLIKMTCAYYAAISETKVKKRHVDPFMEWTQIITKYLWEQLQKMAEYYRPGPAGSGGCGSTIGPLPHDVEVAIRQWDYTEKLAMFMFQDGMLDRHEFLTWVLECFEKIRPGEDELLKLLLPLLLRYSGEFVQSAYLSRRLAYFCTRRLALQLDGVSSHSSHVISAQSTSTLPTTPAPQPPTSSTPSTPFSDLLMCPQHRPLVFGLSCILQTILLCCPSALVWHYSLTDSRIKTGSPLDHLPIAPSNLPMPEGNSAFTQQVRAKLREIEQQIKERGQAVEVRWSFDKCQEATAGFTIGRVLHTLEVLDSHSFERSDFSNSLDSLCNRIFGLGPSKDGHEISSDDDAVVSLLCEWAVSCKRSGRHRAMVVAKLLEKRQAEIEAERCGESEAADEKGSIASGSLSAPSAPIFQDVLLQFLDTQAPMLTDPRSESERVEFFNLVLLFCELIRHDVFSHNMYTCTLISRGDLAFGAPGPRPPSPFDDPADDPEHKEAEGSSSSKLEDPGLSESMDIDPSSSVLFEDMEKPDFSLFSPTMPCEGKGSPSPEKPDVEKEVKPPPKEKIEGTLGVLYDQPRHVQYATHFPIPQEESCSHECNQRLVVLFGVGKQRDDARHAIKKITKDILKVLNRKGTAETDQLAPIVPLNPGDLTFLGGEDGQKRRRNRPEAFPTAEDIFAKFQHLSHYDQHQVTAQVSRNVLEQITSFALGMSYHLPLVQHVQFIFDLMEYSLSISGLIDFAIQLLNELSVVEAELLLKSSDLVGSYTTSLCLCIVAVLRHYHACLILNQDQMAQVFEGLCGVVKHGMNRSDGSSAERCILAYLYDLYTSCSHLKNKFGELFREERWKVRGSEWDLLPSSHDHPTQEERMARDPAACLGSFVDCVLHILLCYQEWALFLSRLAPRLYLWGPPSSPFSSLPSEAPVPYSHVVPFLPSLFCPISLFLSQDPSSLTFSFFSFLPFPDHPSTSAGLLQHYYLLSSIPGSDFCSKVKNTIYCNVEPSESNMRWAPEFMIDTLENPAAHTFTYTGLGKSLSENPANRYSFVCNALMHVCVGHHDPDRVNDIAILCAELTGYCKSLSAEWLGVLKALCCSSNNGTCGFNDLLCNVDVSDLSFHDSLATFVAILIARQCLLLEDLIRCAAIPSLLNAACSEQDSEPGARLTCRILLHLFKTPQLNPCQSDGNKPTVGIRSSCDRHLLAASQNRIVDGAVFAVLKAVFVLGDAELKGSGFTVTGGTEELPEEEGGGGSGGRRQGGRNISVETASLDVYAKYVLRSICQQEWVGERCLKSLCEDSNDLQDPVLSSAQAQRLMQLICYPHRLLDNEDGENPQRQRIKRILQNLDQWTMRQSSLELQLMIKQTPNNEMNSLLENIAKATIEVFQQSAETGSSSGSTASNMPSSSKTKPVLSSLERSGVWLVAPLIAKLPTSVQGHVLKAAGEELEKGQHLGSSSRKERDRQKQKSMSLLSQQPFLSLVLTCLKGQDEQREGLLTSLYSQVHQIVNNWRDDQYLDDCKPKQLMHEALKLRLNLVGGMFDTVQRSTQQTTEWAMLLLEIIISGTVDMQSNNELFTTVLDMLSVLINGTLAADMSSISQGSMEENKRAYMNLAKKLQKELGERQSDSLEKVRQLLPLPKQTRDVITCEPQGSLIDTKGNKIAGFDSIFKKEGLQVSTKQKISPWDLFEGLKPSAPLSWGWFGTVRVDRRVARGEEQQRLLLYHTHLRPRPRAYYLEPLPLPPEDEEPPAPTLLEPEKKAPEPPKTDKPGAAPPSTEERKKKSTKGKKRSQPATKTEDYGMGPGRSGPYGVTVPPDLLHHPNPGSITHLNYRQGSIGLYTQNQPLPAGGPRVDPYRPVRLPMQKLPTRPTYPGVLPTTMTGVMGLEPSSYKTSVYRQQQPAVPQGQRLRQQLQQSQGMLGQSSVHQMTPSSSYGLQTSQGYTPYVSHVGLQQHTGPAGTMVPPSYSSQPYQSTHPSTNPTLVDPTRHLQQRPSGYVHQQAPTYGHGLTSTQRFSHQTLQQTPMISTMTPMSAQGVQAGVRSTAILPEQQQQQQQQQQQQQQQQQQQQQQQQQQYHIRQQQQQQILRQQQQQQQQQQQQQQQQQQQQQQQQQQHQQQQQQQAAPPQPQPQSQPQFQRQGLQQTQQQQQTAALVRQLQQQLSNTQPQPSTNIFGRY

SEQ ID NO: 907877 - protein, 2327 aa, Homo sapiens
MKQSMPSLHTKKILFCYFHLTNSWCLRRYGLGKMAAFGILSYEHRPLKRPRLGPPDVYPQDPKQKEDELTALNVKQGFNNQPAVSGDEHGSAKNVSFNPAKISSNFSSIIAEKLRCNTLPDTGRRKPQVNQKDNFWLVTARSQSAINTWFTDLAGTKPLTQLAKKVPIFSKKEEVFGYLAKYTVPVMRAAWLIKMTCAYYAAISETKVKKRHVDPFMEWTQIITKYLWEQLQKMAEYYRPGPAGSGGCGSTIGPLPHDVEVAIRQWDYTEKLAMFMFQDGMLDRHEFLTWVLECFEKIRPGEDELLKLLLPLLLRYSGEFVQSAYLSRRLAYFCTRRLALQLDGVSSHSSHVISAQSTSTLPTTPAPQPPTSSTPSTPFSDLLMCPQHRPLVFGLSCILQTILLCCPSALVWHYSLTDSRIKTGSPLDHLPIAPSNLPMPEGNSAFTQQVRAKLREIEQQIKERGQAVEVRWSFDKCQEATAGFTIGRVLHTLEVLDSHSFERSDFSNSLDSLCNRIFGLGPSKDGHEISSDDDAVVSLLCEWAVSCKRSGRHRAMVVAKLLEKRQAEIEAERCGESEAADEKGSIASGSLSAPSAPIFQDVLLQFLDTQAPMLTDPRSESERVEFFNLVLLFCELIRHDVFSHNMYTCTLISRGDLAFGAPGPRPPSPFDDPADDPEHKEAEGSSSSKLEDPGLSESMDIDPSSSVLFEDMEKPDFSLFSPTMPCEGKGSPSPEKPDVEKEVKPPPKEKIEGTLGVLYDQPRHVQYATHFPIPQEESCSHECNQRLVVLFGVGKQRDDARHAIKKITKDILKVLNRKGTAETDQLAPIVPLNPGDLTFLGGEDGQKRRRNRPEAFPTAEDIFAKFQHLSHYDQHQVTAQVSRNVLEQITSFALGMSYHLPLVQHVQFIFDLMEYSLSISGLIDFAIQLLNELSVVEAELLLKSSDLVGSYTTSLCLCIVAVLRHYHACLILNQDQMAQVFEGLCGVVKHGMNRSDGSSAERCILAYLYDLYTSCSHLKNKFGELFREERWKVRGSEWDLLPSSHDHPTQEERMARDPAACLGSFVDCVLHILLCYQEWALFLSRLAPRLYLWGPPSSPFSSLPSEAPVPYSHVVPFLPSLFCPISLFLSQDPSSLTFSFFSFLPFPDHPSTSAGLLQHYYLLSSIPGSDFCSKVKNTIYCNVEPSESNMRWAPEFMIDTLENPAAHTFTYTGLGKSLSENPANRYSFVCNALMHVCVGHHDPDRVNDIAILCAELTGYCKSLSAEWLGVLKALCCSSNNGTCGFNDLLCNVDVSDLSFHDSLATFVAILIARQCLLLEDLIRCAAIPSLLNAACSEQDSEPGARLTCRILLHLFKTPQLNPCQSDGNKPTVGIRSSCDRHLLAASQNRIVDGAVFAVLKAVFVLGDAELKGSGFTVTGGTEELPEEEGGGGSGGRRQGGRNISVETASLDVYAKYVLRSICQQEWVGERCLKSLCEDSNDLQDPVLSSAQAQRLMQLICYPHRLLDNEDGENPQRQRIKRILQNLDQWTMRQSSLELQLMIKQTPNNEMNSLLENIAKATIEVFQQSAETGSSSGSTASNMPSSSKTKPVLSSLERSGVWLVAPLIAKLPTSVQGHVLKAAGEELEKGQHLGSSSRKERDRQKQKSMSLLSQQPFLSLVLTCLKGQDEQREGLLTSLYSQVHQIVNNWRDDQYLDDCKPKQLMHEALKLRLNLVGGMFDTVQRSTQQTTEWAMLLLEIIISGTVDMQSNNELFTTVLDMLSVLINGTLAADMSSISQGSMEENKRAYMNLAKKLQKELGERQSDSLEKVRQLLPLPKQTRDVITCEPQGSLIDTKGNKIAGFDSIFKKEGLQVSTKQKISPWDLFEGLKPSAPLSWGWFGTVRVDRRVARGEEQQRLLLYHTHLRPRPRAYYLEPLPLPPEDEEPPAPTLLEPEKKAPEPPKTDKPGAAPPSTEERKKKSTKGKKRSQPATKTEDYGMGPGRSGPYGVTVPPDLLHHPNPGSITHLNYRQGSIGLYTQNQPLPAGGPRVDPYRPVRLPMQKLPTRPTYPGVLPTTMTGVMGLEPSSYKTSVYRQQQPAVPQGQRLRQQLQQSQGMLGQSSVHQMTPSSSYGLQTSQGYTPYVSHVGLQQHTGPADPTRHLQQRPSGYVHQQAPTYGHGLTSTQRFSHQTLQQTPMISTMTPMSAQGVQAGVRSTAILPEQQQQQQQQQQQQQQQQQQQQQQQQQQYHIRQQQQQQILRQQQQQQQQQQQQQQQQQQQQQQQQQQHQQQQQQQAAPPQPQPQSQPQFQRQGLQQTQQQQQTAALVRQLQQQLSNTQPQPSTNIFGRY

SEQ ID NO: 907878 - protein, 1992 aa, Homo sapiens
MKQSMPSLHTKKILFCYFHLTNSWCLRRYGLGKMAAFGILSYEHRPLKRPRLGPPDVYPQDPKQKEDELTALNVKQGFNNQPAVSGDEHGSAKNVSFNPAKISSNFSSIIAEKLRCNTLPDTGRRKPQVNQKDNFWLVTARSQSAINTWFTDLAGTKPLTQLAKKVPIFSKKEEVFGYLAKYTVPVMRAAWLIKMTCAYYAAISETKVKKRHVDPFMEWTQIITKYLWEQLQKMAEYYRPGPAGSGGCGSTIGPLPHDVEVAIRQWDYTEKLAMFMFQDGMLDRHEFLTWVLECFEKIRPGEDELLKLLLPLLLRYSGEFVQSAYLSRRLAYFCTRRLALQLDGVSSHSSHVISAQSTSTLPTTPAPQPPTSSTPSTPFSDLLMCPQHRPLVFGLSCILQTILLCCPSALVWHYSLTDSRIKTGSPLDHLPIAPSNLPMPEGNSAFTQQVRAKLREIEQQIKERGQAVEVRWSFDKCQEATAGFTIGRVLHTLEVLDSHSFERSDFSNSLDSLCNRIFGLGPSKDGHEISSDDDAVVSLLCEWAVSCKRSGRHRAMVVAKLLEKRQAEIEAERCGESEAADEKGSIASGSLSAPSAPIFQDVLLQFLDTQAPMLTDPRSESERVEFFNLVLLFCELIRHDVFSHNMYTCTLISRGDLAFGAPGPRPPSPFDDPADDPEHKEAEGSSSSKLEDPGLSESMDIDPSSSVLFEDMEKPDFSLFSPTMPCEGKGSPSPEKPDVEKEVKPPPKEKIEGTLGVLYDQPRHVQYATHFPIPQEESCSHECNQRLVVLFGVGKQRDDARHAIKKITKDILKVLNRKGTAETDQLAPIVPLNPGDLTFLGGEDGQKRRRNRPEAFPTAEDIFAKFQHLSHYDQHQVTAQVSRNVLEQITSFALGMSYHLPLVQHVQFIFDLMEYSLSISGLIDFAIQLLNELSVVEAELLLKSSDLVGSYTTSLCLCIVAVLRHYHACLILNQDQMAQVFEGLCGVVKHGMNRSDGSSAERCILAYLYDLYTSCSHLKNKFGELFREERWKVRGSEWDLLPSSHDHPTQEERMARDPAACLGSFVDCVLHILLCYQEWALFLSRLAPRLYLWGPPSSPFSSLPSEAPVPYSHVVPFLPSLFCPISLFLSQDPSSLTFSFFSFLPFPDHPSTSAGLLQHYYLLSSIPGSDFCSKVKNTIYCNVEPSESNMRWAPEFMIDTLENPAAHTFTYTGLGKSLSENPANRYSFVCNALMHVCVGHHDPDRVNDIAILCAELTGYCKSLSAEWLGVLKALCCSSNNGTCGFNDLLCNVDVSDLSFHDSLATFVAILIARQCLLLEDLIRCAAIPSLLNAACSEQDSEPGARLTCRILLHLFKTPQLNPCQSDGNKPTVGIRSSCDRHLLAASQNRIVDGAVFAVLKAVFVLGDAELKGSGFTVTGGTEELPEEEGGGGSGGRRQGGRNISVETASLDVYAKYVLRSICQQEWVGERCLKSLCEDSNDLQDPVLSSAQAQRLMQLICYPHRLLDNEDGENPQRQRIKRILQNLDQWTMRQSSLELQLMIKQTPNNEMNSLLENIAKATIEVFQQSAETGSSSGSTASNMPSSSKTKPVLSSLERSGVWLVAPLIAKLPTSVQGHVLKAAGEELEKGQHLGSSSRKERDRQKQKSMSLLSQQPFLSLVLTCLKGQDEQREGLLTSLYSQVHQIVNNWRDDQYLDDCKPKQLMHEALKLRLNLVGGMFDTVQRSTQQTTEWAMLLLEIIISGTVDMQSNNELFTTVLDMLSVLINGTLAADMSSISQGSMEENKRAYMNLAKKLQKELGERQSDSLEKVRQLLPLPKQTRDVITCEPQGSLIDTKGNKIAGFDSIFKKEGLQVSTKQKISPWDLFEGLKPSAPLSWGWFGTVRVDRRVARGEEQQRLLLYHTHLRPRPRASSARGFSRPSSSNRQQLWSGNFNNSSLIPSHSPVPTYLDATEPPGGTACALDVAPPFPLNSQSHSWASTSSGWGPPLRLHF

SEQ ID NO: 907879 - protein, 533 aa, Homo sapiens
EGGSTGFHQTEDGIDTKGNKIAGFDSIFKKEGLQVSTKQKISPWDLFEGLKPSAPLSWGWFGTVRVDRRVARGEEQQRLLLYHTHLRPRPRAYYLEPLPLPPEDEEPPAPTLLEPEKKAPEPPKTDKPGAAPPSTEERKKKSTKGKKRSQPATKTEDYGMGPGRSGPYGVTVPPDLLHHPNPGSITHLNYRQGSIGLYTQNQPLPAGGPRVDPYRPVRLPMQKLPTRPTYPGVLPTTMTGVMGLEPSSYKTSVYRQQQPAVPQGQRLRQQLQQSQGMLGQSSVHQMTPSSSYGLQTSQGYTPYVSHVGLQQHTGPAGTMVPPSYSSQPYQSTHPSTNPTLVDPTRHLQQRPSGYVHQQAPTYGHGLTSTQRFSHQTLQQTPMISTMTPMSAQGVQAGVRSTAILPEQQQQQQQQQQQQQQQQQQQQQQQQQQYHIRQQQQQQILRQQQQQQQQQQQQQQQQQQQQQQQQQQHQQQQQQQAAPPQPQPQSQPQFQRQGLQQTQQQQQTAALVRQLQQQLSNTQPQPSTNIFGRY

SEQ ID NO: 907880 - protein, 1687 aa, Homo sapiens
  misc_feature (1687)..(1687): Xaa can be any naturally occurring amino acid
MKQSMPSLHTKKILFCYFHLTNSWCLRRYGLGKMAAFGILSYEHRPLKRPRLGPPDVYPQDPKQKEDELTALNVKQGFNNQPAVSGDEHGSAKNVSFNPAKISSNFSSIIAEKLRCNTLPDTGRRKPQVNQKDNFWLVTARSQSAINTWFTDLAGTKPLTQLAKKVPIFSKKEEVFGYLAKYTVPVMRAAWLIKMTCAYYAAISETKVKKRHVDPFMEWTQIITKYLWEQLQKMAEYYRPGPAGSGGCGSTIGPLPHDVEVAIRQWDYTEKLAMFMFQDGMLDRHEFLTWVLECFEKIRPGEDELLKLLLPLLLRYSGEFVQSAYLSRRLAYFCTRRLALQLDGVSSHSSHVISAQSTSTLPTTPAPQPPTSSTPSTPFSDLLMCPQHRPLVFGLSCILQTILLCCPSALVWHYSLTDSRIKTGSPLDHLPIAPSNLPMPEGNSAFTQQVRAKLREIEQQIKERGQAVEVRWSFDKCQEATAGFTIGRVLHTLEVLDSHSFERSDFSNSLDSLCNRIFGLGPSKDGHEISSDDDAVVSLLCEWAVSCKRSGRHRAMVVAKLLEKRQAEIEAERCGESEAADEKGSIASGSLSAPSAPIFQDVLLQFLDTQAPMLTDPRSESERVEFFNLVLLFCELIRHDVFSHNMYTCTLISRGDLAFGAPGPRPPSPFDDPADDPEHKEAEGSSSSKLEDPGLSESMDIDPSSSVLFEDMEKPDFSLFSPTMPCEGKGSPSPEKPDVEKEVKPPPKEKIEGTLGVLYDQPRHVQYATHFPIPQEESCSHECNQRLVVLFGVGKQRDDARHAIKKITKDILKVLNRKGTAETDQLAPIVPLNPGDLTFLGGEDGQKRRRNRPEAFPTAEDIFAKFQHLSHYDQHQVTAQVSRNVLEQITSFALGMSYHLPLVQHVQFIFDLMEYSLSISGLIDFAIQLLNELSVVEAELLLKSSDLVGSYTTSLCLCIVAVLRHYHACLILNQDQMAQVFEGLCGVVKHGMNRSDGSSAERCILAYLYDLYTSCSHLKNKFGELFREERWKVRGSEWDLLPSSHDHPTQEERMARDPAACLGSFVDCVLHILLCYQEWALFLSRLAPRLYLWGPPSSPFSSLPSEAPVPYSHVVPFLPSLFCPISLFLSQDPSSLTFSFFSFLPFPDHPSTSAGLLQHYYLLSSIPGSDFCSKVKNTIYCNVEPSESNMRWAPEFMIDTLENPAAHTFTYTGLGKSLSENPANRYSFVCNALMHVCVGHHDPDRVNDIAILCAELTGYCKSLSAEWLGVLKALCCSSNNGTCGFNDLLCNVDVSDLSFHDSLATFVAILIARQCLLLEDLIRCAAIPSLLNAACSEQDSEPGARLTCRILLHLFKTPQLNPCQSDGNKPTVGIRSSCDRHLLAASQNRIVDGAVFAVLKAVFVLGDAELKGSGFTVTGGTEELPEEEGGGGSGGRRQGGRNISVETASLDVYAKYVLRSICQQEWVGERCLKSLCEDSNDLQDPVLSSAQAQRLMQLICYPHRLLDNEDGENPQRQRIKRILQNLDQWTMRQSSLELQLMIKQTPNNEMNSLLENIAKATIEVFQQSAETGSSSGSTASNMPSSSKTKPVLSSLERSGVWLVAPLIAKLPTSVQGHVLKAAGEELEKGQHLGSSSRKERDRQKQKSMSLLSQQPFLSLVLTCLKGQDEQREGLLTSLYSQVHQIGX

SEQ ID NO: 907881 - protein, 1341 aa, Homo sapiens
MKQSMPSLHTKKILFCYFHLTNSWCLRRYGLGKMAAFGILSYEHRPLKRPRLGPPDVYPQDPKQKEDELTALNVKQGFNNQPAVSGDEHGSAKNVSFNPAKISSNFSSIIAEKLRCNTLPDTGRRKPQVNQKDNFWLVTARSQSAINTWFTDLAGTKPLTQLAKKVPIFSKKEEVFGYLAKYTVPVMRAAWLIKMTCAYYAAISETKVKKRHVDPFMEWTQIITKYLWEQLQKMAEYYRPGPAGSGGCGSTIGPLPHDVEVAIRQWDYTEKLAMFMFQDGMLDRHEFLTWVLECFEKIRPGEDELLKLLLPLLLRYSGEFVQSAYLSRRLAYFCTRRLALQLDGVSSHSSHVISAQSTSTLPTTPAPQPPTSSTPSTPFSDLLMCPQHRPLVFGLSCILQTILLCCPSALVWHYSLTDSRIKTGSPLDHLPIAPSNLPMPEGNSAFTQQVRAKLREIEQQIKERGQAVEVRWSFDKCQEATAGFTIGRVLHTLEVLDSHSFERSDFSNSLDSLCNRIFGLGPSKDGHEISSDDDAVVSLLCEWAVSCKRSGRHRAMVVAKLLEKRQAEIEAERCGESEAADEKGSIASGSLSAPSAPIFQDVLLQFLDTQAPMLTDPRSESERVEFFNLVLLFCELIRHDVFSHNMYTCTLISRGDLAFGAPGPRPPSPFDDPADDPEHKEAEGSSSSKLEDPGLSESMDIDPSSSVLFEDMEKPDFSLFSPTMPCEGKGSPSPEKPDVEKEVKPPPKEKIEGTLGVLYDQPRHVQYATHFPIPQEESCSHECNQRLVVLFGVGKQRDDARHAIKKITKDILKVLNRKGTAETDQLAPIVPLNPGDLTFLGGEDGQKRRRNRPEAFPTAEDIFAKFQHLSHYDQHQVTAQVSRNVLEQITSFALGMSYHLPLVQHVQFIFDLMEYSLSISGLIDFAIQLLNELSVVEAELLLKSSDLVGSYTTSLCLCIVAVLRHYHACLILNQDQMAQVFEGLCGVVKHGMNRSDGSSAERCILAYLYDLYTSCSHLKNKFGELFREERWKVRGSEWDLLPSSHDHPTQEERMARDPAACLGSFVDCVLHILLCYQEWALFLSRLAPRLYLWGPPSSPFSSLPSEAPVPYSHVVPFLPSLFCPISLFLSQDPSSLTFSFFSFLPFPDHPSTSAGLLQHYYLLSSIPGSDFCSKVKNTIYCNVEPSESNMRWAPEFMIDTLENPAAHTFTYTGLGKSLSENPANRYSFVCNALMHVCVGHHDPDRVNDIAILCAELTGYCKSLSAEWLGVLKALCCSSNNGTCGFNDLLCNVDVSDLSFHDSLATFVAILIARQCLLLEDLIRCAAIPSLLNAGELPICNP

SEQ ID NO: 907882 - protein, 106 aa, Homo sapiens
VRAWDCETRGMRQAALHTLGPDSLSPSSLQGYTPYVSHVGLQQHTGPAGTMVPPSYSSQPYQSTHPSTNPTLVDPTRHLQQRPSGYVHQQAPTYGHGLTSTQRYPK

SEQ ID NO: 907883 - protein, 123 aa, Homo sapiens
LGQRTVKQTPNKEMNSLLENIAKATIEVFQQSAETGSSSGSTASNMPSIFCIFARDGVSPCCQAGLELLTSSDPPTLASQSAGITGVSHRTQPQFFFKPINTSVCVYKRRVILPPGGHCSVWG

SEQ ID NO: 907884 - protein, 2327 aa, Homo sapiens
MQILLKTFLGQNRARLWEPKSSQNSAPQRPPSSLVCIPSSFCASGTFHRFLLSEIDLLPPPPKNSRGTELRPHRARPHLLCSRYCPMVPGVPRLPSVVSGNGREFLTCPLVVSRPPSSQPPPPFSAPSPPSRSPSQPGPGWCLRRYGLGKMAAFGILSYEHRPLKRPRLGPPDVYPQDPKQKEDELTALNVKQGFNNQPAVSGDEHGSAKNVSFNPAKISSNFSSIIAEKLRCNTLPDTGRRKPQVNQKDNFWLVTARSQSAINTWFTDLAGTKPLTQLAKKVPIFSKKEEVFGYLAKYTVPVMRAAWLIKMTCAYYAAISETKVKKRHVDPFMEWTQIITKYLWEQLQKMAEYYRPGPAGSGGCGSTIGPLPHDVEVAIRQWDYTEKLAMFMFQDGMLDRHEFLTWVLECFEKIRPGEDELLKLLLPLLLRYSGEFVQSAYLSRRLAYFCTRRLALQLDGVSSHSSHVISAQSTSTLPTTPAPQPPTSSTPSTPFSDLLMCPQHRPLVFGLSCILQTILLCCPSALVWHYSLTDSRIKTGSPLDHLPIAPSNLPMPEGNSAFTQQVRAKLREIEQQIKERGQAVEVRWSFDKCQEATAGFTIGRVLHTLEVLDSHSFERSDFSNSLDSLCNRIFGLGPSKDGHEISSDDDAVVSLLCEWAVSCKRSGRHRAMVVAKLLEKRQAEIEAERCGESEAADEKGSIASGSLSAPSAPIFQDVLLQFLDTQAPMLTDPRSESERVEFFNLVLLFCELIRHDVFSHNMYTCTLISRGDLAFGAPGPRPPSPFDDPADDPEHKEAEGSSSSKLEDPGLSESMDIDPSSSVLFEDMEKPDFSLFSPTMPCEGKGSPSPEKPDVEKEVKPPPKEKIEGTLGVLYDQPRHVQYATHFPIPQEESCSHECNQRLVVLFGVGKQRDDARHAIKKITKDILKVLNRKGTAETDQLAPIVPLNPGDLTFLGGEDGQKRRRNRPEAFPTAEDIFAKFQHLSHYDQHQVTAQVSRNVLEQITSFALGMSYHLPLVQHVQFIFDLMEYSLSISGLIDFAIQLLNELSVVEAELLLKSSDLVGSYTTSLCLCIVAVLRHYHACLILNQDQMAQVFEGLCGVVKHGMNRSDGSSAERCILAYLYDLYTSCSHLKNKFGELFSDFCSKVKNTIYCNVEPSESNMRWAPEFMIDTLENPAAHTFTYTGLGKSLSENPANRYSFVCNALMHVCVGHHDPDRVNDIAILCAELTGYCKSLSAEWLGVLKALCCSSNNGTCGFNDLLCNVDVSDLSFHDSLATFVAILIARQCLLLEDLIRCAAIPSLLNAACSEQDSEPGARLTCRILLHLFKTPQLNPCQSDGNKPTVGIRSSCDRHLLAASQNRIVDGAVFAVLKAVFVLGDAELKGSGFTVTGGTEELPEEEGGGGSGGRRQGGRNISVETASLDVYAKYVLRSICQQEWVGERCLKSLCEDSNDLQDPVLSSAQAQRLMQLICYPHRLLDNEDGENPQRQRIKRILQNLDQWTMRQSSLELQLMIKQTPNNEMNSLLENIAKATIEVFQQSAETGSSSGSTASNMPSSSKTKPVLSSLERSGVWLVAPLIAKLPTSVQGHVLKAAGEELEKGQHLGSSSRKERDRQKQKSMSLLSQQPFLSLVLTCLKGQDEQREGLLTSLYSQVHQIVNNWRDDQYLDDCKPKQLMHEALKLRLNLVGGMFDTVQRSTQQTTEWAMLLLEIIISGTVDMQSNNELFTTVLDMLSVLINGTLAADMSSISQGSMEENKRAYMNLAKKLQKELGERQSDSLEKVRQLLPLPKQTRDVITCEPQGSLIDTKGNKIAGFDSIFKKEGLQVSTKQKISPWDLFEGLKPSAPLSWGWFGTVRVDRRVARGEEQQRLLLYHTHLRPRPRAYYLEPLPLPPEDEEPPAPTLLEPEKKAPEPPKTDKPGAAPPSTEERKKKSTKGKKRSQPATKTEDYGMGPGRSGPYGVTVPPDLLHHPNPGSITHLNYRQGSIGLYTQNQPLPAGGPRVDPYRPVRLPMQKLPTRPTYPGVLPTTMTGVMGLEPSSYKTSVYRQQQPAVPQGQRLRQQLQQSQGMLGQSSVHQMTPSSSYGLQTSQGYTPYVSHVGLQQHTGPAGTMVPPSYSSQPYQSTHPSTNPTLVDPTRHLQQRPSGYVHQQAPTYGHGLTSTQRFSHQTLQQTPMISTMTPMSAQGVQAGVRSTAILPEQQQQQQQQQQQQQQQQQQQQQQQQQQYHIRQQQQQQILRQQQQQQQQQQQQQQQQQQQQQQQQQQHQQQQQQQAAPPQPQPQSQPQFQRQGLQQTQQQQQTAALVRQLQQQLSNTQPQPSTNIFGRY

SEQ ID NO: 907885 - protein, 2303 aa, Homo sapiens
MKQSMPSLHTKKILFCYFHLTNSWCLRRYGLGKMAAFGILSYEHRPLKRPRLGPPDVYPQDPKQKEDELTALNVKQGFNNQPAVSGDEHGSAKNVSFNPAKISSNFSSIIAEKLRCNTLPDTGRRKPQVNQKDNFWLVTARSQSAINTWFTDLAGTKPLTQLAKKVPIFSKKEEVFGYLAKYTVPVMRAAWLIKMTCAYYAAISETKVKKRHVDPFMEWTQIITKYLWEQLQKMAEYYRPGPAGSGGCGSTIGPLPHDVEVAIRQWDYTEKLAMFMFQDGMLDRHEFLTWVLECFEKIRPGEDELLKLLLPLLLRYSGEFVQSAYLSRRLAYFCTRRLALQLDGVSSHSSHVISAQSTSTLPTTPAPQPPTSSTPSTPFSDLLMCPQHRPLVFGLSCILQTILLCCPSALVWHYSLTDSRIKTGSPLDHLPIAPSNLPMPEGNSAFTQQVRAKLREIEQQIKERGQAVEVRWSFDKCQEATAGFTIGRVLHTLEVLDSHSFERSDFSNSLDSLCNRIFGLGPSKDGHEISSDDDAVVSLLCEWAVSCKRSGRHRAMVVAKLLEKRQAEIEAERCGESEAADEKGSIASGSLSAPSAPIFQDVLLQFLDTQAPMLTDPRSESERVEFFNLVLLFCELIRHDVFSHNMYTCTLISRGDLAFGAPGPRPPSPFDDPADDPEHKEAEGSSSSKLEDPGLSESMDIDPSSSVLFEDMEKPDFSLFSPTMPCEGKGSPSPEKPDVEKEVKPPPKEKIEGTLGVLYDQPRHVQYATHFPIPQEESCSHECNQRLVVLFGVGKQRDDARHAIKKITKDILKVLNRKGTAETDQLAPIVPLNPGDLTFLGGEDGQKRRRNRPEAFPTAEDIFAKFQHLSHYDQHQVTAQVSRNVLEQITSFALGMSYHLPLVQHVQFIFDLMEYSLSISGLIDFAIQLLNELSVVEAELLLKSSDLVGSYTTSLCLCIVAVLRHYHACLILNQDQMAQVFEGLCGVVKHGMNRSDGSSAERCILAYLYDLYTSCSHLKNKFGELFREERWKVRGSEWDLLPSSHDHPLPPFPHCLQRPQFLIPMWFLSCPVCFVPSPFSCLKILHPSLSPFFLFSPFLTIPRPQQAFFNTTISFPPSLRDFCSKVKNTIYCNVEPSESNMRWAPEFMIDTLENPAAHTFTYTGLGKSLSENPANRYSFVCNALMHVCVGHHDPDRVNDIAILCAELTGYCKSLSAEWLGVLKALCCSSNNGTCGFNDLLCNVDVSDLSFHDSLATFVAILIARQCLLLEDLIRCAAIPSLLNAACSEQDSEPGARLTCRILLHLFKTPQLNPCQSDGNKPTVGIRSSCDRHLLAASQNRIVDGAVFAVLKAVFVLGDAELKGSGFTVTGGTEELPEEEGGGGSGGRRQGGRNISVETASLDVYAKYVLRSICQQEWVGERCLKSLCEDSNDLQDPVLSSAQAQRLMQLICYPHRLLDNEDGENPQRQRIKRILQNLDQWTMRQSSLELQLMIKQTPNNEMNSLLENIAKATIEVFQQSAETGSSSGSTASNMPSSSKTKPVLSSLERSGVWLVAPLIAKLPTSVQGHVLKAAGEELEKGQHLGSSSRKERDRQKQKSMSLLSQQPFLSLVLTCLKGQDEQREGLLTSLYSQVHQIVNNWRDDQYLDDCKPKQLMHEALKLRLNLVGGMFDTVQRSTQQTTEWAMLLLEIIISGTVDMQSNNELFTTVLDMLSVLINGTLAADMSSISQGSMEENKRAYMNLAKKLQKELGERQSDSLEKVRQLLPLPKQTRDVITCEPQGSLIDTKGNKIAGFDSIFKKEGLQVSTKQKISPWDLFEGLKPSAPLSWGWFGTVRVDRRVARGEEQQRLLLYHTHLRPRPRAYYLEPLPLPPEDEEPPAPTLLEPEKKAPEPPKTDKPGAAPPSTEERKKKSTKGKKRSQPATKTEDYGMGPGRSGPYGVTVPPDLLHHPNPGSITHLNYRQGSIGLYTQNQPLPAGGPRVDPYRPVRLPMQKLPTRPTYPGVLPTTMTGVMGLEPSSYKTSVYRQQQPAVPQGQRLRQQLQQSQGMLGQSSVHQMTPSSSYGLQTSQGYTPYVSHVGLQQHTGPAGTMVPPSYSSQPYQSTHPSTNPTLVDPTRHLQQRPSGYVHQQAPTYGHGLTSTQRFSHQTLQQTPMISTMTPMSAQGVQAGVRSTAILPEQQQQQQQQQQQQQQQQQQQQQQQQQQYHIRQQQQQQILRQQQQQQQQQQQQQQQQQQQQQQQQQQHQQQQQQQAAPPQPQPQSQPQFQRQGLQQTQQQQQTAALVRQLQQQLSNTQPQPSTNIFGRY

SEQ ID NO: 907886 - protein, 2193 aa, Homo sapiens
MKQSMPSLHTKKILFCYFHLTNSWCLRRYGLGKMAAFGILSYEHRPLKRPRLGPPDVYPQDPKQKEDELTALNVKQGFNNQPAVSGDEHGSAKNVSFNPAKISSNFSSIIAEKLRCNTLPDTGRRKPQVNQKDNFWLVTARSQSAINTWFTDLAGTKPLTQLAKKVPIFSKKEEVFGYLAKYTVPVMRAAWLIKMTCAYYAAISETKVKKRHVDPFMEWTQIITKYLWEQLQKMAEYYRPGPAGSGGCGSTIGPLPHDVEVAIRQWDYTEKLAMFMFQDGMLDRHEFLTWVLECFEKIRPGEDELLKLLLPLLLRYSGEFVQSAYLSRRLAYFCTRRLALQLDGVSSHSSHVISAQSTSTLPTTPAPQPPTSSTPSTPFSDLLMCPQHRPLVFGLSCILQTILLCCPSALVWHYSLTDSRIKTGSPLDHLPIAPSNLPMPEGNSAFTQQVRAKLREIEQQIKERGQAVEVRWSFDKCQEATAGFTIGRVLHTLEVLDSHSFERSDFSNSLDSLCNRIFGLGPSKDGHEISSDDDAVVSLLCEWAVSCKRSGRHRAMVVAKLLEKRQAEIEAERCGESEAADEKGSIASGSLSAPSAPIFQDVLLQFLDTQAPMLTDPRSESERVEFFNLVLLFCELIRHDVFSHNMYTCTLISRGDLAFGAPGPRPPSPFDDPADDPEHKEAEGSSSSKLEDPGLSESMDIDPSSSVLFEDMEKPDFSLFSPTMPCEGKGSPSPEKPDVEKEVKPPPKEKIEGTLGVLYDQPRHVQYATHFPIPQEESCSHECNQRLVVLFGVGKQRDDARHAIKKITKDILKVLNRKGTAETDQLAPIVPLNPGDLTFLGGEDGQKRRRNRPEAFPTAEDIFAKFQHLSHYDQHQVTAQVSRNVLEQITSFALGMSYHLPLVQHVQFIFDLMEYSLSISGLIDFAIQLLNELSVVEAELLLKSSDLVGSYTTSLCLCIVAVLRHYHACLILNQDQMAQVFEGLCGVVKHGMNRSDGSSAERCILAYLYDLYTSCSHLKNKFGELFREERWKVRGSEWDLLPSSHDHPTQEERMARDPAACLGSFVDCVLHILLCYQEWALFLSRLAPRLYLWGPPSSPFSSLPSEAPVPYSHVVPFLPSLFCPISLFLSQDPSSLTFSFFSFLPFPDHPSTSAGLLQHYYLLSSIPGSDFCSKVKNTIYCNVEPSESNMRWAPEFMIDTLENPAAHTFTYTGLGKSLSENPANRYSFVCNALMHVCVGHHDPDRVNDIAILCAELTGYCKSLSAEWLGVLKALCCSSNNGTCGFNDLLCNVDVSDLSFHDSLATFVAILIARQCLLLEDLIRCAAIPSLLNAACSEQDSEPGARLTCRILLHLFKTPQLNPCQSDGNKPTVGIRSSCDRHLLAASQNRIVDGAVFAVLKAVFVLGDAELKGSGFTVTGGTEELPEEEGGGGSGGRRQGGRNISVETASLDVYAKYVLRSICQQEWVGERCLKSLCEDSNDLQDPVLSSAQAQRLMQLICYPHRLLDNEDGENPQRQRIKRILQNLDQWTMRQSSLELQLMIKQTPNNEMNSLLENIAKATIEVFQQSAETGSSSGSTASNMPSSSKTKPVLSSLERSGVWLVAPLIAKLPTSVQGHVLKAAGEELEKGQHLGSSSRKERDRQKQKSMSLLSQQPFLSLVLTCLKGQDEQREGLLTSLYSQVHQIVNNWRDDQYLDDCKPKQLMHEALKLRLNLVGGMFDTVQRSTQQTTEWAMLLLEIIISGTVDMQSNNELFTTVLDMLSVLINGTLAADMSSISQGSMEENKRAYMNLAKKLQKELGERQSDSLEKVRQLLPLPKQTRDVITCEPQGSLIDTKGNKIAGFDSIFKKEGLQVSTKQKISPWDLFEGLKPSAPLSWGWFGTVRVDRRVARGEEQQRLLLYHTHLRPRPRAYYLEPLPLPPEDEEPPAPTLLEPEKKAPEPPKTDKPGAAPPSTEERKKKSTKGKKRSQPATKTEDYGMGPGRSGPYGVTVPPDLLHHPNPGSITHLNYRQGSIGLYTQNQPLPAGGPRVDPYRPVRLPMQKLPTRPTYPGVLPTTMTGVMGLEPSSYKTSVYRQQQPAVPQGQRLRQQLQQSQGMLGQSSVHQMTPSSSYGLQTSQGYTPYVSHVGLQQHTGPAGTMVPPSYSSQPYQSTHPSTNPTLVDPTRHLQQRPSGYVHQQAPTYGHGLTSTQRYPK

SEQ ID NO: 907887 - protein, 797 aa, Homo sapiens
KGIRAGARAFVLVLETGSSSGSTASNMPSSSKTKPVLSSLERSGVWLVAPLIAKLPTSVQGHVLKAAGEELEKGQHLGSSSRKERDRQKQKSMSLLSQQPFLSLVLTCLKGQDEQREGLLTSLYSQVHQIVNNWRDDQYLDDCKPKQLMHEALKLRLNLVGGMFDTVQRSTQQTTEWAMLLLEIIISGTVDMQSNNELFTTVLDMLSVLINGTLAADMSSISQGSMEENKRAYMNLAKKLQKELGERQSDSLEKVRQLLPLPKQTRDVITCEPQGSLIDTKGNKIAGFDSIFKKEGLQVSTKQKISPWDLFEGLKPSAPLSWGWFGTVRVDRRVARGEEQQRLLLYHTHLRPRPRAYYLEPLPLPPEDEEPPAPTLLEPEKKAPEPPKTDKPGAAPPSTEERKKKSTKGKKRSQPATKTEDYGMGPGRSGPYGVTVPPDLLHHPNPGSITHLNYRQGSIGLYTQNQPLPAGGPRVDPYRPVRLPMQKLPTRPTYPGVLPTTMTGVMGLEPSSYKTSVYRQQQPAVPQGQRLRQQLQQSQGMLGQSSVHQMTPSSSYGLQTSQGYTPYVSHVGLQQHTGPAGTMVPPSYSSQPYQSTHPSTNPTLVDPTRHLQQRPSGYVHQQAPTYGHGLTSTQRFSHQTLQQTPMISTMTPMSAQGVQAGVRSTAILPEQQQQQQQQQQQQQQQQQQQQQQQQQQYHIRQQQQQQILRQQQQQQQQQQQQQQQQQQQQQQQQQQHQQQQQQQAAPPQPQPQSQPQFQRQGLQQTQQQQQTAALVRQLQQQLSNTQPQPSTNIFGRY

SEQ ID NO: 907888 - protein, 404 aa, Homo sapiens
RGRASRPGGRATAAAGAADAAAGTRTEDYGMGPGRSGPYGVTVPPDLLHHPNPGSITHLNYRQGSIGLYTQNQPLPAGGPRVDPYRPVRLPMQKLPTRPTYPGVLPTTMTGVMGLEPSSYKTSVYRQQQPAVPQGQRLRQQLQQSQGMLGQSSVHQMTPSSSYGLQTSQGYTPYVSHVGLQQHTGPAGTMVPPSYSSQPYQSTHPSTNPTLVDPTRHLQQRPSGYVHQQAPTYGHGLTSTQRFSHQTLQQTPMISTMTPMSAQGVQAGVRSTAILPEQQQQQQQQQQQQQQQQQQQQQQQQQQYHIRQQQQQQILRQQQQQQQQQQQQQQQQQQQQQQQQQQHQQQQQQQAAPPQPQPQSQPQFQRQGLQQTQQQQQTAALVRQLQQQLSNTQPQPSTNIFGRY

SEQ ID NO: 907889 - protein, 98 aa, Homo sapiens
NACFCATPPEPQSHIVPSSARGFSRPSSSNRQQLWSGNFNNSSLIPSHSPVPTYLDATEPPGGTACALDVAPPFPLNSQSHSWASTSSGWGPPLRLHF

SEQ ID NO: 907890 - protein, 476 aa, Homo sapiens
MMHLAFLVLLCLPVCSAYPLSGAAKEEDSNKDLAQQYLEKYYNLEKDVKQFRRKDSNLIVKKIQGMQKFLGLEVTGKLDTDTLEVMRKPRCGVPDVGHFSSFPGMPKWRKTHLTYRIVNYTPDLPRDAVDSAIEKALKVWEEVTPLTFSRLYEGEADIMISFAVKEHGDFYSFDGPGHSLAHAYPPGPGLYGDIHFDDDEKWTEDASGTNLFLVAAHELGHSLGLFHSANTEALMYPLYNSFTELAQFRLSQDDVNGIQSLYGPPPASTEEPLVPTKSVPSGSEMPAKCDPALSFDAISTLRGEYLFFKDRYFWRRSHWNPEPEFHLISAFWPSLPSYLDAAYEVNSRDTVFIFKGNEFWAIRGNEVQAGYPRGIHTLGFPPTIRKIDAAVSDKEKKKTYFFAADKYWRFDENSQSMEQGFPRLIADDFPGVEPKVDAVLQAFGFFYFFSGSSQFEFDPNARMVTHILKSNSWLHC

SEQ ID NO: 907891 - protein, 192 aa, Homo sapiens [sequence omitted]

SEQ ID NO: 907892 - protein, 425 aa, Homo sapiens
MASSSPDSPCSCDCFVSVPPASAIPAVIFAKNSDRPRDEVQEVVFVPAGTHTPGSRLQCTYIEVEQVSKTHAVILSRPSWLWGAEMGANEHGVCIGNEAVWTKEPVGEGEALLGMDLLRLALERSSSAQEALHVITGLLEHYGQGGNCLEDAAPFSYHSTFLLADRTEAWVLETAGRLWAAQRIQEGARNISNQLSIGTDISAQHPELRTHAQAKGWWDGQGAFDFAQIFSLTQQPVRMEAAKARFQAGRELLRQRQGGITAEVMMGILRDKESGICMDSGGFRTTASMVSVLPQDPTQPCVHFLTATPDPSRSVFKPFIFGVGVAQAPQVLSPTFGAQDPVRTLPRFQTQVDRRHTLYRGHQAALGLMERDQDRGQQLQQKQQDLEQEGLEATQGLLAGEWAPPLWELGSLFQAFVKRESQAYA

SEQ ID NO: 907893 - protein, 378 aa, Homo sapiens [sequence omitted]

SEQ ID NO: 907894 - protein, 307 aa, Homo sapiens
MLALERSSSAQEALHVITGLLEHYGQGGNCLEDAAPFSYHSTFLLADRTEAWVLETAGRLWAAQRIQEGARNISNQLSIGTDISAQHPELRTHAQAKGWWDGQGAFDFAQIFSLTQQPVRMEAAKARFQAGRELLRQRQGGITAEVMMGILRDKESGICMDSGGFRTTASMVSVLPQDPTQPCVHFLTATPDPSRSVFKPFIFGVGVAQAPQVLSPTFGAQDPVRTLPRFQTQVDRRHTLYRGHQAALGLMERDQDRGQQLQQKQQDLEQEGLEATQGLLAGEWAPPLWELGSLFQAFVKRESQAYA

SEQ ID NO: 907895 - protein, 307 aa, Homo sapiens; identical to SEQ ID NO: 907894

SEQ ID NO: 907896 - protein, 187 aa, Homo sapiens [sequence omitted]

SEQ ID NO: 907897 - protein, 297 aa, Homo sapiens
VWEEERMASSSPDSPCSCNCLEDAAPFSYHSTFLLADRTEAWVLETAGRLWAAQRIQEGARNISNQLSIGTDISAQHPELRTHAQAKGWWDGQGAFDFAQIFSLTQQPVRMEAAKARFQAGRELLRQRQGGITAEVMMGILRDKESGICMDSGGFRTTASMVSVLPQDPTQPCVHFLTATPDPSRSVFKPFIFGVGVAQAPQVLSPTFGAQDPVRTLPRFQTQVDRRHTLYRGHQAALGLMERDQDRGQQLQQKQQDLEQEGLEATQGLLAGEWAPPLWELGSLFQAFVKRESQAYA

SEQ ID NO: 907898 - protein, 68 aa, Homo sapiens
ISNQLSIGTDISAQHPELRTHAQAKGWWDGQGAFDFAQIFSLTQQPVRMEAAKARFQAGRELLRQRQG

SEQ ID NO: 907899 - protein, 378 aa, Homo sapiens [sequence omitted]

SEQ ID NO: 907900 - protein, 433 aa, Homo sapiens [sequence omitted]

SEQ ID NO: 907901 - protein, 187 aa, Homo sapiens [sequence omitted]

SEQ ID NO: 907902 - protein, 307 aa, Homo sapiens; identical to SEQ ID NO: 907894

SEQ ID NO: 907903 - protein, 257 aa, Homo sapiens
MHYGQGGNCLEDAAPFSYHSTFLLADRTEAWVLETAGRLWAAQRIQEGARNISNQLSIGTDISAQHPELRTHAQAKGWWDGQGAFDFAQIFSLTQQPVRMEAAKARFQAGRELLRQRQGGITAEVMMGILRDKESGICMDSGGFRTTASMVSVLPQDPTQPCVHFLTATPDPSRSVFKPFIFGVGVAQAPQVLSPTFGAQDPVRTLPRFQTQVEIGGSSSSRNSRIWSRKASRPHRGCWPASGPHPSGSWAASSRPS

SEQ ID NO: 907904 - protein, 216 aa, Homo sapiens
MSKYKLIMLRHGEGAWNKENRFCSWVDQKLNSEGMEEARNCGKQLKALNFEFDLVFTSVLNRSIHTAWLILEELGQEWVPVESSWRLNERHYGALIGLNREQMALNHGEEQVRLWRRSYNVTPPPIEESHPYYQEIYNDRRYKVCDVPLDQLPRSESLKDVLERLLPYWNERIAPEVLRGKTILISAHGNSSRALLKHLEGTSFIYHLLEVAKCDI

SEQ ID NO: 907905 - protein, 259 aa, Homo sapiens
MSKYKLIMLRHGEGAWNKENRFCSWVDQKLNSEGMEEARNCGKQLKALNFEFDLVFTSVLNRSIHTAWLILEELGQEWVPVESSWRLNERHYGALIGLNREQMALNHGEEQVRLWRRSYNVTPPPIEESHPYYQEIYNDRRYKVCDVPLDQLPRSESLKDVLERLLPYWNERIAPEVLRGKTILISAHGNSSRALLKHLEGISDEDIINITLPTGVPILLELDENLRAVGPHQFLGDQEAIQAAIKKVEDQGKVKQAKK

SEQ ID NO: 907906 - protein, 259 aa, Homo sapiens; identical to SEQ ID NO: 907905

SEQ ID NO: 907907 - protein, 259 aa, Homo sapiens; identical to SEQ ID NO: 907905

SEQ ID NO: 907908 - protein, 79 aa, Homo sapiens
TTQHPHPVFTPPRPPSPVYIGISDEDIINITLPTGVPILLELDENLRAVGPHQFLGDQEAIQAAIKKVEDQGKVKQAKK

SEQ ID NO: 907909 - protein, 152 aa, Homo sapiens
MSKYKLIMLRHGEGAWNKENRFCSWVDQKLNSEGMEEARNCGKQLKALNFEFDLVFTSVLNRSIHTAWLILEELGQEWVPVESSWRLNERHYGALIGLNREQMALNHGEEQVRLWRRSYNVTPPPIEESHPYYQEIIIESPLTGTILISSSL

SEQ ID NO: 907910 - protein, 259 aa, Homo sapiens; identical to SEQ ID NO: 907905

SEQ ID NO: 907911 - protein, 259 aa, Homo sapiens; identical to SEQ ID NO: 907905

SEQ ID NO: 907912 - protein, 259 aa, Homo sapiens; identical to SEQ ID NO: 907905

SEQ ID NO: 907913 - protein, 259 aa, Homo sapiens; identical to SEQ ID NO: 907905

SEQ ID NO: 907914 - protein, 81 aa, Homo sapiens
ELKKHIKYANNTPRFGVSVEIYRISDEDIINITLPTGVPILLELDENLRAVGPHQFLGDQEAIQAAIKKVEDQGKVKQAKK

SEQ ID NO: 907915 - protein, 318 aa, Homo sapiens
GPAPVGGARQRRREATRKTKPGRRCLRRLQPPRSDQGRWDALMAGPAALSAAAAAALAAALLLLRREDPGPGAGPSMAETEALSKLREDFRMQNKSVFILGASGETGRVLLKEILEQGLFSKVTLIGRRKLTFDEEAYKNVNQEVVDFEKLDDYASAFQGHDVGFCCLGTTRGKAGAEGFVRVDRDYVLKSAELAKAGGCKHFNLLSSKGADKSSNFLYLQVKGEVEAKVEELKFDRYSVFRPGVLLCDRQESRPGEWLVRKFFGSLPDSWASGHSVPVVTVVRAMLNNVVRPRDKQMELLENKAIHDLGKAHGSLKP

SEQ ID NO: 907916 - protein, 242 aa, Homo sapiens
MAETEALSKLREDFRMQNKSVFILGASGETGRVLLKEILEQGLFSKVTLIGRRKLTFDEEAYKNVNQEVVDFEKLDDYASAFQGHDVGFCCLGTTRGKAGAEGFVRVDRDYVLKSAELAKAGGCKHFNLLSSKGADKSSNFLYLQVKGEVEAKVEELKFDRYSVFRPGVLLCDRQESRPGEWLVRKFFGSLPDSWASGHSVPVVTVVRAMLNNVVRPRDKQMELLENKAIHDLGKAHGSLKP

SEQ ID NO: 907917 - protein, 280 aa, Homo sapiens
GPAPVGGARQRRREATRKTKPGRRCLRRLQPPRSDQGSMAETEALSKLREDFRMQNKSVFILGASGETGRVLLKEILEQGLFSKVTLIGRRKLTFDEEAYKNVNQEVVDFEKLDDYASAFQGHDVGFCCLGTTRGKAGAEGFVRVDRDYVLKSAELAKAGGCKHFNLLSSKGADKSSNFLYLQVKGEVEAKVEELKFDRYSVFRPGVLLCDRQESRPGEWLVRKFFGSLPDSWASGHSVPVVTVVRAMLNNVVRPRDKQMELLENKAIHDLGKAHGSLKP

SEQ ID NO: 907918 - protein, 253 aa, Homo sapiens
MRCCVLVRLFLFVEELVDGVGQWRKTVVQDSDAINPLLGHENEVLLKEILEQGLFSKVTLIGRRKLTFDEEAYKNVNQEVVDFEKLDDYASAFQGHDVGFCCLGTTRGKAGAEGFVRVDRDYVLKSAELAKAGGCKHFNLLSSKGADKSSNFLYLQVKGEVEAKVEELKFDRYSVFRPGVLLCDRQESRPGEWLVRKFFGSLPDSWASGHSVPVVTVVRAMLNNVVRPRDKQMELLENKAIHDLGKAHGSLKP

SEQ ID NO: 907919 - protein, 242 aa, Homo sapiens; identical to SEQ ID NO: 907916

SEQ ID NO: 907920 - protein, 242 aa, Homo sapiens; identical to SEQ ID NO: 907916

SEQ ID NO: 907921 - protein, 242 aa, Homo sapiens; identical to SEQ ID NO: 907916

SEQ ID NO: 907922 - protein, 242 aa, Homo sapiens; identical to SEQ ID NO: 907916

SEQ ID NO: 907923 - protein, 242 aa, Homo sapiens; identical to SEQ ID NO: 907916

SEQ ID NO: 907924 - protein, 242 aa, Homo sapiens; identical to SEQ ID NO: 907916

SEQ ID NO: 907925 - protein, 242 aa, Homo sapiens; identical to SEQ ID NO: 907916

SEQ ID NO: 907926 - protein, 242 aa, Homo sapiens; identical to SEQ ID NO: 907916

SEQ ID NO: 907927 - protein, 242 aa, Homo sapiens; identical to SEQ ID NO: 907916

SEQ ID NO: 907928 - protein, 242 aa, Homo sapiens; identical to SEQ ID NO: 907916

SEQ ID NO: 907929 - protein, 196 aa, Homo sapiens
MAETEALSKLREDFRMQNKSVFILGASGETGRVLLKEILEQGLFSKVTLIGRRKLTFDEEAYKNVNQEVVDFEKLDDYASAFQGHDVGFCCLGTTRGKAGAGEVEAKVEELKFDRYSVFRPGVLLCDRQESRPGEWLVRKFFGSLPDSWASGHSVPVVTVVRAMLNNVVRPRDKQMELLENKAIHDLGKAHGSLKP

SEQ ID NO: 907930 - protein, 318 aa, Homo sapiens; identical to SEQ ID NO: 907915

SEQ ID NO: 907931 - protein, 129 aa, Homo sapiens
MAETEALSKLREDFRMQNKSVFILGASGETGRVLLKEILEQGLFSKVTLIGRRKLTFDEEAYKNVNQEVVDFEKLDDYASAFQGHDVGFCCLGTTRGKAGAEGFVRVDRDYVLKSAELAKAGGCKHFNF

SEQ ID NO: 907932 - protein, 85 aa, Homo sapiens
GPPRAEGSIAYPVVCDGEKSRPGEWLVRKFFGSLPDSWASGHSVPVVTVVRAMLNNVVRPRDKQMELLENKAIHDLGKAHGSLKP

SEQ ID NO: 907933 - protein, 178 aa, Homo sapiens
GPAPVGGARQRRREATRKTKPGRRCLRRLQPPRSDQGRWDALMAGPAALSAAAAAALAAALLLLRREDPGPGAGPSMAETEALSKLREDFRMQNKSVFILGASGETGRVLLKEILEQGLFSKVTLIGRRKLTFDEEAYKNVNQEVVDFEKLDDYASAFQGHDVGFCCLGTTRGKAGAR

SEQ ID NO: 907934 - protein, 102 aa, Homo sapiens
MAETEALSKLREDFRMQNKSVFILGASGETGRVLLKEILEQGLFSKVTLIGRRKLTFDEEAYKNVNQEVVDFEKLDDYASAFQGHDVGFCCLGTTRGKAGAR

SEQ ID NO: 907935 - protein, 102 aa, Homo sapiens; identical to SEQ ID NO: 907934

SEQ ID NO: 907936 - protein, 242 aa, Homo sapiens; identical to SEQ ID NO: 907916

SEQ ID NO: 907937 - protein, 73 aa, Homo sapiens
CYIIFYLCVRGGGFICNDSLNYHRYRIKKWWTLKSWMTTPLPFKVMMLDSVAWVPPEGKLGRRDLFVLTEIMC

SEQ ID NO: 907938 - protein, 202 aa, Homo sapiens
MLFIGAKYRGRGKLSARLSYPPPLHNQEVVDFEKLDDYASAFQGHDVGFCCLGTTRGKAGAEGFVRVDRDYVLKSAELAKAGGCKHFNLLSSKGADKSSNFLYLQVKGEVEAKVEELKFDRYSVFRPGVLLCDRQESRPGEWLVRKFFGSLPDSWASGHSVPVVTVVRAMLNNVVRPRDKQMELLENKAIHDLGKAHGSLKP

SEQ ID NO: 907939 - protein, 242 aa, Homo sapiens; identical to SEQ ID NO: 907916

SEQ ID NO: 907940 - protein, 242 aa, Homo sapiens; identical to SEQ ID NO: 907916

SEQ ID NO: 907941 - protein, 242 aa, Homo sapiens; identical to SEQ ID NO: 907916

SEQ ID NO: 907942 - protein, 242 aa, Homo sapiens; identical to SEQ ID NO: 907916

SEQ ID NO: 907943 - protein, 242 aa, Homo sapiens; identical to SEQ ID NO: 907916

SEQ ID NO: 907944 - protein, 242 aa, Homo sapiens; identical to SEQ ID NO: 907916

SEQ ID NO: 907945 - protein, 242 aa, Homo sapiens; identical to SEQ ID NO: 907916

SEQ ID NO: 907946 - protein, 272 aa, Homo sapiens
GPAPVGGARQRRREATRKTKPGRRCLRRLQPPRSDQGRWDALMAGPAALSAAAAAALAAALLLLRREDPGPGAGPSMAETEALSKLREDFRMQNKSVFILGASGETGRVLLKEILEQGLFSKVTLIGRRKLTFDEEAYKNVNQEVVDFEKLDDYASAFQGHDVGFCCLGTTRGKAGAGEVEAKVEELKFDRYSVFRPGVLLCDRQESRPGEWLVRKFFGSLPDSWASGHSVPVVTVVRAMLNNVVRPRDKQMELLENKAIHDLGKAHGSLKP

SEQ ID NO: 907947 - protein, 237 aa, Homo sapiens
GPAPVGGARQRRREATRKTKPGRRCLRRLQPPRSDQGRWDALMAGPAALSAAAAAALAAALLLLRREDPGPGAGPSMAETEALSKLREDFRMQNKSVFILGASGETGRVLLKEILEQGLFSKVTLIGRRKLTFDEEAYKNVNQEVVDFEKLDDYASAFQGHDVGFCCLGTTRGKAGAEGFVRVDRDYVLKSAELAKAGGCKHFNLLSSKGADKSSNFLYLQVKGEVEAKVEELKFDR

SEQ ID NO: 907948 - protein, 178 aa, Homo sapiens; identical to SEQ ID NO: 907933

SEQ ID NO: 907949 - protein, 94 aa, Homo sapiens
ARYRQTLNYVEKKELTLLVGMEIRVVIVENSMEISQKTKKRTIISNSSYYYLPKDKKSVYQRDNLHSHLPCLLQHNSQEQRYGMHLSVHQWMSG

SEQ ID NO: 907950 - protein, 119 aa, Homo sapiens
MTTPLPFKVMMLDSVAWVPPEGKLGRGKEGICSFPFLLASNIKDSFLAHSFSLCLLQCLNVNKPLLFKILYAALTFGILLIVLISSSFKVILEFRPQCWRRRKYLHDFAYCDYRYHYIP

SEQ ID NO: 907951 - protein, 1101 aa, Homo sapiens
MDRAPTEQNVKLSAEVEPFIPQKKSPDTFMIPMALPNDNGSVSGVEPTPIPSYLITCYPFVQENQSNRQFPLYNNDIRWQQPNPNPTGPYFAYPIISAQPPVSTEYTYYQLMPAPCAQVMGFYHPFPTPYSNTFQAANTVNAITTECTERPSQLGQVFPLSSHRSRNSNRGSVVPKQQLLQQHIKSKRPLVKNVATQKETNAAGPDSRSKIVLLVDASQQTDFPSDIANKSLSETTATMLWKSKGRRRRASHPTAESSSEQGASEADIDSDSGYCSPKHSNNQPAAGALRNPDSGTMNHVESSMCAGGVNWSNVTCQATQKKPWMEKNQTFSRGGRQTEQRNNSQVGFRCRGHSTSSERRQNLQKRPDNKHLSSSQSHRSDPNSESLYFEDEDGFQELNENGNAKDENIQQKLSSKVLDDLPENSPINIVQTPIPITTSVPKRAKSQKKKALAAALATAQEYSEISMEQKKLQEALSKAAGKKNKTPVQLDLGDMLAALEKQQQAMKARQITNTRPLSYTVVTAASFHTKDSTNRKPLTKSQPCLTSFNSVDIASSKAKKGKEKEIAKLKRPTALKKVILKEREEKKGRLTVDHNLLGSEEPTEMHLDFIDDLPQEIVSQEDTGLSMPSDTSLSPASQNSPYCMTPVSQGSPASSGIGSPMASSTITKIHSKRFREYCNQVLCKEIDECVTLLLQELVSFQERIYQKDPVRAKARRRLVMGLREVTKHMKLNKIKCVIISPNCEKIQSKGGLDEALYNVIAMAREQEIPFVFALGRKALGRCVNKLVPVSVVGIFNYFGAESLFNKLVELTEEARKAYKDMVAAMEQEQAEEALKNVKKVPHHMGHSRNPSAASAISFCSVISEPISEVNEKEYETNWRNMVETSDGLEASENEKEVSCKHSTSEKPSKLPFDTPPIGKQPSLVATGSTTSATSAGKSTASDKEEVKPDDLEWASQQSTETGSLDGSCRDLLNSSITSTTSTLVPGMLEEEEDEDEEEEEDYTHEPISVEVQLNSRIESWVSETQRTMETLQLGKTLNGSEEDNVEQSGEEEAEAPEVLEPGMDSEAWTADQQASPGQQKSSNCSSLNKEHSDSNYTTQTT

SEQ ID NO: 907952 - protein, 145 aa, Homo sapiens
MDRAPTEQNVKLSAEVEPFIPQKKSPDTFMIPMALPNDNGSVSGVEPTPIPSYLITCYPFVQENQSNRQFPLYNNDILTDTLITGIQRRGSNDSFAGKGHTNQVIQMTVYESGQLISCSMDDTVWYTTSCCGTTADKECETDVSK

SEQ ID NO: 907953 - protein, 1101 aa, Homo sapiens; identical to SEQ ID NO: 907951

SEQ ID NO: 907954 - protein, 1101 aa, Homo sapiens; identical to SEQ ID NO: 907951

SEQ ID NO: 907955 - protein, 1056 aa, Homo sapiens
MDRAPTEQNVKLSAEVEPFIPQKKSPDTFMIPMALPNDNGSVSGVEPTPIPSYLITCYPFVQENQSNRQFPLYNNDIRWQQPNPNPTGPYFAYPIISAQPPVSTEYTYYQLMPAPCAQVMGFYHPFPTPYSNTFQAANTVNAITTECTERPSQLGQVFPLSSHRSRNSNRGSVVPKQQLLQQHIKSKRPLVKNVATQKETNAAGPDSRSKIVLLVDASQQTDFPSDIANKSLSETTATMLWKSKGRRRRASHPTAESSSEQGASEADIDSDSGYCSPKHSNNQPAAGALRNPDSGTMNHVESSMCAGGVNWSNVTCQATQKKPWMEKNQTFSRGGRQTEQRNNSQDEDGFQELNENGNAKDENIQQKLSSKVLDDLPENSPINIVQTPIPITTSVPKRAKSQKKKALAAALATAQEYSEISMEQKKLQEALSKAAGKKNKTPVQLDLGDMLAALEKQQQAMKARQITNTRPLSYTVVTAASFHTKDSTNRKPLTKSQPCLTSFNSVDIASSKAKKGKEKEIAKLKRPTALKKVILKEREEKKGRLTVDHNLLGSEEPTEMHLDFIDDLPQEIVSQEDTGLSMPSDTSLSPASQNSPYCMTPVSQGSPASSGIGSPMASSTITKIHSKRFREYCNQVLCKEIDECVTLLLQELVSFQERIYQKDPVRAKARRRLVMGLREVTKHMKLNKIKCVIISPNCEKIQSKGGLDEALYNVIAMAREQEIPFVFALGRKALGRCVNKLVPVSVVGIFNYFGAESLFNKLVELTEEARKAYKDMVAAMEQEQAEEALKNVKKVPHHMGHSRNPSAASAISFCSVISEPISEVNEKEYETNWRNMVETSDGLEASENEKEVSCKHSTSEKPSKLPFDTPPIGKQPSLVATGSTTSATSAGKSTASDKEEVKPDDLEWASQQSTETGSLDGSCRDLLNSSITSTTSTLVPGMLEEEEDEDEEEEEDYTHEPISVEVQLNSRIESWVSETQRTMETLQLGKTLNGSEEDNVEQSGEEEAEAPEVLEPGMDSEAWTADQQASPGQQKSSNCSSLNKEHSDSNYTTQTT

SEQ ID NO: 907956 - protein, 635 aa, Homo sapiens
MEQKKLQEALSKAAGKKNKTPVQLDLGDMLAALEKQQQAMKARQITNTRPLSYTVVTAASFHTKDSTNRKPLTKSQPCLTSFNSVDIASSKAKKGKEKEIAKLKRPTALKKVILKEREEKKGRLTVDHNLLGSEEPTEMHLDFIDDLPQEIVSQEDTGLSMPSDTSLSPASQNSPYCMTPVSQGSPASSGIGSPMASSTITKIHSKRFREYCNQVLCKEIDECVTLLLQELVSFQERIYQKDPVRAKARRRLVMGLREVTKHMKLNKIKCVIISPNCEKIQSKGGLDEALYNVIAMAREQEIPFVFALGRKALGRCVNKLVPVSVVGIFNYFGAESLFNKLVELTEEARKAYKDMVAAMEQEQAEEALKNVKKVPHHMGHSRNPSAASAISFCSVISEPISEVNEKEYETNWRNMVETSDGLEASENEKEVSCKHSTSEKPSKLPFDTPPIGKQPSLVATGSTTSATSAGKSTASDKEEVKPDDLEWASQQSTETGSLDGSCRDLLNSSITSTTSTLVPGMLEEEEDEDEEEEEDYTHEPISVEVQLNSRIESWVSETQRTMETLQLGKTLNGSEEDNVEQSGEEEAEAPEVLEPGMDSEAWTADQQASPGQQKSSNCSSLNKEHSDSNYTTQTT

SEQ ID NO: 907957 - protein, 497 aa, Homo sapiens [sequence omitted]

SEQ ID NO: 907958 - protein, 638 aa, Homo sapiens
MDRAPTEQNVKLSAEVEPFIPQKKSPDTFMIPMALPNDNGSVSGVEPTPIPSYLITCYPFVQENQSNRQFPLYNNDIRWQQPNPNPTGPYFAYPIISAQPPVSTEYTYYQLMPAPCAQVMGFYHPFPTPYSNTFQAANTVNAITTECTERPSQLGQVFPLSSHRSRNSNRGSVVPKQQLLQQHIKSKRPLVKNVATQKETNAAGPDSRSKIVLLVDASQQTDFPSDIANKSLSETTATMLWKSKGRRRRASHPTAESSSEQGASEADIDSDSGYCSPKHSNNQPAAGALRNPDSGTMNHVESSMCAGGVNWSNVTCQATQKKPWMEKNQTFSRGGRQTEQRNNSQVGFRCRGHSTSSERRQNLQKRPDNKHLSSSQSHRSDPNSESLYFEDEDGFQELNENGNAKDENIQQKLSSKVLDDLPENSPINIVQTPIPITTSVPKRAKSQKKKALAAALATAQEYSEISMEQKKLQEALSKAAGKKNKTPVQLDLGDMLAALEKQQQAMKARQITNTRPLSYTVVTAASFHTKDSTNRKPLTKSQPCLTSFNSVDIASSKAKKGKEKEIAKLKRPTALKKVILKEREEKKGRLTVDHNLLGSEEPTEMHLDFIDDLPQEIVSQEGKELPLSPLLMEWSEIF

SEQ ID NO: 907959 - protein, 401 aa, Homo sapiens [sequence omitted]

SEQ ID NO: 907960 - protein, 1101 aa, Homo sapiens; identical to SEQ ID NO: 907951

SEQ ID NO: 907961 - protein, 1101 aa, Homo sapiens; identical to SEQ ID NO: 907951

SEQ ID NO: 907962 - protein, 982 aa, Homo sapiens [sequence omitted]

SEQ ID NO: 907963 - protein, 635 aa, Homo sapiens; identical to SEQ ID NO: 907956

SEQ ID NO: 907964 - protein, 497 aa, Homo sapiens [sequence omitted]

SEQ ID NO: 907965 - protein, 537 aa, Homo sapiens
MDRAPTEQNVKLSAEVEPFIPQKKSPDTFMIPMALPNDNGSVSGVEPTPIPSYLITCYPFVQENQSNRQFPLYNNDIRWQQPNPNPTGPYFAYPIISAQPPVSTEYTYYQLMPAPCAQVMGFYHPFPTPYSNTFQAANTVNAITTECTERPSQLGQVFPLSSHRSRNSNRGSVVPKQQLLQQHIKSKRPLVKNVATQKETNAAGPDSRSKIVLLVDASQQTDFPSDIANKSLSETTATMLWKSKGRRRRASHPTAESSSEQGASEADIDSDSGYCSPKHSNNQPAAGALRNPDSGTMNHVESSMCAGGVNWSNVTCQATQKKPWMEKNQTFSRGGRQTEQRNNSQVGFRCRGHSTSSERRQNLQKRPDNKHLSSSQSHRSDPNSESLYFEDEDGFQELNENGNAKDENIQQKLSSKVLDDLPENSPINIVQTPIPITTSVPKRAKSQKKKALAAALATAQEYSEISMEQKKLQEALSKAAGKKNKTPVQLDLGDMLAALEKQQQAMKARQITNTRPLSYTGDIISLSNLLFVSANIC

SEQ ID NO: 907966 - protein, 676 aa, Homo sapiens
PRPWKAGDCELGWRSRGAEATESKLSGGFRWTQKTSPTQGDSAITHSLYRMIFLTALPLFWIMISASRGGHWGAWMPSSISAFEGTCVSIPCRFDFPDELRPAVVHGVWYFNSPYPKNYPPVVFKSRTQVVHESFQGRSRLLGDLGLRNCTLLLSNVSPELGGKYYFRGDLGGYNQYTFSEHSVLDIVNTPNIVVPPEVVAGTEVEVSCMVPDNCPELRPELSWLGHEGLGEPAVLGRLREDEGTWVQVSLLHFVPTREANGHRLGCQASFPNTTLQFEGYASMDVKYPPVIVEMNSSVEAIEGSHVSLLCGADSNPPPLLTWMRDGTVLREAVAESLLLELEEVTPAEDGVYACLAENAYGQDNRTVGLSVMYAPWKPTVNGTMVAVEGETVSILCSTQSNPDPILTIFKEKQILSTVIYESELQLELPAVSPEDDGEYWCVAENQYGQRATAFNLSVEFAPVLLLESHCAAARDTVQCLCVVKSNPEPSVAFELPSRNVTVNESEREFVYSERSGLVLTSILTLRGQAQAPPRVICTARNLYGAKSLELPFQGAHRLMWAKIGPVGAVVAFAILIAIVCYITQTRRKKNVTESPSFSAGDNPPVLFSSDFRISGAPEKYESERRLGSERRLLGLRGEPPELDLSYSHSDLGKRPTKDSYTLTEELAEYAEIRVK

SEQ ID NO: 907967 - protein, 337 aa, Homo sapiens
PRPWKAGDCELGWRSRGAEATESKLSGGFRWTQKTSPTQGDSAITHSLYRMIFLTALPLFWIMISASRGGHWGAWMPSSISAFEGTCVSIPCRFDFPDELRPAVVHGVWYFNSPYPKNYPPVVFKSRTQVVHESFQGRSRLLGDLGLRNCTLLLSNVSPELGGKYYFRGDLGGYNQYTFSEHSVLDIVNTPNIVVPPEVVAGTEVEVSCMVPDNCPELRPELSWLGHEGLGEPAVLGRLREDEGTWVQVSLLHFVPTREANGHRLGCQASFPNTTLQFEGYASMDVKYPPGIVQMKPRGSHTRVPSEAVLGGEKTPRFNGSGGKPPKEAKGLESEVN

SEQ ID NO: 907968 - protein, 691 aa, Homo sapiens
PRPWKAGDCELGWRSRGAEATESKLSGGFRWTQKTSPTQGDSAITHSLYRMIFLTALPLFWIMISASRGGHWGAWMPSSISAFEGTCVSIPCRFDFPDELRPAVVHGVWYFNSPYPKNYPPVVFKSRTQVVHESFQGRSRLLGDLGLRNCTLLLSNVSPELGGKYYFRGDLGGYNQYTFSEHSVLDIVNTPNIVVPPEVVAGTEVEVSCMVPDNCPELRPELSWLGHEGLGEPAVLGRLREDEGTWVQVSLLHFVPTREANGHRLGCQASFPNTTLQFEGYASMDVKYPPVIVEMNSSVEAIEGSHVSLLCGADSNPPPLLTWMRDGTVLREAVAESLLLELEEVTPAEDGVYACLAENAYGQDNRTVGLSVMYAPWKPTVNGTMVAVEGETVSILCSTQSNPDPILTIFKEKQILSTVIYESELQLELPAVSPEDDGEYWCVAENQYGQRATAFNLSVEFAPVLLLESHCAAARDTVQCLCVVKSNPEPSVAFELPSRNVTVNESEREFVYSERSGLVLTSILTLRGQAQAPPRVICTARNLYGAKSLELPFQGAHRLMWAKIGPVGAVVAFAILIAIVCYITQTRRKKNVTESPSFSAGDNPPVLFSSDFRISGAPEKYESKEVSTLESHWVPQESERRLGSERRLLGLRGEPPELDLSYSHSDLGKRPTKDSYTLTEELAEYAEIRVK

SEQ ID NO: 907969 - protein, 165 aa, Homo sapiens
MSCGPLWCMVSGTSIAPTPRTTPRVICTARNLYGAKSLELPFQGAHRLMWAKIGPVGAVVAFAILIAIVCYITQTRRKKNVTESPSFSAGDNPPVLFSSDFRISGAPEKYESERRLGSERRLLGLRGEPPELDLSYSHSDLGKRPTKDSYTLTEELAEYAEIRVK

SEQ ID NO: 907970 - protein, 189 aa, Homo sapiens
PRPWKAGDCELGWRSRGAEATESKLSGGFRWTQKTSPTQGDSAITHSLYRMIFLTALPLFWIMISASRGGHWGAWMPSSISAFEGTCVSIPCRFDFPDELRPAVVHGVWYFNSPYPKNYPPVVFKSRTQVVHESFQGRSRLLGDLGLRNCTLLLSNVSPEQRQRNTNNQKNQKQTTTKNTLLKSTRFRG

SEQ ID NO: 907971 - protein, 686 aa, Homo sapiens
PRPWKAGDCELGWRSRGAEATESKLSGGFRWTQKTSPTQGDSAITHSLYRMIFLTALPLFWIMISASRGGHWGAWMPSSISAFEGTCVSIPCRFDFPDELRPAVVHGVWYFNSPYPKNYPPVVFKSRTQVVHESFQGRSRLLGDLGLRNCTLLLSNVSPELGGKYYFRGDLGGYNQYTFSEHSVLDIVNTPNIVVPPEVVAGTEVEVSCMVPDNCPELRPELSWLGHEGLGEPAVLGRLREDEGTWVQVSLLHFVPTREANGHRLGCQASFPNTTLQFEGYASMDVKYPPVIVEMNSSVEAIEGSHVSLLCGADSNPPPLLTWMRDGTVLREAVAESLLLELEEVTPAEDGVYACLAENAYGQDNRTVGLSVMYAPWKPTVNGTMVAVEGETVSILCSTQSNPDPILTIFKEKQILSTVIYESELQLELPAVSPEDDGEYWCVAENQYGQRATAFNLSVEFAPVLLLESHCAAARDTVQCLCVVKSNPEPSVAFELPSRNVTVNESEREFVYSERSGLVLTSILTLRGQAQAPPRVICTARNLYGAKSLELPFQGAHRLMWAKIGPVGAVVAFAILIAIVCYITQTRRKKNVTESPSFSAGDNPPVLFSSDFRISGAPEKYESERRLGSERRLLGLRGEPPELDLSYSHSDLGKRPTKDSYTQDYICTRDALRVHHHRLPGDVGPC

SEQ ID NO: 907972 - protein, 162 aa, Homo sapiens
MRAPIPEPKPGDLIEIFRPFYRHWAIYVGDGYVVHLAPPSEVAGAGAASVMSALTDKAIVKKELLYDVAGSDKYQVNNKHDDKYSPLPCSKIIQRAEELVGQEVLYKLTSENCEHFVNELRYGVARSDQVRDVIIAASVAGMGLAAMSLIGVMFSRNKRQKQ

SEQ ID NO: 907973 - protein, 162 aa, Homo sapiens; identical to SEQ ID NO: 907972

SEQ ID NO: 907974 - protein, 167 aa, Homo sapiens
IYRSLFAAAFPEPKPGDLIEIFRPFYRHWAIYVGDGYVVHLAPPSEVAGAGAASVMSALTDKAIVKKELLYDVAGSDKYQVNNKHDDKYSPLPCSKIIQRAEELVGQEVLYKLTSENCEHFVNELRYGVARSDQVRDVIIAASVAGMGLAAMSLIGVMFSRNKRQKQ

SEQ ID NO: 907975 - protein, 112 aa, Homo sapiens
MSALTDKAIVKKELLYDVAGSDKYQVNNKHDDKYSPLPCSKIIQRAEELVGQEVLYKLTSENCEHFVNELRYGVARSDQVRDVIIAASVAGMGLAAMSLIGVMFSRNKRQKQ

SEQ ID NO: 907976 - protein, 112 aa, Homo sapiens; identical to SEQ ID NO: 907975

SEQ ID NO: 907977 - protein, 106 aa, Homo sapiens
MSALTDKAIVKKELLYDVAGSDKYQVNNKHDDKYSPLPCSKIIQRAEVLYKLTSENCEHFVNELRYGVARSDQVRDVIIAASVAGMGLAAMSLIGVMFSRNKRQKQ

SEQ ID NO: 907978 - protein, 162 aa, Homo sapiens; identical to SEQ ID NO: 907972

SEQ ID NO: 907979 - protein, 162 aa, Homo sapiens; identical to SEQ ID NO: 907972

SEQ ID NO: 907980 - protein, 177 aa, Homo sapiens
MKTQRSSWCQLLLHRIGQRIPEPKPGDLIEIFRPFYRHWAIYVGDGYVVHLAPPSEVAGAGAASVMSALTDKAIVKKELLYDVAGSDKYQVNNKHDDKYSPLPCSKIIQRAEELVGQEVLYKLTSENCEHFVNELRYGVARSDQVRDVIIAASVAGMGLAAMSLIGVMFSRNKRQKQ

SEQ ID NO: 907981 - protein, 221 aa, Homo sapiens
MLLPFREEEIKLLKGARWLFLGSEARLSRPAQQKPQSRGVWRRSFLLMTINPCSPCLRHLRSEIEPGLEGPHREGRCVRPLHWAIYVGDGYVVHLAPPSEVAGAGAASVMSALTDKAIVKKELLYDVAGSDKYQVNNKHDDKYSPLPCSKIIQRAEELVGQEVLYKLTSENCEHFVNELRYGVARSDQVRDVIIAASVAGMGLAAMSLIGVMFSRNKRQKQ

SEQ ID NO: 907982 - protein, 156 aa, Homo sapiens
MRAPIPEPKPGDLIEIFRPFYRHWAIYVGDGYVVHLAPPSEVAGAGAASVMSALTDKAIVKKELLYDVAGSDKYQVNNKHDDKYSPLPCSKIIQRAEVLYKLTSENCEHFVNELRYGVARSDQVRDVIIAASVAGMGLAAMSLIGVMFSRNKRQKQ

SEQ ID NO: 907983 - protein, 104 aa, Homo sapiens
MRAPIPEPKPGDLIEIFRPFYRHWAIYVGDGYVVHLAPPSQRCHHRCKRCRNGLGSHEPYWSHVLKKQATKAITEKDCPVSDDFIHQGGLVLLESLGFGLWISL

SEQ ID NO: 907984 - protein, 1264 aa, Homo sapiens
MSTLYVSPHPDAFPSLRALIAARYGEAGEGPGWGGAQPRICLQPPPTSRTPFPPPRLPALEQGPGGLWVWGATAVAQLLWPAGLGGPGGSRAAVLVQQWVSYADTELIPAACGATLPALGLRSSAQDPQAVLGALGRALSPLEEWLRLHTYLAGEAPTLADLAAVTALLLPFRYVLDPPARRIWNNVTRWFVTCVRQPEFRAVLGEVVLYSGARPLSHQPGPEAPALPKTAAQLKKEAKKREKLEKFQQKQKIQQQQPPPGEKKPKPEKREKRDPGVITYDLPTPPGEKKDVSGPMPDSYSPRYVEAAWYPWWEQQGFFKPEYGRPNVSAANPRGVFMMCIPPPNVTGSLHLGHALTNAIQDSLTRWHRMRGETTLWNPGCDHAGIATQVVVEKKLWREQGLSRHQLGREAFLQEVWKWKEEKGDRIYHQLKKLGSSLDWDRACFTMDPKLSAAVTEAFVRLHEEGIIYRSTRLVNWSCTLNSAISDIEVDKKELTGRTLLSVPGYKEKVEFGVLVSFAYKVQGSDSDEEVVVATTRIETMLGDVAVAVHPKDTRYQHLKGKNVIHPFLSRSLPIVFDEFVDMDFGTGAVKITPAHDQNDYEVGQRHGLEAISIMDSRGALINVPPPFLGLPRFEARKAVLVALKERGLFRGIEDNPMVVPLCNRSKDVVEPLLRPQWYVRCGEMAQAASAAVTRGDLRILPEAHQRTWHAWMDNIREWCISRQLWWGHRIPAYFVTVSDPAVPPGEDPDGRYWVSGRNEAEAREKAAKEFGVSPDKISLQQDEDVLDTWFSSGLFPLSILGWPNQSEDLSVFYPGTLLETGHDILFFWVARMVMLGLKLTGRLPFREVYLHAIVRDAHGRKMSKSLGNVIDPLDVIYGISLQGLHNQLLNSNLDPSEVEKAKEGQKADFPAGIPECGTDALRFGLCAYMSQGRDINLDVNRILGYRHFCNKLWNATKFALRGLGKGFVPSPTSQPGGHESLVDRWIRSRLTEAVRLSNQGFQAYDFPAVTTAQYSFWLYELCDVYLECLKPVLNGVDQVAAECARQTLYTCLDVGLRLLSPFMPFVTEELFQRLPRRMPQAPPSLCVTPYPEPSECSWKDPEAEAALELALSITRAVRSLRADYNLTRIRPDCFLEVADEATGALASAVSGYVQALASAGVVAVLALGAPAPQGCAVALASDRCSIHLQLQGLVDPARELGKLQAKRVEAQRQAQRLRERRAASGYPVKVPLEVQEADEAKLQQTEAELRKVDEAIALFQKML

SEQ ID NO: 907985 - protein, 1264 aa, Homo sapiens; identical to SEQ ID NO: 907984

SEQ ID NO: 907986 - protein, 969 aa, Homo sapiens [sequence omitted]

SEQ ID NO: 907987 - protein, 1102 aa, Homo sapiens
MALMASGLGELAEGTKPFPRPRRANSVAIPELVAELAVTQYPVHIQDYVPTCPRSDINLDVNLDTGLPPAQLKKEAKKREKLEKFQQKQKIQQQQPPPGEKKPKPEKREKRDPGVITYDLPTPPGEKKDVSGPMPDSYSPRYVEAAWYPWWEQQGFFKPEYGRPNVSAANPRGVFMMCIPPPNVTGSLHLGHALTNAIQDSLTRWHRMRGETTLWNPGCDHAGIATQVVVEKKLWREQGLSRHQLGREAFLQEVWKWKEEKGDRIYHQLKKLGSSLDWDRACFTMDPKLSAAVTEAFVRLHEEGIIYRSTRLVNWSCTLNSAISDIEVDKKELTGRTLLSVPGYKEKVEFGVLVSFAYKVQGSDSDEEVVVATTRIETMLGDVAVAVHPKDTRYQHLKGKNVIHPFLSRSLPIVFDEFVDMDFGTGAVKITPAHDQNDYEVGQRHGLEAISIMDSRGALINVPPPFLGLPRFEARKAVLVALKERGLFRGIEDNPMVVPLCNRSKDVVEPLLRPQWYVRCGEMAQAASAAVTRGDLRILPEAHQRTWHAWMDNIREWCISRQLWWGHRIPAYFVTVSDPAVPPGEDPDGRYWVSGRNEAEAREKAAKEFGVSPDKISLQQDEDVLDTWFSSGLFPLSILGWPNQSEDLSVFYPGTLLETGHDILFFWVARMVMLGLKLTGRLPFREVYLHAIVRDAHGRKMSKSLGNVIDPLDVIYGISLQGLHNQLLNSNLDPSEVEKAKEGQKADFPAGIPECGTDALRFGLCAYMSQGRDINLDVNRILGYRHFCNKLWNATKFALRGLGKGFVPSPTSQPGGHESLVDRWIRSRLTEAVRLSNQGFQAYDFPAVTTAQYSFWLYELCDVYLECLKPVLNGVDQVAAECARQTLYTCLDVGLRLLSPFMPFVTEELFQRLPRRMPQAPPSLCVTPYPEPSECSWKDPEAEAALELALSITRAVRSLRADYNLTRIRPDCFLEVADEATGALASAVSGYVQALASAGVVAVLALGAPAPQGCAVALASDRCSIHLQLQGLVDPARELGKLQAKRVEAQRQAQRLRERRAASGYPVKVPLEVQEADEAKLQQTEAELRKVDEAIALFQKML

SEQ ID NO: 907988 - protein, 1315 aa, Homo sapiens
MSTLYVSPHPDAFPSLRALIAARYGEAGEGPGWGGAQPRICLQPPPTSRTPFPPPRLPALEQGPGGLWVWGATAVAQLLWPAGLGGPGGSRAAVLVQQWVSYADTELIPAACGATLPALGLRSSAQDPQAVLGALGRALSPLEEWLRLHTYLAGEAPTLADLAAVTALLLPFRYVLDPPARRIWNNVTRWFVTCVRQPEFRAVLGEVVLYSGARPLSHQPGPEAPALPKTAAQLKKEAKKREKLEKFQQKQKIQQQQPPPGEKKPKPEKREKRDPGVITYDLPTPPGEKKDVSGPMPDSYSPRYVEAAWYPWWEQQGFFKPEYGRPNVSAANPRGVFMMCIPPPNVTGSLHLGHALTNAIQDSLTRWHRMRGETTLWNPGCDHAGIATQVVVEKKLWREQGLSRHQLGREAFLQEVWKWKEEKGDRIYHQLKKLGSSLDWDRACFTMDPKLSAAVTEAFVRLHEEGIIYRSTRLVNWSCTLNSAISDIEVDKKELTGRTLLSVPGYKEKVEFGVLVSFAYKVQGSDSDEEVVVATTRIETMLGDVAVAVHPKDTRYQHLKGKNVIHPFLSRSLPIVFDEFVDMDFGTGAVKITPAHDQNDYEVGQRHGLEAISIMDSRGALINVPPPFLGLPRFEARKAVLVALKERGLFRGIEDNPMVVPLCNRSKDVVEPLLRPQWYVRCGEMAQAASAAVTRGDLRILPEAHQRTWHAWMDNIRCVGSSVWEGLAEELSRAHSGQAPSGPPWFLLPDICREWCISRQLWWGHRIPAYFVTVSDPAVPPGEVSRGPELLLGHPAGVDPDGRYWVSGRNEAEAREKAAKEFGVSPDKISLQQDEDVLDTWFSSGLFPLSILGWPNQSEDLSVFYPGTLLETGHDILFFWVARMVMLGLKLTGRLPFREVYLHAIVRDAHGRKMSKSLGNVIDPLDVIYGISLQGLHNQLLNSNLDPSEVEKAKEGQKADFPAGIPECGTDALRFGLCAYMSQGRDINLDVNRILGYRHFCNKLWNATKFALRGLGKGFVPSPTSQPGGHESLVDRWIRSRLTEAVRLSNQGFQAYDFPAVTTAQYSFWLYELCDVYLECLKPVLNGVDQVAAECARQTLYTCLDVGLRLLSPFMPFVTEELFQRLPRRMPQAPPSLCVTPYPEPSECSWKDPEAEAALELALSITRAVRSLRADYNLTRIRPDCFLEVADEATGALASAVSGYVQALASAGVVAVLALGAPAPQGCAVALASDRCSIHLQLQGLVDPARELGKLQAKRVEAQRQAQRLRERRAASGYPVKVPLEVQEADEAKLQQTEAELRKVDEAIALFQKML

SEQ ID NO: 907989 - protein, 1225 aa, Homo sapiens
MSTLYVSPHPDAFPSLRALIAARYGEAGEGPGWGGAQPRICLQPPPTSRTPFPPPRLPALEQGPGGLWVWGATAVAQLLWPAGLGGPGGSRAAVLVQQWVSYADTELIPAACGATLPALGLRSSAQDPQAVLGALGRALSPLEEWLRLHTYLAGEAPTLADLAAVTALLLPFRYVLDPPARRIWNNVTRWFVTCVRQPEFRAVLGEVVLYSGARPLSHQPGPEAPALPKTAAQLKKEAKKREKLEKFQQKQKIQQQQPPPGEKKPKPEKREKRDPGVITYDLPTPPGEKKDVSGPMPDSYSPRYVEAAWYPWWEQQGFFKPEYGRPNVSAANPRGVFMMCIPPPNVTGSLHLGHALTNAIQDSLTRWHRMRGETTLWNPGCDHAGIATQVVVEKKLWREQGLSRHQLGREAFLQEVWKWKEEKGDRIYHQLKKLGSSLDWDRACFTMDPKLSAAVTEAFVRLHEEGIIYRSTRLVNWSCTLNSAISDIEVDKKELTGRTLLSVPGYKEKVEFGVLVSFAYKVQGSDSDEEVVVATTRIETMLGDVAVAVHPKDTRYQHLKGKNVIHPFLSRSLPIVFDEFVDMDFGTGAVKITPAHDQNDYEVGQRHGLEAISIMDSRGALINVPPPFLGLPRFEARKAVLVALKERGLFRGIEDNPMVVPLCNRSKDVVEPLLRPQWEWCISRQLWWGHRIPAYFVTVSDPAVPPGEDPDGRYWVSGRNEAEAREKAAKEFGVSPDKISLQQDEDVLDTWFSSGLFPLSILGWPNQSEDLSVFYPGTLLETGHDILFFWVARMVMLGLKLTGRLPFREVYLHAIVRDAHGRKMSKSLGNVIDPLDVIYGISLQGLHNQLLNSNLDPSEVEKAKEGQKADFPAGIPECGTDALRFGLCAYMSQGRDINLDVNRILGYRHFCNKLWNATKFALRGLGKGFVPSPTSQPGGHESLVDRWIRSRLTEAVRLSNQGFQAYDFPAVTTAQYSFWLYELCDVYLECLKPVLNGVDQVAAECARQTLYTCLDVGLRLLSPFMPFVTEELFQRLPRRMPQAPPSLCVTPYPEPSECSWKDPEAEAALELALSITRAVRSLRADYNLTRIRPDCFLEVADEATGALASAVSGYVQALASAGVVAVLALGAPAPQGCAVALASDRCSIHLQLQGLVDPARELGKLQAKRVEAQRQAQRLRERRAASGYPVKVPLEVQEADEAKLQQTEAELRKVDEAIALFQKML

SEQ ID NO: 907990 - protein, 1293 aa, Homo sapiens
MSTLYVSPHPDAFPSLRALIAARYGEAGEGPGWGGAQPRICLQPPPTSRTPFPPPRLPALEQGPGGLWVWGATAVAQLLWPAGLGGPGGSRAAVLVQQWVSYADTELIPAACGATLPALGLRSSAQDPQAVLGALGRALSPLEEWLRLHTYLAGEAPTLADLAAVTALLLPFRYVLDPPARRIWNNVTRWFVTCVRQPEFRAVLGEVVLYSGARPLSHQPGPEAPALPKTAAQLKKEAKKREKLEKFQQKQKIQQQQPPPGEKKPKPEKREKRDPGVITYDLPTPPGEKKDVSGPMPDSYSPRYVEAAWYPWWEQQGFFKPEYGRPNVSAANPRGVFMMCIPPPNVTGSLHLGHALTNAIQDSLTRWHRMRGETTLWNPGCDHAGIATQVVVEKKLWREQGLSRHQLGREAFLQEVWKWKEEKGDRIYHQLKKLGSSLDWDRACFTMDPKLSAAVTEAFVRLHEEGIIYRSTRLVNWSCTLNSAISDIEVDKKELTGRTLLSVPGYKEKVEFGVLVSFAYKVQGSDSDEEVVVATTRIETMLGDVAVAVHPKDTRYQHLKGKNVIHPFLSRSLPIVFDEFVDMDFGTGAVKITPAHDQNDYEVGQRHGLEAISIMDSRGALINVPPPFLGLPRFEARKAVLVALKERGLFRGIEDNPMVVPLCKLRVGAWDGRKMEGSSGFYRLAFSPTCTPSRSKDVVEPLLRPQWYVRCGEMAQAASAAVTRGDLRILPEAHQRTWHAWMDNIREWCISRQLWWGHRIPAYFVTVSDPAVPPGEDPDGRYWVSGRNEAEAREKAAKEFGVSPDKISLQQDEDVLDTWFSSGLFPLSILGWPNQSEDLSVFYPGTLLETGHDILFFWVARMVMLGLKLTGRLPFREVYLHAIVRDAHGRKMSKSLGNVIDPLDVIYGISLQGLHNQLLNSNLDPSEVEKAKEGQKADFPAGIPECGTDALRFGLCAYMSQGRDINLDVNRILGYRHFCNKLWNATKFALRGLGKGFVPSPTSQPGGHESLVDRWIRSRLTEAVRLSNQGFQAYDFPAVTTAQYSFWLYELCDVYLECLKPVLNGVDQVAAECARQTLYTCLDVGLRLLSPFMPFVTEELFQRLPRRMPQAPPSLCVTPYPEPSECSWKDPEAEAALELALSITRAVRSLRADYNLTRIRPDCFLEVADEATGALASAVSGYVQALASAGVVAVLALGAPAPQGCAVALASDRCSIHLQLQGLVDPARELGKLQAKRVEAQRQAQRLRERRAASGYPVKVPLEVQEADEAKLQQTEAELRKVDEAIALFQKML

SEQ ID NO: 907991 - protein, 682 aa, Homo sapiens
MDFGTGAVKITPAHDQNDYEVGQRHGLEAISIMDSRGALINVPPPFLGLPRFEARKAVLVALKERGLFRGIEDNPMVVPLCNRSKDVVEPLLRPQWYVRCGEMAQAASAAVTRGDLRILPEAHQRTWHAWMDNIREWCISRQLWWGHRIPAYFVTVSDPAVPPGEDPDGRYWVSGRNEAEAREKAAKEFGVSPDKISLQQDEDVLDTWFSSGLFPLSILGWPNQSEDLSVFYPGTLLETGHDILFFWVARMVMLGLKLTGRLPFREVYLHAIVRDAHGRKMSKSLGNVIDPLDVIYGISLQGLHNQLLNSNLDPSEVEKAKEGQKADFPAGIPECGTDALRFGLCAYMSQGRDINLDVNRILGYRHFCNKLWNATKFALRGLGKGFVPSPTSQPGGHESLVDRWIRSRLTEAVRLSNQGFQAYDFPAVTTAQYSFWLYELCDVYLECLKPVLNGVDQVAAECARQTLYTCLDVGLRLLSPFMPFVTEELFQRLPRRMPQAPPSLCVTPYPEPSECSWKDPEAEAALELALSITRAVRSLRADYNLTRIRPDCFLEVADEATGALASAVSGYVQALASAGVVAVLALGAPAPQGCAVALASDRCSIHLQLQGLVDPARELGKLQAKRVEAQRQAQRLRERRAASGYPVKVPLEVQEADEAKLQQTEAELRKVDEAIALFQKML

SEQ ID NO: 907992 - protein, 811 aa, Homo sapiens
TPPPPNPNKARYEAGVNRPRLVNWSCTLNSAISDIEVDKKELTGRTLLSVPGYKEKVEFGVLVSFAYKVQGSDSDEEVVVATTRIETMLGDVAVAVHPKDTRYQHLKGKNVIHPFLSRSLPIVFDEFVDMDFGTGAVKITPAHDQNDYEVGQRHGLEAISIMDSRGALINVPPPFLGLPRFEARKAVLVALKERGLFRGIEDNPMVVPLCNRSKDVVEPLLRPQWYVRCGEMAQAASAAVTRGDLRILPEAHQRTWHAWMDNIREWCISRQLWWGHRIPAYFVTVSDPAVPPGEDPDGRYWVSGRNEAEAREKAAKEFGVSPDKISLQQDEDVLDTWFSSGLFPLSILGWPNQSEDLSVFYPGTLLETGHDILFFWVARMVMLGLKLTGRLPFREVYLHAIVRDAHGRKMSKSLGNVIDPLDVIYGISLQGLHNQLLNSNLDPSEVEKAKEGQKADFPAGIPECGTDALRFGLCAYMSQGRDINLDVNRILGYRHFCNKLWNATKFALRGLGKGFVPSPTSQPGGHESLVDRWIRSRLTEAVRLSNQGFQAYDFPAVTTAQYSFWLYELCDVYLECLKPVLNGVDQVAAECARQTLYTCLDVGLRLLSPFMPFVTEELFQRLPRRMPQAPPSLCVTPYPEPSECSWKDPEAEAALELALSITRAVRSLRADYNLTRIRPDCFLEVADEATGALASAVSGYVQALASAGVVAVLALGAPAPQGCAVALASDRCSIHLQLQGLVDPARELGKLQAKRVEAQRQAQRLRERRAASGYPVKVPLEVQEADEAKLQQTEAELRKVDEAIALFQKML

SEQ ID NO: 907993 - protein, 1083 aa, Homo sapiens
MSTLYVSPHPDAFPSLRALIAARYGEAGEGPGWGGAQPRICLQPPPTSRTPFPPPRLPALEQGPGGLWVWGATAVAQLLWPAGLGGPGGSRAAVLVQQWVSYADTELIPAACGATLPALGLRSSAQDPQAVLGALGRALSPLEEWLRLHTYLAGEAPTLADLAAVTALLLPFRYVLDPPARRIWNNVTRWFVTCVRQPEFRAVLGEVVLYSGARPLSHQPGPEAPALPKTAAQLKKEAKKREKLEKFQQKQKIQQQQPPPGEKKPKPEKREKRDPGVITYDLPTPPGEKKDVSGPMPDSYSPRYVEAAWYPWWEQQGFFKPEYGRPNVSAANPRGVFMMCIPPPNVTGSLHLGHALTNAIQDSLTRWHRMRGETTLWNPGCDHAGIATQVVVEKKLWREQGLSRHQLGREAFLQEVWKWKEEKGDRIYHQLKKLGSSLDWDRACFTMDPKLSAAVTEAFVRLHEEGIIYRSTRLVNWSCTLNSAISDIEVDKKELTGRTLLSVPGYKEKVEFGVLVSFAYKVQGSDSDEEVVVATTRIETMLGDVAVAVHPKDTRYQHLKGKNVIHPFLSRSLPIVFDEFVDMDFGTGAVKITPAHDQNDYEVGQRHGLEAISIMDSRGALINVPPPFLGLPRFEARKAVLVALKERGLFRGIEDNPMVVPLCNRSKDVVEPLLRPQWYVRCGEMAQAASAAVTRGDLRILPEAHQRTWHAWMDNIREWCISRQLWWGHRIPAYFVTVSDPAVPPGEDPDGRYWVSGRNEAEAREKAAKEFGVSPDKISLQQDEDVLDTWFSSGLFPLSILGWPNQSEDLSVFYPGTLLETGHDILFFWVARMVMLGLKLTGRLPFREVYLHAIVRDAHGRKMSKSLGNVIDPLDVIYGISLQGLHNQLLNSNLDPSEVEKAKEGQKADFPAGIPECGTDALRFGLCAYMSQGRDINLDVNRILGYRHFCNKLWNATKFALRGLGKGFVPSPTSQPGGHESLVDRWIRSRLTEAVRLSNQGFQAYDFPAVTTAQYSFWLYELCDVYLGVLNLCCGGGPRLGLVVPPQPVPCRGWRGGGPLCPGGGVPRARGGPPCFPPGPVCG

SEQ ID NO: 907994 - protein, 704 aa, Homo sapiens
RLGTRLGVLSRSLPIVFDEFVDMDFGTGAVKITPAHDQNDYEVGQRHGLEAISIMDSRGALINVPPPFLGLPRFEARKAVLVALKERGLFRGIEDNPMVVPLCNRSKDVVEPLLRPQWYVRCGEMAQAASAAVTRGDLRILPEAHQRTWHAWMDNIREWCISRQLWWGHRIPAYFVTVSDPAVPPGEDPDGRYWVSGRNEAEAREKAAKEFGVSPDKISLQQDEDVLDTWFSSGLFPLSILGWPNQSEDLSVFYPGTLLETGHDILFFWVARMVMLGLKLTGRLPFREVYLHAIVRDAHGRKMSKSLGNVIDPLDVIYGISLQGLHNQLLNSNLDPSEVEKAKEGQKADFPAGIPECGTDALRFGLCAYMSQGRDINLDVNRILGYRHFCNKLWNATKFALRGLGKGFVPSPTSQPGGHESLVDRWIRSRLTEAVRLSNQGFQAYDFPAVTTAQYSFWLYELCDVYLECLKPVLNGVDQVAAECARQTLYTCLDVGLRLLSPFMPFVTEELFQRLPRRMPQAPPSLCVTPYPEPSECSWKDPEAEAALELALSITRAVRSLRADYNLTRIRPDCFLEVADEATGALASAVSGYVQALASAGVVAVLALGAPAPQGCAVALASDRCSIHLQLQGLVDPARELGKLQAKRVEAQRQAQRLRERRAASGYPVKVPLEVQEADEAKLQQTEAELRKVDEAIALFQKML

SEQ ID NO: 907995 - protein, 755 aa, Homo sapiens
MSTLYVSPHPDAFPSLRALIAARYGEAGEGPGWGGAQPRICLQPPPTSRTPFPPPRLPALEQGPGGLWVWGATAVAQLLWPAGLGGPGGSRAAVLVQQWVSYADTELIPAACGATLPALGLRSSAQDPQAVLGALGRALSPLEEWLRLHTYLAGEAPTLADLAAVTALLLPFRYVLDPPARRIWNNVTRWFVTCVRQPEFRAVLGEVVLYSGARPLSHQPGPEAPALPKTAAQLKKEAKKREKLEKFQQKQKIQQQQPPPGEKKPKPEKREKRDPGVITYDLPTPPGEKKDVSGPMPDSYSPRYVEAAWYPWWEQQGFFKPEYGRPNVSAANPRGVFMMCIPPPNVTGSLHLGHALTNAIQDSLTRWHRMRGETTLWNPGCDHAGIATQVVVEKKLWREQGLSRHQLGREAFLQEVWKWKEEKGDRIYHQLKKLGSSLDWDRACFTMDPKLSAAVTEAFVRLHEEGIIYRSTRLVNWSCTLNSAISDIEVDKKELTGRTLLSVPGYKEKVEFGVLVSFAYKVQGSDSDEEVVVATTRIETMLGDVAVAVHPKDTRYQHLKGKNVIHPFLSRSLPIVFDEFVDMDFGTGAVKITPAHDQNDYEVGQRHGLEAISIMDSRGALINVPPPFLGLPRFEARKAVLVALKERGLFRGIEDNPMVVPLCNRSKDVVEPLLRPQWYVRCGEMAQAASAAVTRGDLRILPEAHQRTWHAWMDNIREWCISRQLWWGHRIPAYFVTVSDPVPGGPWVGFCWGGR

SEQ ID NO: 907996 - protein, 753 aa, Homo sapiens
SRRLALLHAFLVSFRPQHLKGKNVIHPFLSRSLPIVFDEFVDMDFGTGAVKITPAHDQNDYEVGQRHGLEAISIMDSRGALINVPPPFLVRLPEARVPGQGDGGMAGHRHDEASFLTQGLPRFEARKAVLVALKERGLFRGIEDNPMVVPLCNRSKDVVEPLLRPQWYVRCGEMAQAASAAVTRGDLRILPEAHQRTWHAWMDNIREWCISRQLWWGHRIPAYFVTVSDPAVPPGEDPDGRYWVSGRNEAEAREKAAKEFGVSPDKISLQQDEDVLDTWFSSGLFPLSILGWPNQSEDLSVFYPGTLLETGHDILFFWVARMVMLGLKLTGRLPFREVYLHAIVRDAHGRKMSKSLGNVIDPLDVIYGISLQGLHNQLLNSNLDPSEVEKAKEGQKADFPAGIPECGTDALRFGLCAYMSQGRDINLDVNRILGYRHFCNKLWNATKFALRGLGKGFVPSPTSQPGGHESLVDRWIRSRLTEAVRLSNQGFQAYDFPAVTTAQYSFWLYELCDVYLECLKPVLNGVDQVAAECARQTLYTCLDVGLRLLSPFMPFVTEELFQRLPRRMPQAPPSLCVTPYPEPSECSWKDPEAEAALELALSITRAVRSLRADYNLTRIRPDCFLEVADEATGALASAVSGYVQALASAGVVAVLALGAPAPQGCAVALASDRCSIHLQLQGLVDPARELGKLQAKRVEAQRQAQRLRERRAASGYPVKVPLEVQEADEAKLQQTEAELRKVDEAIALFQKML

SEQ ID NO: 907997 - protein, 456 aa, Homo sapiens
LVLAGFLWIMLETGHDILFFWVARMVMLGLKLTGRLPFREVYLHAIVRDAHGRKMSKSLGNVIDPLDVIYGISLQGLHNQLLNSNLDPSEVEKAKEGQKADFPAGIPECGTDALRFGLCAYMSQGRDINLDVNRILGYRHFCNKLWNATKFALRGLGKGFVPSPTSQPGGHESLVDRWIRSRLTEAVRLSNQGFQAYDFPAVTTAQYSFWLYELCDVYLECLKPVLNGVDQVAAECARQTLYTCLDVGLRLLSPFMPFVTEELFQRLPRRMPQAPPSLCVTPYPEPSECSWKDPEAEAALELALSITRAVRSLRADYNLTRIRPDCFLEVADEATGALASAVSGYVQALASAGVVAVLALGAPAPQGCAVALASDRCSIHLQLQGLVDPARELGKLQAKRVEAQRQAQRLRERRAASGYPVKVPLEVQEADEAKLQQTEAELRKVDEAIALFQKML

SEQ ID NO: 907998 - protein, 1264 aa, Homo sapiens; identical to SEQ ID NO: 907984

SEQ ID NO: 907999 - protein, 969 aa, Homo sapiens [sequence omitted]

SEQ ID NO: 908000 - protein, 1300 aa, Homo sapiens
MSTLYVSPHPDAFPSLRALIAARYGEAGEGPGWGGAQPRICLQPPPTSRTPFPPPRLPALEQGPGGLWVWGATAVAQLLWPAGLGGPGGSRAAVLVQQWVSYADTELIPAACGATLPALGLRSSAQDPQAVLGALGRALSPLEEWLRLHTYLAGEAPTLADLAAVTALLLPFRYVLDPPARRIWNNVTRWFVTCVRQPEFRAVLGEVVLYSGARPLSHQPGPEAPALPKTAAQLKKEAKKREKLEKFQQKQKIQQQQPPPGEKKPKPEKREKRDPGVITYDLPTPPGEKKDVSGPMPDSYSPRYVEAAWYPWWEQQGFFKPEYGRPNVSAANPRGVFMMCIPPPNVTGSLHLGHALTNAIQDSLTRWHRMRGETTLWNPGCDHAGIATQVVVEKKLWREQGLSRHQLGREAFLQEVWKWKEEKGDRIYHQLKKLGSSLDWDRACFTMDPKLSAAVTEAFVRLHEEGIIYRSTRLVNWSCTLNSAISDIEVDKKELTGRTLLSVPGYKEKVEFGVLVSFAYKVQGSDSDEEVVVATTRIETMLGDVAVAVHPKDTRYQHLKGKNVIHPFLSRSLPIVFDEFVDMDFGTGAVKITPAHDQNDYEVGQRHGLEAISIMDSRGALINVPPPFLGLPRFEARKAVLVALKERGLFRGIEDNPMVVPLCNRSKDVVEPLLRPQWYVRCGEMAQAASAAVTRGDLRILPEAHQRTWHAWMDNIRCVGSSVWEGLAEELSRAHSGQAPSGPPWFLLPDICREWCISRQLWWGHRIPAYFVTVSDPAVPPGEDPDGRYWVSGRNEAEAREKAAKEFGVSPDKISLQQDEDVLDTWFSSGLFPLSILGWPNQSEDLSVFYPGTLLETGHDILFFWVARMVMLGLKLTGRLPFREVYLHAIVRDAHGRKMSKSLGNVIDPLDVIYGISLQGLHNQLLNSNLDPSEVEKAKEGQKADFPAGIPECGTDALRFGLCAYMSQGRDINLDVNRILGYRHFCNKLWNATKFALRGLGKGFVPSPTSQPGGHESLVDRWIRSRLTEAVRLSNQGFQAYDFPAVTTAQYSFWLYELCDVYLECLKPVLNGVDQVAAECARQTLYTCLDVGLRLLSPFMPFVTEELFQRLPRRMPQAPPSLCVTPYPEPSECSWKDPEAEAALELALSITRAVRSLRADYNLTRIRPDCFLEVADEATGALASAVSGYVQALASAGVVAVLALGAPAPQGCAVALASDRCSIHLQLQGLVDPARELGKLQAKRVEAQRQAQRLRERRAASGYPVKVPLEVQEADEAKLQQTEAELRKVDEAIALFQKML

SEQ ID NO: 908001 - protein, 965 aa, Homo sapiens
MGRSPAPHLSPATPDQQGFFKPEYGRPNVSAANPRGVFMMCIPPPNVTGSLHLGHALTNAIQDSLTRWHRMRGETTLWNPGCDHAGIATQVVVEKKLWREQGLSRHQLGREAFLQEVWKWKEEKGDRIYHQLKKLGSSLDWDRACFTMDPKLSAAVTEAFVRLHEEGIIYRSTRLVNWSCTLNSAISDIEVDKKELTGRTLLSVPGYKEKVEFGVLVSFAYKVQGSDSDEEVVVATTRIETMLGDVAVAVHPKDTRYQHLKGKNVIHPFLSRSLPIVFDEFVDMDFGTGAVKITPAHDQNDYEVGQRHGLEAISIMDSRGALINVPPPFLGLPRFEARKAVLVALKERGLFRGIEDNPMVVPLCNRSKDVVEPLLRPQWYVRCGEMAQAASAAVTRGDLRILPEAHQRTWHAWMDNIREWCISRQLWWGHRIPAYFVTVSDPAVPPGEDPDGRYWVSGRNEAEAREKAAKEFGVSPDKISLQQDEDVLDTWFSSGLFPLSILGWPNQSEDLSVFYPGTLLETGHDILFFWVARMVMLGLKLTGRLPFREVYLHAIVRDAHGRKMSKSLGNVIDPLDVIYGISLQGLHNQLLNSNLDPSEVEKAKEGQKADFPAGIPECGTDALRFGLCAYMSQGRDINLDVNRILGYRHFCNKLWNATKFALRGLGKGFVPSPTSQPGGHESLVDRWIRSRLTEAVRLSNQGFQAYDFPAVTTAQYSFWLYELCDVYLECLKPVLNGVDQVAAECARQTLYTCLDVGLRLLSPFMPFVTEELFQRLPRRMPQAPPSLCVTPYPEPSECSWKDPEAEAALELALSITRAVRSLRADYNLTRIRPDCFLEVADEATGALASAVSGYVQALASAGVVAVLALGAPAPQGCAVALASDRCSIHLQLQGLVDPARELGKLQAKRVEAQRQAQRLRERRAASGYPVKVPLEVQEADEAKLQQTEAELRKVDEAIALFQKML

SEQ ID NO: 908002 - protein, 1264 aa, Homo sapiens; identical to SEQ ID NO: 907984

SEQ ID NO: 908003 - protein, 1240 aa, Homo sapiens
MSTLYVSPHPDAFPSLRALIAARYGEAGEGPGWGGAQPRICLQPPPTSRTPFPPPRLPALEQGPGGLWVWGATAVAQLLWPAGLGGPGGSRAAVLVQQWVSYADTELIPAACGATLPALGLRSSAQDPQAVLGALGRALSPLEEWLRLHTYLAGEAPTLADLAAVTALLLPFRYVLDPPARRIWNNVTRWFVTCVRQPEFRAVLGEVVLYSGARPLSHQPGPEAPALPKTAAQLKKEAKKREKLEKFQQKQKIQQQQPPPGEKKPKPEKREKRDPGVITYDLPTPPGEKKDVSGPMPDSYSPRYVEAAWYPWWEQQGFFKPEYGRPNVSAANPRGVFMMCIPPPNVTGSLHLGHALTNAIQDSLTRWHRMRGETTLWNPGCDHAGIATQVVVEKKLWREQGLSRHQLGREAFLQEVWKWKEEKGDRIYHQLKKLGSSLDWDRACFTMDPKLSAAVTEAFVRLHEEGIIYRSTRLVNWSCTLNSAISDIEVDKKELTGRTLLSVPGYKEKVEFGVLVSFAYKVQGSDSDEEVVVATTRIETMLGDVAVAVHPKDTRYQHLKGKNVIHPFLSRSLPIVFDEFVDMDFGTGAVKITPAHDQNDYEVGQRHGLEAISIMDSRGALINVPPPFLGLPRFEARKAVLVALKERGLFRGIEDNPMVVPLCNRSKDVVEPLLRPQWYVRCGEMAQAASAAVTRGDLRILPEAHQRTWHAWMDNIREWCISRQLWWGHRIPAYFVTVSDPAVPPGEDPDGRYWVSGRNEAEAREKAAKEFGVSPDKISLQQDEDVLDTWFSSGLFPLSILGWPNQSEDLSVFYPGTLLETGHDILFFWVARMVMLGLKLTGRLPFREVYLHAIVRDAHGRKMSKSLGNVIDPLDVIYGISLQGLHNQLLNSNLDPSEVEKAKEGQKADFPAGIPECGTDALRFGLCAYMSQGRDINLDVNRILGYRHFCNKLWNATKFALRGLGKGFVPSPTSQPGGHESLVDRWIRSRLTEAVRLSNQGFQAYDFPAVTTAQYSFWLYELCDVYLECLKPVLNGVDQVAAECARQTLYTCLDVGLRLLSPFMPFVTEELFQRLPRRMPQAPPSLCVTPYPEPSECSWKDPEAEAALELALSITRAVRSLRADYNLTRIRPDCFLEVADEATGALASAVSGYVQALASAGVVAVLALGAPAPQGCLGKLQAKRVEAQRQAQRLRERRAASGYPVKVPLEVQEADEAKLQQTEAELRKVDEAIALFQKML

SEQ ID NO: 908004 - protein, 1322 aa, Homo sapiens
MSTLYVSPHPDAFPSLRALIAARYGEAGEGPGWGGAQPRICLQPPPTSRTPFPPPRLPALEQGPGGLWVWGATAVAQLLWPAGLGGPGGSRAAVLVQQWVSYADTELIPAACGATLPALGLRSSAQDPQAVLGALGRALSPLEEWLRLHTYLAGEAPTLADLAAVTALLLPFRYVLDPPARRIWNNVTRWFVTCVRQPEFRAVLGEVVLYSGARPLSHQPGPEAPALPKTAAQLKKEAKKREKLEKFQQKQKIQQQQPPPGEKKPKPEKREKRDPGVITYDLPTPPGEKKDVSGPMPDSYSPRYVEAAWYPWWEQQGFFKPEYGRPNVSAANPRGVFMMCIPPPNVTGSLHLGHALTNAIQDSLTRWHRMRGETTLWNPGCDHAGIATQVVVEKKLWREQGLSRHQLGREAFLQEVWKWKEEKGDRIYHQLKKLGSSLDWDRACFTMDPKLSAAVTEAFVRLHEEGIIYRSTRLVNWSCTLNSAISDIEVDKKELTGRTLLSVPGYKEKVEFGVLVSFAYKVQGSDSDEEVVVATTRIETMLGDVAVAVHPKDTRYQHLKGKNVIHPFLSRSLPIVFDEFVDMDFGTGAVKITPAHDQNDYEVGQRHGLEAISIMDSRGALINVPPPFLVRLPEARVPGQGDGGMAGHRHDEASFLTQGLPRFEARKAVLVALKERGLFRGIEDNPMVVPLCKLRVGAWDGRKMEGSSGFYRLAFSPTCTPSRSKDVVEPLLRPQWYVRCGEMAQAASAAVTRGDLRILPEAHQRTWHAWMDNIREWCISRQLWWGHRIPAYFVTVSDPAVPPGEDPDGRYWVSGRNEAEAREKAAKEFGVSPDKISLQQDEDVLDTWFSSGLFPLSILGWPNQSEDLSVFYPGTLLETGHDILFFWVARMVMLGLKLTGRLPFREVYLHAIVRDAHGRKMSKSLGNVIDPLDVIYGISLQGLHNQLLNSNLDPSEVEKAKEGQKADFPAGIPECGTDALRFGLCAYMSQGRDINLDVNRILGYRHFCNKLWNATKFALRGLGKGFVPSPTSQPGGHESLVDRWIRSRLTEAVRLSNQGFQAYDFPAVTTAQYSFWLYELCDVYLECLKPVLNGVDQVAAECARQTLYTCLDVGLRLLSPFMPFVTEELFQRLPRRMPQAPPSLCVTPYPEPSECSWKDPEAEAALELALSITRAVRSLRADYNLTRIRPDCFLEVADEATGALASAVSGYVQALASAGVVAVLALGAPAPQGCAVALASDRCSIHLQLQGLVDPARELGKLQAKRVEAQRQAQRLRERRAASGYPVKVPLEVQEADEAKLQQTEAELRKVDEAIALFQKML

SEQ ID NO: 908005 - protein, 978 aa, Homo sapiens
MSTLYVSPHPDAFPSLRALIAARYGEAGEGPGWGGAQPRICLQPPPTSRTPFPPPRLPALEQGPGGLWVWGATAVAQLLWPAGLGGPGGSRAAVLVQQWVSYADTELIPAACGATLPALGLRSSAQDPQAVLGALGRALSPLEEWLRLHTYLAGEAPTLADLAAVTALLLPFRYVLDPPARRIWNNVTRWFVTCVRQPEFRAVLGEVVLYSGARPLSHQPGPEAPALPKTAAQLKKEAKKREKLEKFQQKQKIQQQQPPPGEKKPKPEKREKRDPGVITYDLPTPPGEKKDVSGPMPDSYSPRYVEAAWYPWWEQQGFFKPEYGRPNVSAANPRGVFMMCIPPPNVTGSLHLGHALTNAIQDSLTRWHRMRGETTLWNPGCDHAGIATQVVVEKKLWREQGLSRHQLGREAFLQEVWKWKEEKGDRIYHQLKKLGSSLDWDRACFTMDPKLSAAVTEAFVRLHEEGIIYRSTRLVNWSCTLNSAISDIEVDKKELTGRTLLSVPGYKEKVEFGVLVSFAYKVQGSDSDEEVVVATTRIETMLGDVAVAVHPKDTRYQHLKGKNVIHPFLSRSLPIVFDEFVDMDFGTGAVKITPAHDQNDYEVGQRHGLEAISIMDSRGALINVPPPFLGLPRFEARKAVLVALKERGLFRGIEDNPMVVPLCNRSKDVVEPLLRPQWYVRCGEMAQAASAAVTRGDLRILPEAHQRTWHAWMDNIREWCISRQLWWGHRIPAYFVTVSDPAVPPGEDPDGRYWVSGRNEAEAREKAAKEFGVSPDKISLQQDEDVLDTWFSSGLFPLSILGWPNQSEDLSVFYPGTLLETGHDILFFWVARMVMLGLKLTGRLPFREVYLHAIVRDAHGRKMSKSLGNVIDPLDVIYGISLQGLHNQLLNSNLDPSEVEKAKEGQKADFPAGIPECGTDALRFGLCAYMSQGRDINLDVNRILGYRHFCNKLWNATKFALRGLGKGFVPSPTSQPEA

SEQ ID NO: 908006 - protein, 847 aa, Homo sapiens
TPPPPNPNKARYEAGVNRPRLVNWSCTLNSAISDIEVDKKELTGRTLLSVPGYKEKVEFGVLVSFAYKVQGSDSDEEVVVATTRIETMLGDVAVAVHPKDTRYQHLKGKNVIHPFLSRSLPIVFDEFVDMDFGTGAVKITPAHDQNDYEVGQRHGLEAISIMDSRGALINVPPPFLGLPRFEARKAVLVALKERGLFRGIEDNPMVVPLCNRSKDVVEPLLRPQWYVRCGEMAQAASAAVTRGDLRILPEAHQRTWHAWMDNIRCVGSSVWEGLAEELSRAHSGQAPSGPPWFLLPDICREWCISRQLWWGHRIPAYFVTVSDPAVPPGEDPDGRYWVSGRNEAEAREKAAKEFGVSPDKISLQQDEDVLDTWFSSGLFPLSILGWPNQSEDLSVFYPGTLLETGHDILFFWVARMVMLGLKLTGRLPFREVYLHAIVRDAHGRKMSKSLGNVIDPLDVIYGISLQGLHNQLLNSNLDPSEVEKAKEGQKADFPAGIPECGTDALRFGLCAYMSQGRDINLDVNRILGYRHFCNKLWNATKFALRGLGKGFVPSPTSQPGGHESLVDRWIRSRLTEAVRLSNQGFQAYDFPAVTTAQYSFWLYELCDVYLECLKPVLNGVDQVAAECARQTLYTCLDVGLRLLSPFMPFVTEELFQRLPRRMPQAPPSLCVTPYPEPSECSWKDPEAEAALELALSITRAVRSLRADYNLTRIRPDCFLEVADEATGALASAVSGYVQALASAGVVAVLALGAPAPQGCAVALASDRCSIHLQLQGLVDPARELGKLQAKRVEAQRQAQRLRERRAASGYPVKVPLEVQEADEAKLQQTEAELRKVDEAIALFQKML

SEQ ID NO: 908007 - protein, 876 aa, Homo sapiens
MDPKLSAAVTEAFVRLHEEGIIYRSTRLVNWSCTLNSAISDIEVDKKELTGRTLLSVPGYKEKVEFGVLVSFAYKVQGSDSDEEVVVATTRIETMLGDVAVAVHPKDTRYQHLKGKNVIHPFLSRSLPIVFDEFVDMDFGTGAVKITPAHDQNDYEVGQRHGLEAISIMDSRGALINVPPPFLVRLPEARVPGQGDGGMAGHRHDEASFLTQGLPRFEARKAVLVALKERGLFRGIEDNPMVVPLCKLRVGAWDGRKMEGSSGFYRLAFSPTCTPSRSKDVVEPLLRPQWYVRCGEMAQAASAAVTRGDLRILPEAHQRTWHAWMDNIREWCISRQLWWGHRIPAYFVTVSDPAVPPGEDPDGRYWVSGRNEAEAREKAAKEFGVSPDKISLQQDEDVLDTWFSSGLFPLSILGWPNQSEDLSVFYPGTLLETGHDILFFWVARMVMLGLKLTGRLPFREVYLHAIVRDAHGRKMSKSLGNVIDPLDVIYGISLQGLHNQLLNSNLDPSEVEKAKEGQKADFPAGIPECGTDALRFGLCAYMSQGRDINLDVNRILGYRHFCNKLWNATKFALRGLGKGFVPSPTSQPGGHESLVDRWIRSRLTEAVRLSNQGFQAYDFPAVTTAQYSFWLYELCDVYLECLKPVLNGVDQVAAECARQTLYTCLDVGLRLLSPFMPFVTEELFQRLPRRMPQAPPSLCVTPYPEPSECSWKDPEAEAALELALSITRAVRSLRADYNLTRIRPDCFLEVADEATGALASAVSGYVQALASAGVVAVLALGAPAPQGCAVALASDRCSIHLQLQGLVDPARELGKLQAKRVEAQRQAQRLRERRAASGYPVKVPLEVQEADEAKLQQTEAELRKVDEAIALFQKML

SEQ ID NO: 908008 - protein, 552 aa, Homo sapiens
LVWAMWIPHYFVTGNVTSGAPWVRSLDWGGYLGYADAMRADVPREKQPKYVPEVSLVTRIQFSQAKTEGCTWEYTGFSSGPLFPVIPFWACPNQSEDLSVFYPGTLLETGHDILFFWVARMVMLGLKLTGRLPFREVYLHAIVRDAHGRKMSKSLGNVIDPLDVIYGISLQGLHNQLLNSNLDPSEVEKAKEGQKADFPAGIPECGTDALRFGLCAYMSQGRDINLDVNRILGYRHFCNKLWNATKFALRGLGKGFVPSPTSQPGGHESLVDRWIRSRLTEAVRLSNQGFQAYDFPAVTTAQYSFWLYELCDVYLECLKPVLNGVDQVAAECARQTLYTCLDVGLRLLSPFMPFVTEELFQRLPRRMPQAPPSLCVTPYPEPSECSWKDPEAEAALELALSITRAVRSLRADYNLTRIRPDCFLEVADEATGALASAVSGYVQALASAGVVAVLALGAPAPQGCAVALASDRCSIHLQLQGLVDPARELGKLQAKRVEAQRQAQRLRERRAASGYPVKVPLEVQEADEAKLQQTEAELRKVDEAIALFQKML

SEQ ID NO: 908009 - protein, 265 aa, Homo sapiens
MSTLYVSPHPDAFPSLRALIAARYGEAGEGPGWGWRKEPQTHDIVISTPKHPDISRELRINHNNIKNKTSDPVKQRPTQEDEHLEDDRRGHKDIERAQPASKPSKDKTTRPHESTDKLNGKATQCNQNTNADKQYKPGNTRENKTNKHGNSEDKQKQRTETPTIERAPNHTIGGRPKNTNQGHRYTGRAAPSGGQRSHPGSTQPMQTAKRTPKTLNTTPEQGEHPRNGTTTQKWPSNTTTSMTHNNPVRKSEHTPHQTHGQPTHD

SEQ ID NO: 908010 - protein, 301 aa, Homo sapiens
MAAFSEMGVMPEIAQAVEEMDWLLPTDIQAESIPLILGGGDVLMAAETGSGKTGAFSIPVIQIVYETLKDQQEGKKGKTTIKTGASVLNKWQMNPYDRGSAFAIGSDGLCCQSREVKEWHGCRATKGLMKGKHYYEVSCHDQGLCRVGWSTMQASLDLGTDKFGFGFGGTGKKSHNKQFDNYGEEFTMHDTIGCYLDIDKGHVKFSKNGKDLGLAFEIPPHMKNQALFPACVLKNAELKFNFGEEEFKFPPKDGFVALSKAPDGYIVKSQHSGMPGDQQSSPMLESSHVTSGVSDNLILTR

SEQ ID NO: 908011 - protein, 700 aa, Homo sapiens
MAAFSEMGVMPEIAQAVEEMDWLLPTDIQAESIPLILGGGDVLMAAETGSGKTGAFSIPVIQIVYETLKDQQEGKKGKTTIKTGASVLNKWQMNPYDRGSAFAIGSDGLCCQSREVKEWHGCRATKGLMKGKHYYEVSCHDQGLCRVGWSTMQASLDLGTDKFGFGFGGTGKKSHNKQFDNYGEEFTMHDTIGCYLDIDKGHVKFSKNGKDLGLAFEIPPHMKNQALFPACVLKNAELKFNFGEEEFKFPPKDGFVALSKAPDGYIVKSQHSGNAQVTQTKFLPNAPKALIVEPSRELAEQTLNNIKQFKKYIDNPKLRELLIIGGVAARDQLSVLENGVDIVVGTPGRLDDLVSTGKLNLSQVRFLVLDEADGLLSQGYSDFINRMHNQIPQVTSDGKRLQVIVCSATLHSFDVKKLSEKIMHFPTWVDLKGEDSVPDTVHHVVVPVNPKTDRLWERLGKSHIRTDDVHAKDNTRPGANSPEMWSEAIKILKGEYAVRAIKEHKMDQAIIFCRTKIDCDNLEQYFIQQGGGPDKKGHQFSCVCLHGDRKPHERKQNLERFKKGDVRFLICTDVAARGIDIHGVPYVINVTLPDEKQNYVHRIGRVGRAERMGLAISLVATEKEKVWYHVCSSRGKGCYNTRLKEDGGCTIWYNEMQLLSEIEEHLNCTISQVEPDIKVPVDEFDGKVTYGTYCSRVGCP

SEQ ID NO: 908012 - protein, 675 aa, Homo sapiens
MAAFSEMGVMPEIAQAVEEMDWLLPTDIQAESIPLILGGGDVLMAAETGSGKTGAFSIPVIQIVYETLKDQQEGKKGKTTIKTGASVLNKWQMNPYDRGSAFAIGSDGLCCQSREVKEWHGCRATKGLMKGKHYYEVSCHDQGLCRVGWSTMQASLDLGTDKFGFGFGGTGKKSHNKQFDNYGEEFTMHDTIGCYLDIDKGHVKFSKNGKDLGLAFEIPPHMKNQALFPACVLKNAELKFNFGEEEFKFPPKDGFVALSKAPDGYIVKSQHSGNAQVTQTKFLPNAPKALIVEPSRELAEQTLNNIKQFKKYIDNPKLRELLIIGGVAARDQLSVLENGVDIVVGTPGRLDDLVSTGKLNLSQVRFLVLDEADGLLSQGYSDFINRMHNQIPQVTSDGKRLQVIVCSATLHSFDVKKLSEKIMHFPTWVDLKGEDSVPDTVHHVVVPVNPKTDRLWERLGKSHIRTDDVHAKDNTRPGANSPEMWSEAIKILKGEYAVRAIKEHKMDQAIIFCRTKIDCDNLEQYFIQQGGGPDKKGHQFSCVCLHGDRKPHERKQNLERFKKGDVRFLICTDVAARGIDIHGVPYVINVTLPDEKQNYVHRIGRVGRAERMGLAISLVATEKEKVWYHVCSSRGKGCYNTRLKEDGGCTIWYNEMQLLSEIEVHRTSYGYELGC

SEQ ID NO: 908013 - protein, 629 aa, Homo sapiens
MAAFSEMGVMPEIAQAVEEMDWLLPTDIQAESIPLILGGGDVLMAAETGSGKTGAFSIPVIQIVYETLKDQQEGKKGKTTIKTGASVLNKWQMNPYDRGSAFAIGSDGLCCQSREVKEWHGCRATKGLMKGKHYYEVSCHDQGLCRVGWSTMQASLDLGTDKFGFGFGGTGKKSHNKQFDNYGEEFTMHDTIGCYLDIDKGHVKFSKNGKDLGLAFEIPPHMKNQALFPACVLKNAELKFNFGEEEFKFPPKDGFVALSKAPDGYIVKSQHSGNAQVTQTKFLPNAPKALIVEPSRELAEQTLNNIKQFKKYIDNPKLRELLIIGGVAARDQLSVLENGVDIVVGTPGRLDDLVSTGKLNLSQVRFLVLDEADGLLSQGYSDFINRMHNQIPQVTSDGKRLQVIVCSATLHSFDVKKLSEKIMHFPTWVDLKGEDSVPDTVHHVVVPVNPKTDRLWERLGKSHIRTDDVHAKDNTRPGANSPEMWSEAIKILKGEYAVRAIKEHKMDQAIIFCRTKIDCDNLEQYFIQQGGGPDKKGHQFSCVCLHGDRKPHERKQNLERFKKGDVRFLICTDVAARGIDIHGVPYVINVTLPDEKQNYVHRIGRVGRAERMVWHFLVHRTESCHVCST

SEQ ID NO: 908014 - protein, 589 aa, Homo sapiens
MAAFSEMGVMPEIAQAVEEMDWLLPTDIQAESIPLILGGGDVLMAAETGSGKTGAFSIPVIQIVYETLKDQQEGKKGKTTIKTGASVLNKWQMNPYDRGSAFAIGSDGLCCQSREVKEWHGCRATKGLMKGKHYYEVSCHDQGLCRVGWSTMQASLDLGTDKFGFGFGGTGKKSHNKQFDNYGEEFTMHDTIGCYLDIDKGHVKFSKNGKDLGLAFEIPPHMKNQALFPACVLKNAELKFNFGEEEFKFPPKDGFVALSKAPDGYIVKSQHSGNAQVTQTKFLPNAPKALIVEPSRELAEQTLNNIKQFKKYIDNPKLRELLIIGGVAARDQLSVLENGVDIVVGTPGRLDDLVSTGKLNLSQVRFLVLDEADGLLSQGYSDFINRMHNQIPQVTSDGKRLQVIVCSATLHSFDVKKLSEKIMHFPTWVDLKGEDSVPDTVHHVVVPVNPKTDRLWERLGKSHIRTDDVHAKDNTRPGANSPEMWSEAIKILKGEYAVRAIKEHKMDQAIIFCRTKIDCDNLEQYFIQQGGGPDKKGHQFSCVCLHGDRKPHERKHRPQKSKDPKRAKTPKEQRPQKSRDHIRAKTPEG

SEQ ID NO: 908015 - protein, 851 aa, Homo sapiens
MAAFSEMGVMPEIAQAVEEMDWLLPTDIQAESIPLILGGGDVLMAAETGSGKTGAFSIPVIQIVYETLKDQQEGKKGKTTIKTGASVLNKWQMNPYDRGSAFAIGSDGLCCQSREVKEWHGCRATKGLMKGKHYYEVSCHDQGLCRVGWSTMQASLDLGTDKFGFGFGGTGKKSHNKQFDNYGEEFTMHDTIGCYLDIDKGHVKFSKNGKDLGLAFEIPPHMKNQALFPACVLKNAELKFNFGEEEFKFPPKDGFVALSKAPDGYIVKSQHSGNAQVTQTKFLPNAPKALIVEPSRELAEQTLNNIKQFKKYIDNPKLRELLIIGGVAARDQLSVLENGVDIVVGTPGRLDDLVSTGKLNLSQVRFLVLDEADGLLSQGYSDFINRMHNQIPQVTSDGKRLQVIVCSATLHSFDVKKLSEKIMHFPTWVDLKGEDSVPDTVHHVVVPVNPKTDRLWERLGKSHIRTDDVHAKDNTRPGANSPEMWSEAIKILKGEYAVRAIKEHKMDQAIIFCRTKIDCDNWGDFHRGGRYRPVSGLPWQARKNALHEYILEMEIPSSIGTTCLRVASLCRVGLSVTSPTTTPYNKTTTYTKHDKPPRQNTRRTQHTKQQHSSKNRKRPQRNGQRREREGRQSRTDNKRGEQRTENDEKKTDHEGTGEKSVRKTIGKKNTNRTKTTQANARRQTAQTQRNQNKRRDDGREGKGEEKRRRRDQKDTSREADEVRGDREQPDRRDRQREQQKATKEDSTEQREDSANKKTGTRERRKRSGQERQKEKAENKRREGRDDNNKNRQEEGTHGAKAREGANERTRRQEHRRSRHGERAKNENEEQEEERKARDKGRTKKRPPTPHA

SEQ ID NO: 908016 - protein, 406 aa, Homo sapiens
MAAFSEMGVMPEIAQAVEEMDWLLPTDIQAESIPLILGGGDVLMAAETGSGKTGAFSIPVIQIVYETLKDQQEGKKGKTTIKTGASVLNKWQMNPYDRGSAFAIGSDGLCCQSREVKEWHGCRATKGLMKGKHYYEVSCHDQGLCRVGWSTMQASLDLGTDKFGFGFGGTGKKSHNKQFDNYGEEFTMHDTIGCYLDIDKGHVKFSKNGKDLGLAFEIPPHMKNQALFPACVLKNAELKFNFGEEEFKFPPKDGFVALSKAPDGYIVKSQHSGNAQVTQTKFLPNAPKALIVEPSRELAEQTLNNIKQFKKYIDNPKLRELLIIGGVAARDQLSVLENGVDIVVGTPGRLDDLVSTGKLNLSQVRFLVLDEADGLLSQGYSDFINRMHNQIPQVTSDGKRLQVTAV

SEQ ID NO: 908017 - protein, 129 aa, Homo sapiens
MGLAISLVATEKEKVWYHVCSSRGKGCYNTRLKEDGGCTIWYNEMQLLSEIEEHLNCTISQVEPDIKVPVDEFDGKVTYGQKRAAGGGSYKGHVDILAPTVQELAALEKEAQTSFLHLGYLPNQLFRTF

SEQ ID NO: 908018 - protein, 740 aa, Homo sapiens
MAAFSEMGVMPEIAQAVEEMDWLLPTDIQAESIPLILGGGDVLMAAETGSGKTGAFSIPVIQIVYETLKDQQEGKKGKTTIKTGASVLNKWQMNPYDRGSAFAIGSDGLCCQSREVKEWHGCRATKGLMKGKHYYEVSCHDQGLCRVGWSTMQASLDLGTDKFGFGFGGTGKKSHNKQFDNYGEEFTMHDTIGCYLDIDKGHVKFSKNGKDLGLAFEIPPHMKNQALFPACVLKNAELKFNFGEEEFKFPPKDGFVALSKAPDGYIVKSQHSGNAQVTQTKFLPNAPKALIVEPSRELAEQTLNNIKQFKKYIDNPKLRELLIIGGVAARDQLSVLENGVDIVVGTPGRLDDLVSTGKLNLSQVRFLVLDEADGLLSQGYSDFINRMHNQIPQVTSDGKRLQVIVCSATLHSFDVKKLSEKIMHFPTWVDLKGEDSVPDTVHHVVVPVNPKTDRLWERLGKSHIRTDDVHAKDNTRPGANSPEMWSEAIKILKGEYAVRAIKEHKMDQAIIFCRTKIDCDNLEQYFIQQGGGPDKKGHQFSCVCLHGDRKPHERKQNLERFKKGDVRFLICTDVAARGIDIHGVPYVINVTLPDEKQNYVHRIGRVGRAERMGLAISLVATEKEKVWYHVCSSRGKGCYNTRLKEDGGCTIWYNEMQLLSEIEEHLNCTISQVEPDIKVPVDEFDGKVTYGQKRAAGGGSYKGHVDILAPTVQELAALEKEAQTSFLHLGYLPNQLFRTF

SEQ ID NO: 908019 - protein, 677 aa, Homo sapiens
MAAFSEMGVMPEIAQAVEEMDWLLPTDIQAESIPLILGGGDVLMAAETGSGKTGAFSIPVIQIVYETLKDQQEGKKGKTTIKTGASVLNKWQMNPYDRGSAFAIGSDGLCCQSREVKEWHGCRATKGLMKGKHYYEVSCHDQGLCRVGWSTMQASLDLGTDKFGFGFGGTGKKSHNKQFDNYGEEFTMHDTIGCYLDIDKGHVKFSKNGKDLGLAFEIPPHMKNQALFPACVLKNAELKFNFGEEEFKFPPKDGFVALSKAPDGYIVKSQHSGNAQVTQTKFLPNAPKALIVEPSRELAEQTLNNIKQFKKYIDNPKLRELLIIGGVAARDQLSVLENGVDIVVGTPGRLDDLVSTGKLNLSQVRFLVLDEADGLLSQGYSDFINRMHNQIPQVTSDGKRLQVIVCSATLHSFDVKKLSEKIMHFPTWVDLKGEDSVPDTVHHVVVPVNPKTDRLWERLGKSHIRTDDVHAKDNTRPGANSPEMWSEAIKILKGEYAVRAIKEHKMDQAIIFCRTKIDCDNLEQYFIQQGGGPDKKGHQFSCVCLHGDRKPHERKQNLERFKVWYHVCSSRGKGCYNTRLKEDGGCTIWYNEMQLLSEIEEHLNCTISQVEPDIKVPVDEFDGKVTYGQKRAAGGGSYKGHVDILAPTVQELAALEKEAQTSFLHLGYLPNQLFRTF

SEQ ID NO: 908020 - protein, 660 aa, Homo sapiens
MAAFSEMGVMPEIAQAVEEMDWLLPTDIQAESIPLILGGGDVLMAAETGSGKTGAFSIPVIQIVYETLKDQQEGKKGKTTIKTGASVLNKWQMNPYDRGSAFAIGSDGLCCQSREVKEWHGCRATKGLMKGKHYYEVSCHDQGLCRVGWSTMQASLDLGTDKFGFGFGGTGKKSHNKQFDNYGEEFTMHDTIGCYLDIDKGHVKFSKNGKDLGLAFEIPPHMKNQALFPACVLKNAELKFNFGEEEFKFPPKDGFVALSKAPDGYIVKSQHSGNAQVTQTKFLPNAPKALIVEPSRELAEQTLNNIKQFKKYIDNPKLRELLIIGGVAARDQLSVLENGVDIVVGTPGRLDDLVSTGKLNLSQVRFLVLDEADGLLSQGYSDFINRMHNQIPQVTSDGKRLQVIVCSATLHSFDVKKLSEKIMHFPTWVDLKGEDSVPDTVHHVVVPVNPKTDRLWERLGKSHIRTDDVHAKDNTRPGANSPEMWSEAIKILKGEYAVRAIKEHKMDQAIIFCRTKIDCDNLEQYFIQQGGGPDKKGHQFSCVCLHGDRKPHERKQNLERFKKGDVRFLICTDVAARGIDIHGVPYVINVTLPDEKQNYVHRIGRVGRAERMGLAISLVATEKEKVWYHVCSSRGKGCYNTRLKEDGGCTIWYNEMQLLS

SEQ ID NO: 908021 - protein, 610 aa, Homo sapiens
MAAFSEMGVMPEIAQAVEEMDWLLPTDIQAESIPLILGGGDVLMAAETGSGKTGAFSIPVIQIVYETLKDQQEGKKGKTTIKTGASVLNKWQMNPYDRGSAFAIGSDGLCCQSREVKEWHGCRATKGLMKGKHYYEVSCHDQGLCRVGWSTMQASLDLGTDKFGFGFGGTGKKSHNKQFDNYGEEFTMHDTIGCYLDIDKGHVKFSKNGKDLGLAFEIPPHMKNQALFPACVLKNAELKFNFGEEEFKFPPKDGFVALSKAPDGYIVKSQHSGNAQVTQTKFLPNAPKALIVEPSRELAEQTLNNIKQFKKYIDNPKLRELLIIGGVAARDQLSVLENGVDIVVGTPGRLDDLVSTGKLNLSQVRFLVLDEADGLLSQGYSDFINRMHNQIPQVTSDGKRLQVIVCSATLHSFDVKKLSEKIMHFPTWVDLKGEDSVPDTVHHVVVPVNPKTDRLWERLGKSHIRTDDVHAKDNTRPGANSPEMWSEAIKILKGEYAVRAIKEHKMDQAIIFCRTKIDCDNLEQYFIQQGGGPDKKGHQFSCVCLHGDRKPHERKQNLERFKKGDVRFLICTDVAARGIDKARSLPYVINVTLDVMKMQYYQLELLEDYA

SEQ ID NO: 908022 - protein, 214 aa, Homo sapiens [sequence omitted]

SEQ ID NO: 908023 - protein, 342 aa, Homo sapiens
MAAFSEMGVMPEIAQAVEEMDWLLPTDIQAESIPLILGGGDVLMAAETGSGKTGAFSIPVIQIVYETLKDQQEGKKGKTTIKTGASVLNKWQMNPYDRGSAFAIGSDGLCCQSREVKEWHGCRATKGLMKGKHYYEVSCHDQGLCRVGWSTMQASLDLGTDKFGFGFGGTGKKSHNKQFDNYGEEFTMHDTIGCYLDIDKGHVKFSKNGKDLGLAFEIPPHMKNQALFPACVLKNAELKFNFGEEEFKFPPKDGFVALSKAPDGYIVKSQHSGNAQVTQTKFLPNAPKALIVEPSRELAEQTLNNIKQFKKYIDNPKLRELLIIGGVAARDQLSVLENGKLT

SEQ ID NO: 908024 - protein, 521 aa, Homo sapiens
MFTSEKGVVEEWLSEFKTLPETSLPNYATNLKDKSSLVSSLYKVIQEPQSELLEPVCHQLFEFYRSGEEQLLQFTLQFLPELIWCYLAVSASRNVHSSGCIEALLLGVYNLEIVDKQGHTKVLSFTIPSLSKPSVYHEPSSIGSMALTESALSQHGLSKAVYSGPHPQREMLTAQNRFEVLTFLLLCYNAALTCMPSVSLQSLCQICSRICVCGYPRQHVRKYKGISSRIPVSSGFMVQMLTGIYFAFYNGEWDLAQKALDDIIYRAQLELYPEPLLVANAIKASLPHGPMKSNKEGTRCIQVEITPTSSRISRNAVTSMSIRGHRWKRHGNTELTGQEELMEISEVDEGFYSRAASSTSQSGLSNSSHNCSNKPSIGKNHRRSGGSKTGGKEKETTGESCKDHFARKQTQRAQSENLELLSLKRLTLTTSQSLPKPSSHGLAKTAATVFSKSFEQVSGVTVPHNPSSAVGCGAGTDANRFSACSLQEEKLIYVSERTELPMKHQSGQQRPPSISITLSTD

SEQ ID NO: 908025 - protein, 362 aa, Homo sapiens
GDSRGPHTEPVRIISRALLVANAIKASLPHGPMKSNKEGTRCIQVEITPTSSRISRNAVTSMSIRGHRWKRHEQPDNNNDATELGILVIPEISVTNVAGERTGNGEKGRTLGEIDAQHIQGVQETATDPRTESKGLPEIRRQKSVRKMMEDGINSPGRVQFYAEHFITALQGNTELTGQEELMEISEVDEGFYSRAASSTSQSGLSNSSHNCSNKPSIGKNHRRSGGSKTGGKEKETTGESCKDHFARKQTQRAQSENLELLSLKRLTLTTSQSLPKPSSHGLAKTAATVFSKSFEQVSGVTVPHNPSSAVGCGAGTDANRFSACSLQEEKLIYVSERTELPMKHQSGQQRPPSISITLSTD

SEQ ID NO: 908026 - protein, 406 aa, Homo sapiens
MFTSEKGVVEEWLSEFKTLPETSLPNYATNLKDKSSLVSSLYKVIQEPQSELLEPVCHQLFEFYRSGEEQLLQFTLQFLPELIWCYLAVSASRNVHSSGCIEALLLGVYNLEIVDKQGHTKVLSFTIPSLSKPSVYHEPSSIGSMALTESALSQHGLSKAVYSGPHPQREMLTAQNRFEVLTFLLLCYNAALTCMPSVSLQSLCQICSRICVCGYPRQHVRKYKGISSRIPVSSGFMVQMLTGIYFAFYNGEWDLAQKALDDIIYRAQLELYPEPLLVANAIKASLPHGPMKSNKEGTRCIQVEITPTSSRISRNAVTSMSIRGHRWKRHEQPDNNNDATELGILVIPEISVTNVAGERTGNGEKGRTLGEIDAQHIQGVQETATDPRTESKGLPEIRRQKSEIQN

SEQ ID NO: 908027 - protein, 419 aa, Homo sapiens
MFTSEKGVVEEWLSEFKTLPETSLPNYATNLKDKSSLVSSLYKVIQEPQSELLEPVCHQLFEFYRSGEEQLLQFTLQFLPELIWCYLAVSASRNVHSSGCIEALLLGVYNLEIVDKQGHTKVLSFTIPSLSKPSVYHEPSSIGSMALTESALSQHGLSKAVYSGPHPQREMLTAQNRFEVLTFLLLCYNAALTCMPSVSLQSLCQICSRICVCGYPRQHVRKYKGISSRIPVSSGFMVQMLTGIYFAFYNGEWDLAQKALDDIIYRAQLELYPEPLLVANAIKASLPHGPMKSNKEGTRCIQVEITPTSSRISRNAVTSMSIRGHRWKRHEQPDNNNDATELGILVIPEISVTNVAGERTGNGEKGRTLGEIDAQHIQGVQETATDPRTESKGLPEIRRQKSVRKMMEDGINSPGRVQF

SEQ ID NO: 908028 - protein, 212 aa, Homo sapiens
SAPGRTAGRLLNVEFPATKLRGNTELTGQEELMEISEVDEGFYSRAASSTSQSGLSNSSHNCSNKPSIGKNHRRSGGSKTGGKEKETTGESCKDHFARKQTQRAQSENLELLSLKRLTLTTSQSLPKPSSHGLAKTAATVFSKSFEQVSGVTVPHNPSSAVGCGAGTDANRFSACSLQEEKLIYVSERTELPMKHQSGQQRPPSISITLSTD

SEQ ID NO: 908029 - protein, 229 aa, Homo sapiens
PGCACAELVAAPAPAGGSLLGRAAAMGEAEVGGGGAAGDKGPGEAATSPAEETVVWSPEVEVCLFHAMLGHKPVGVNRHFHMICIRDKFSQNIGRQVPSKVIWDHLSTMYDMQALHESEILPFPNPERNFVLPEEIIQEVREGKVMIEEEMKEEMKEDVDPHNGADDVFSSSGSLGKASEKSSKDKEKNSSDLGCKEGADKRKRSRVTDKVLTANSNPSSPSAAKRRRT

SEQ ID NO: 908030 - protein, 236 aa, Homo sapiens
PGCACAELVAAPAPAGGSLLGRAAAMGEAEVGGGGAAGDKGPGEAATSPAEETVVWSPEVEVCLFHAMLGHKPVGVNRHFHMICIRDKFSQNIGRQVPSKVIWDHLSTMYDMQALHESEILPFPNPERNFVLPEEIIQEVREGEARERLGLGFRKGQTLAKGREVRVRTPGLQGGVRVQRRPRPTCAWVVLEPPGLERTLFESSGWTEAEACVGSKRRSSPWPDHPPASATTVGFR

SEQ ID NO: 908031 - protein, 205 aa, Homo sapiens
PGCACAELVAAPAPAGGSLLGRAAAMGEAEVGGGGAAGDKGPGEAATSPAEETVVWSPEVEVCLFHAMLGHKPVGVNRHFHMICIRDKFSQNIGRQVPSKVIWDHLSTMYDMQALHESEILPFPNPERNFVLPEEIIQEVREVAGRKLRPVWAASVGAVPGLTIPQRRPPPWVFGERQLSPPQKSDDRRGDERGDEGRRGPPQWG

SEQ ID NO: 908032 - protein, 229 aa, Homo sapiens; identical to SEQ ID NO: 908029

SEQ ID NO: 908033 - protein, 229 aa, Homo sapiens; identical to SEQ ID NO: 908029

SEQ ID NO: 908034 - protein, 216 aa, Homo sapiens
PRVRLRGARGRACSRRGLLARPGRGHGRGRGGRRGRRRRQGPGGGGHQPGGGDSGVEPRGGGVNRHFHMICIRDKFSQNIGRQVPSKVIWDHLSTMYDMQALHESEILPFPNPERNFVLPEEIIQEVREGKVMIEEEMKEEMKEDVDPHNGADDVFSSSGSLGKASEKSSKDKEKNSSDLGCKEGADKRKRSRVTDKVLTANSNPSSPSAAKRRRT

SEQ ID NO: 908035 - protein, 136 aa, Homo sapiens
PECACAELVAAPAPAGGSLLGRAAAMGEAEVGGGGAAGDKGPGEAATSPAEETVVWSPEVEVCLFHAMLGHKPVGVNRHFHMICIRDKFSQNIGRQVPSKVIWDHLSTMYDMQALRGTSSFQKRSFRRSEKWLDGS

SEQ ID NO: 908036 - protein, 229 aa, Homo sapiens; identical to SEQ ID NO: 908029

SEQ ID NO: 908037 - protein, 338 aa, Homo sapiens
GRCLLLAPAPAAPVPPRRGSSAWLLEELLRPDCPEPAGLDATREGPDRNFRLSEHRQALAAAKHRGPAATPGSPDPGPGPWGEEHLAERGPRGWERGGDRCDAPGGDAARRPDPEAEAPPAGSIEAAPSSAAEPVIVSRSDPRDEKLALYLAEVEKQDKYLRQRNKYRFHIIPDGNCLYRAVSKTVYGDQSLHRELREQTVHYIADHFNHFSPLIEGDVGEFIIAAAQDGAWAGYPELLAMGQMLNVNIHLTTGGRLESPTVSTMIHYLGPEDSLRPSIWLSWLSNGHYDAVFDHSYPNPEYDNWCKQTQVQRKRDEELAKSMAISLSKMYIEQNACS

SEQ ID NO: 908038 - protein, 338 aa, Homo sapiens; identical to SEQ ID NO: 908037

SEQ ID NO: 908039 - protein, 589 aa, Homo sapiens
MSRRLLPRAEKRRRRLEQRQQPDEQRRRSGAMVKMAAAGGGGGGGRYYGGGSEGGRAPKRLKTDNAGDQHGGGGGGGGGAGAAGGGGGGENYDDPHKTPASPVVHIRGLIDGVVEADLVEALQEFGPISYVVVMPKKRQALVEFEDVLGACNAVNYAADNQIYIAGHPAFVNYSTSQKISRPGDSDDSRSVNSVLLFTILNPIYSITTDVLYTICNPCGPVQRIVIFRKNGVQAMVEFDSVQSAQRAKASLNGADIYSGCCTLKIEYAKPTRLNVFKNDQDTWDYTNPNLSGQGDPGSNPNKRQRQPPLLGDHPAEYGGPHGGYHSHYHDEGYGPPPPHYEGRRMGPPVGGHRRGPSRYGPQYGHPPPPPPPPEYGPHADSPVLMVYGLDQSKMNCDRVFNVFCLYGNVEKVKFMKSKPGAAMVEMADGYAVDRAITHLNNNFMFGQKLNVCVSKQPAIMPGQSYGLEDGSCSYKDFSESRNNRFSTPEQAAKNRIQHPSNVLHFFNAPLEVTEENFFEICDELGVKRPSSVKVFSGKSERSSSGLLEWESKSDALETLGFLNHYQMKNPNGPYPYTLKLCFSTAQHAS

SEQ ID NO: 908040 - protein, 187 aa, Homo sapiens
CRSTLEAPRYYDVLYTICNPCGPVQRIVIFRKNGVQAMVEFDSVQSAQRAKASLNGADIYSGCCTLKIEYAKPTRLNVFKNDQDTWDYTNPNLSGQGDPGSNPNKRQRQPPLLGDHPAEYGGPHGGYHSHYHDEGYGPPPPHYEGRRMGPPVGGHRRGPSRYGPQYGHPPPPPLPPPAESQRSHRGK

SEQ ID NO: 908041 - protein, 311 aa, Homo sapiens
MSRRLLPRAEKRRRRLEQRQQPDEQRRRSGAMVKMAAAGGGGGGGRYYGGGSEGGRAPKRLKTDNAGDQHGGGGGGGGGAGAAGGGGGGENYDDPHKTPASPVVHIRGLIDGVVEADLVEALQEFGPISYVVVMPKKRQALVEFEDVLGACNAVNYAADNQIYIAGHPAFVNYSTSQKISRPGDSDDSRSVNSVLLFTILNPIYSITTDVLYTICNPCGPVQRIVIFRKNGVQAMVEFDSVQSAQRAKASLNGADIYSGCCTLKIEYAKPTRLNVFKNDQDTWDYTNPNLSGQGNLDDHFVLNIPALLSLD

SEQ ID NO: 908042 - protein, 311 aa, Homo sapiens; identical to SEQ ID NO: 908041

SEQ ID NO: 908043 - protein, 311 aa, Homo sapiens; identical to SEQ ID NO: 908041

SEQ ID NO: 908044 - protein, 216 aa, Homo sapiens
MSRRLLPRAEKRRRRLEQRQQPDEQRRRSGAMVKMAAAGGGGGGGRYYGGGSEGGRAPKRLKTDNAGDQHGGGGGGGGGAGAAGGGGGGENYDDPHKTPASPVVHIRGLIDGVVEADLVEALQEFGPISYVVVMPKKRQALVEFEDVLGACNAVNYAADNQIYIAGHPAFVNYSTSQKISRPGDSDDSRSVNSVLLFTILNPIYSITTVRASRHFL

SEQ ID NO: 908045 - protein, 299 aa, Homo sapiens
MVESDPGSNPNKRQRQPPLLGDHPAEYGGPHGGYHSHYHDEGYGPPPPHYEGRRMGPPVGGHRRGPSRYGPQYGHPPPPPPPPEYGPHADSPVLMVYGLDQSKMNCDRVFNVFCLYGNVEKVKFMKSKPGAAMVEMADGYAVDRAITHLNNNFMFGQKLNVCVSKQPAIMPGQSYGLEDGSCSYKDFSESRNNRFSTPEQAAKNRIQHPSNVLHFFNAPLEVTEENFFEICDELGVKRPSSVKVFSGKSERSSSGLLEWESKSDALETLGFLNHYQMKNPNGPYPYTLKLCFSTAQHAS

SEQ ID NO: 908046 - protein, 245 aa, Homo sapiens
MGPPVGGHRRGPSRYGPQYGHPPPPPPPPEYGPHADSPVLMVYGLDQSKMNCDRVFNVFCLYGNVEKVKFMKSKPGAAMVEMADGYAVDRAITHLNNNFMFGQKLNVCVSKQPAIMPGQSYGLEDGSCSYKDFSESRNNRFSTPEQAAKNRIQHPSNVLHFFNAPLEVTEENFFEICDELGVKRPSSVKVFSGKSERSSSGLLEWESKSDALETLGFLNHYQMKNPNGPYPYTLKLCFSTAQHAS

SEQ ID NO: 908047 - protein, 311 aa, Homo sapiens; identical to SEQ ID NO: 908041

SEQ ID NO: 908048 - protein, 584 aa, Homo sapiens
MVKMAAAGGGGGGGRYYGGGSEGGRAPKRLKTDNAGDQHGGGGGGGGGAGAAGGGGGGENYDDPHKTPASPVVHIRGLIDGVVEADLVEALQEFGPISYVVVMPKKRQALVEFEDVLGACNAVNYAADNQIYIAGHPAFVNYSTSQKISRPGDSDDSRSVNSVLLFTILNPIYSITTDVLYTICNPCGPVQRIVIFRKNGVQAMVEFDSVQSAQRAKASLNGADIYSGCCTLKIEYAKPTRLNVFKNDQDTWDYTNPNLSGQGSQCMFDGTPSFRTVLTHCVKRPMVESDPGSNPNKRQRQPPLLGDHPAEYGGPHGGYHSHYHDEGYGPPPPHYEGRRMGPPVGGHRRGPSRYGPQYGHPPPPPPPPEYGPHADSPVLMVYGLDQSKMNCDRVFNVFCLYGNVEKVKFMKSKPGAAMVEMADGYAVDRAITHLNNNFMFGQKLNVCVSKQPAIMPGQSYGLEDGSCSYKDFSESRNNRFSTPEQAAKNRIQHPSNVLHFFNAPLEVTEENFFEICDELGVKRPSSVKVFSGKSERSSSGLLEWESKSDALETLGFLNHYQMKNPNGPYPYTLKLCFSTAQHAS

SEQ ID NO: 908049 - protein, 311 aa, Homo sapiens; identical to SEQ ID NO: 908041

SEQ ID NO: 908050 - protein, 311 aa, Homo sapiens; identical to SEQ ID NO: 908041

SEQ ID NO: 908051 - protein, 392 aa, Homo sapiens
LAGPPLVEATTDVLYTICNPCGPVQRIVIFRKNGVQAMVEFDSVQSAQRAKASLNGADIYSGCCTLKIEYAKPTRLNVFKNDQDTWDYTNPNLSGQGDPGSNPNKRQRQPPLLGDHPAEYGGPHGGYHSHYHDEGYGPPPPHYEGRRMGPPVGGHRRGPSRYGPQYGHPPPPPPPPEYGPHADSPVLMVYGLDQSKMNCDRVFNVFCLYGNVEKVKFMKSKPGAAMVEMADGYAVDRAITHLNNNFMFGQKLNVCVSKQPAIMPGQSYGLEDGSCSYKDFSESRNNRFSTPEQAAKNRIQHPSNVLHFFNAPLEVTEENFFEICDELGVKRPSSVKVFSGKSERSSSGLLEWESKSDALETLGFLNHYQMKNPNGPYPYTLKLCFSTAQHAS

SEQ ID NO: 908052 - protein, 245 aa, Homo sapiens; identical to SEQ ID NO: 908046

SEQ ID NO: 908053 - protein, 311 aa, Homo sapiens
FITNNAFLETFVRVDSDPGSNPNKRQRQPPLLGDHPAEYGGPHGGYHSHYHDEGYGPPPPHYEGRRMGPPVGGHRRGPSRYGPQYGHPPPPPPPPEYGPHADSPVLMVYGLDQSKMNCDRVFNVFCLYGNVEKVKFMKSKPGAAMVEMADGYAVDRAITHLNNNFMFGQKLNVCVSKQPAIMPGQSYGLEDGSCSYKDFSESRNNRFSTPEQAAKNRIQHPSNVLHFFNAPLEVTEENFFEICDELGVKRPSSVKVFSGKSERSSSGLLEWESKSDALETLGFLNHYQMKNPNGPYPYTLKLCFSTAQHAS

SEQ ID NO: 908054 - protein, 188 aa, Homo sapiens
EVLTAATLPKVKFMKSKPGAAMVEMADGYAVDRAITHLNNNFMFGQKLNVCVSKQPAIMPGQSYGLEDGSCSYKDFSESRNNRFSTPEQAAKNRIQHPSNVLHFFNAPLEVTEENFFEICDELGVKRPSSVKVFSGKSERSSSGLLEWESKSDALETLGFLNHYQMKNPNGPYPYTLKLCFSTAQHAS

SEQ ID NO: 908055 - protein, 312 aa, Homo sapiens
MSRRLLPRAEKRRRRLEQRQQPDEQRRRSGAMVKMAAAGGGGGGGRYYGGGSEGGRAPKRLKTDNAGDQHGGGGGGGGGAGAAGGGGGGENYDDPHKTPASPVVHIRGLIDGVVEADLVEALQEFGPISYVVVMPKKRQALVEFEDVLGACNAVNYAADNQIYIAGHPAFVNYSTSQKISRPGDSDDSRSVNSVLLFTILNPIYSITTDVLYTICNPCGPVQRIVIFRKNGVQAMVEFDSVQSAQRAKASLNGADIYSGCCTLKIEYAKPTRLNVFKNDQDTWDYTNPNLSGQGDPGSNPNKRQRGTVISQD

SEQ ID NO: 908056 - protein, 347 aa, Homo sapiens
MSRRLLPRAEKRRRRLEQRQQPDEQRRRSGAMVKMAAAGGGGGGGRYYGGGSEGGRAPKRLKTDNAGDQHGGGGGGGGGAGAAGGGGGGENYDDPHKTPASPVVHIRGLIDGVVEADLVEALQEFGPISYVVVMPKKRQALVEFEDVLGACNAVNYAADNQIYIAGHPAFVNYSTSQKISRPGDSDDSRSVNSVLLFTILNPIYSITTDVLYTICNPCGPVQRIVIFRKNGVQAMVEFDSVQSAQRAKASLNGADIYSGCCTLKIEYAKPTRLNVFKNDQDTWDYTNPNLSGQGDPGSNPNKRQRQPPLLGDHPAEYGEGRGFPSVDSRGSCAPARRPPCKFSPVLP

SEQ ID NO: 908057 - protein, 248 aa, Homo sapiens
MSRRLLPRAEKRRRRLEQRQQPDEQRRRSGAMVKMAAAGGGGGGGRYYGGGSEGGRAPKRLKTDNAGDQHGGGGGGGGGAGAAGGGGGGENYDDPHKTPASPVVHIRGLIDGVVEADLVEALQEFGPISYVVVMPKKRQALVEFEDVLGACNAVNYAADNQIYIAGHPAFVNYSTSQKISRPGDSDDSRSVNSVLLFTILNPIYSITTDVLYTICNPCGPVQRIVIFRKNGVQAMVEYPLLENRCSLG

SEQ ID NO: 908058 - protein, 156 aa, Homo sapiens
MSRRLLPRAEKRRRRLEQRQQPDEQRRRSGAMVKMAAAGGGGGGGRYYGGGSEGGRAPKRLKTDNAGDQHGGGGGGGGGAGAAGGGGGGENYDDPHKTPASPVVHIRGLIDGVVEADLVEALQEFGPIRYWAQRPGVGLPKLTPGCPCVSTISGWK

SEQ ID NO: 908059 - protein, 311 aa, Homo sapiens; identical to SEQ ID NO: 908041

SEQ ID NO: 908060 - protein, 240 aa, Homo sapiens
PVSALFDPGRPVRLAAELENYDDPHKTPASPVVHIRGLIDGVVEADLVEALQEFGPISYVVVMPKKRQALVEFEDVLGACNAVNYAADNQIYIAGHPAFVNYSTSQKISRPGDSDDSRSVNSVLLFTILNPIYSITTDVLYTICNPCGPVQRIVIFRKNGVQAMVEFDSVQSAQRAKASLNGADIYSGCCTLKIEYAKPTRLNVFKNDQDTWDYTNPNLSGQGNLDDHFVLNIPALLSLD

SEQ ID NO: 908061 - protein, 311 aa, Homo sapiens; identical to SEQ ID NO: 908041

SEQ ID NO: 908062 - protein, 245 aa, Homo sapiens; identical to SEQ ID NO: 908046

SEQ ID NO: 908063 - protein, 299 aa, Homo sapiens; identical to SEQ ID NO: 908045

SEQ ID NO: 908064 - protein, 245 aa, Homo sapiens; identical to SEQ ID NO: 908046

SEQ ID NO: 908065 - protein, 518 aa, Homo sapiens
PVSALFDPGRPVRLAAELENYDDPHKTPASPVVHIRGLIDGVVEADLVEALQEFGPISYVVVMPKKRQALVEFEDVLGACNAVNYAADNQIYIAGHPAFVNYSTSQKISRPGDSDDSRSVNSVLLFTILNPIYSITTDVLYTICNPCGPVQRIVIFRKNGVQAMVEFDSVQSAQRAKASLNGADIYSGCCTLKIEYAKPTRLNVFKNDQDTWDYTNPNLSGQGDPGSNPNKRQRQPPLLGDHPAEYGGPHGGYHSHYHDEGYGPPPPHYEGRRMGPPVGGHRRGPSRYGPQYGHPPPPPPPPEYGPHADSPVLMVYGLDQSKMNCDRVFNVFCLYGNVEKVKFMKSKPGAAMVEMADGYAVDRAITHLNNNFMFGQKLNVCVSKQPAIMPGQSYGLEDGSCSYKDFSESRNNRFSTPEQAAKNRIQHPSNVLHFFNAPLEVTEENFFEICDELGVKRPSSVKVFSGKSERSSSGLLEWESKSDALETLGFLNHYQMKNPNGPYPYTLKLCFSTAQHAS

SEQ ID NO: 908066 - protein, 311 aa, Homo sapiens; identical to SEQ ID NO: 908041

SEQ ID NO: 908067 - protein, 511 aa, Homo sapiens
AVLSWGGVGRRENYDDPHKTPASPVVHIRGLIDGVVEADLVEALQEFGPISYVVVMPKKRQALVEFEDVLGACNAVNYAADNQIYIAGHPAFVNYSTSQKISRPGDSDDSRSVNSVLLFTILNPIYSITTDVLYTICNPCGPVQRIVIFRKNGVQAMVEFDSVQSAQRAKASLNGADIYSGCCTLKIEYAKPTRLNVFKNDQDTWDYTNPNLSGQGDPGSNPNKRQRQPPLLGDHPAEYGGPHGGYHSHYHDEGYGPPPPHYEGRRMGPPVGGHRRGPSRYGPQYGHPPPPPPPPEYGPHADSPVLMVYGLDQSKMNCDRVFNVFCLYGNVEKVKFMKSKPGAAMVEMADGYAVDRAITHLNNNFMFGQKLNVCVSKQPAIMPGQSYGLEDGSCSYKDFSESRNNRFSTPEQAAKNRIQHPSNVLHFFNAPLEVTEENFFEICDELGVKRPSSVKVFSGKSERSSSGLLEWESKSDALETLGFLNHYQMKNPNGPYPYTLKLCFSTAQHAS

SEQ ID NO: 908068 - protein, 245 aa, Homo sapiens; identical to SEQ ID NO: 908046

SEQ ID NO: 908069 - protein, 205 aa, Homo sapiens
MVYGLDQSKMNCDRVFNVFCLYGNVEKVKFMKSKPGAAMVEMADGYAVDRAITHLNNNFMFGQKLNVCVSKQPAIMPGQSYGLEDGSCSYKDFSESRNNRFSTPEQAAKNRIQHPSNVLHFFNAPLEVTEENFFEICDELGVKRPSSVKVFSGKSERSSSGLLEWESKSDALETLGFLNHYQMKNPNGPYPYTLKLCFSTAQHAS

SEQ ID NO: 908070 - protein, 130 aa, Homo sapiens
MPGQSYGLEDGSCSYKDFSESRNNRFSTPEQAAKNRIQHPSNVLHFFNAPLEVTEENFFEICDELGVKRPSSVKVFSGKSERSSSGLLEWESKSDALETLGFLNHYQMKNPNGPYPYTLKLCFSTAQHAS

SEQ ID NO: 908071 - protein, 104 aa, Homo sapiens
MPVLAGARMAYQHPSNVLHFFNAPLEVTEENFFEICDELGVKRPSSVKVFSGKSERSSSGLLEWESKSDALETLGFLNHYQMKNPNGPYPYTLKLCFSTAQHAS

SEQ ID NO: 908072 - protein, 216 aa, Homo sapiens; identical to SEQ ID NO: 908044

SEQ ID NO: 908073 - protein, 139 aa, Homo sapiens
HPSNVLHFFNAPLEVTEENFFEVCAVELRRQSGPCHGRLSRPFISVFSANSCGTPVLPGPGLSARDTAEARTDRNLCSQTGQGENGTKFLATPFAAFLPFTFLASRATARLLGKLLHRPSDEGPISQEPHWRRLRVPSP

SEQ ID NO: 908074 - protein, 587 aa, Homo sapiens
MTRFSYAEYFSLFHSCSAPSRSTAPPESSPARAPMGLFQGVMQKYSSSLFKTSQLAPADPLIKAIKDGDEEALKTMIKEGKNLAEPNKEGWLPLHEAAYYGQVGCLKVLQRAYPGTIDQRTLQEETAVYLATCRGHLDCLLSLLQAGAEPDISNKSRETPLYKACERKNAEAVKILVQHNADTNHRCNRGWTALHESVSRNDLEVMQILVSGGAKVESKNAYGITPLFVAAQSGQLEALRFLAKYGADINTQASDNASALYEACKNEHEEVVEFLLSQGADANKTNKDGLLPLHIASKKGNYRIVQMLLPVTSRTRIRRSGVSPLHLAAERNHDEVLEALLSARFDVNTPLAPERARLYEDRRSSALYFAVVNNNVYATELLLQHGADPNRDVISPLLVAIRHGCLRTMQLLLDHGANIDAYIATHPTAFPATIMFAMKCLSLLKFLMDLGCDGEPCFSCLYGNGPHPPAPQPSSRFNDAPAADKEPSVVQFCEFVSAPEVSRWAGPIIDVLLDYVGNVQLCSRLKEHIDSFEDWAVIKEKAEPPRPLAHLCRLRVRKAIGKYRIKLLDTLPLPGRLIRYLKYENTQ

SEQ ID NO: 908075 - protein, 156 aa, Homo sapiens
MTRFSYAEYFSLFHSCSAPSRSTAPPESSPARAPMGLFQGVMQKYSSTTRISLGLRAQSFGQSREQNVSRRRIICLQTDEQIPDLLYLQEWQKPLFLGPGQSLRCSGEGGAQSLPCAPPLVLENSPLDFRAFSPKTKMKTWPKVGGRGSLGLGGLC

SEQ ID NO: 908076 - protein, 533 aa, Homo sapiens
MRPADPLIKAIKDGDEEALKTMIKEGKNLAEPNKEGWLPLHEAAYYGQVGCLKVLQRAYPGTIDQRTLQEETAVYLATCRGHLDCLLSLLQAGAEPDISNKSRETPLYKACERKNAEAVKILVQHNADTNHRCNRGWTALHESVSRNDLEVMQILVSGGAKVESKNAYGITPLFVAAQSGQLEALRFLAKYGADINTQASDNASALYEACKNEHEEVVEFLLSQGADANKTNKDGLLPLHIASKKGNYRIVQMLLPVTSRTRIRRSGVSPLHLAAERNHDEVLEALLSARFDVNTPLAPERARLYEDRRSSALYFAVVNNNVYATELLLQHGADPNRDVISPLLVAIRHGCLRTMQLLLDHGANIDAYIATHPTAFPATIMFAMKCLSLLKFLMDLGCDGEPCFSCLYGNGPHPPAPQPSSRFNDAPAADKEPSVVQFCEFVSAPEVSRWAGPIIDVLLDYVGNVQLCSRLKEHIDSFEDWAVIKEKAEPPRPLAHLCRLRVRKAIGKYRIKLLDTLPLPGRLIRYLKYENTQ

SEQ ID NO: 908077 - protein, 581 aa, Homo sapiens
MTRFSYAEYFSLFHSCSAPSRSTAPPESSPARAPMGLFQGVMQKYSSSLFKTSQLAPADPLIKAIKDGDEEALKTMIKEGKNLAEPNKEGWLPLHEAAYYGQVGCLKVLQRAYPGTIDQRTLQEETAVYLATCRGHLDCLLSLLQAGAEPDISNKSRETPLYKACERKNAEAVKILVQHNADTNHRCNRGWTALHESVSRNDLEVMQILVSGGAKVESKNAYGITPLFVAAQSGQLEALRFLAKYGADINTQASDNASALYEACKNEHEEVVEFLLSQGADANKTNKDGLLPLHIASKKGNYRIVQMLLPVTSRTRIRRSGVSPLHLAAERNHDEVLEALLSARFDVNTPLAPERARLYEDRRSSALYFAVVNNNVYATELLLQHGADPNRDVISPLLVAIRHGCLRTMQLLLDHGANIDAYIATHPTAFPATIMFAMKCLSLLKFLMDLGCDGEPCFSCLYGNGPHPPAPQPSSRFNDAPAADKEPSVVQFCEFVSAPEVSRWAGPIIDVLLDYVGNVQLCSRLKEHIDSFEDWAVIKEKAAPLVLENSPLDFRAFSPKTKMKTWPKVGGRGSLGLGGLC

SEQ ID NO: 908078 - protein, 204 aa, Homo sapiens
AEPGARALLLAGPALPVHTPTLPSPAPAPRPGRIVQMLLPVTSRTRIRRSGVSPLHLAAERNHDEVLEALLSARFDVNTPLAPERARLYEDRRSSALYFAVVNNNVYATELLLQHGADPNRDVISPLLVAIRHGCLRTMQLLLDHGANIDAYIATHPTAFPATIMFAMKCLSLLKFLMDLGCDGEPCFSCLYGNGPHPPAPQPS

SEQ ID NO: 908079 - protein, 489 aa, Homo sapiens
MRPADPLIKAIKDGDEEALKTMIKEGKNLAEPNKEGWLPLHEAAYYGQVGCLKVLQRAYPGTIDQRTLQEETAVYLATCRGHLDCLLSLLQAGAEPDISNKSRETPLYKACERKNAEAVKILVQHNADTNHRCNRGWTALHESVSRNDLEVMQILVSGGAKVESKNAYGITPLFVAAQSGQLEALRFLAKYGADINTQASDNASALYEACKNEHEEVVEFLLSQGADANKTNKDGLLPLHIASKKGNYRIVQMLLPVTSRTRIRRSGVSPLHLAAERNHDEVLEALLSARFDVNTPLAPERARLYEDRRSSALYFAVVNNNVYATELLLQHGADPNRDVISPLLVAIRHGCLRTMQLLLDHGANIDAYIATHPTAFPATIMFAMKCLSLLKFLMDLGCDGEPCFSCLYGNGPHPPAPQPSSRFNDAPAADKEPSVVQFCEFVSAPEVSRWAGPIIDVLLDYVGNVQLCSRLKEHIDSFEDWVLEGFVKY

SEQ ID NO: 908080 - protein, 590 aa, Homo sapiens
MTRFSYAEYFSLFHSCSAPSRSTAPPESSPARAPMGLFQGVMQKYSSSLFKTSQLAPADPLIKAIKDGDEEALKTMIKEGKNLAEPNKEGWLPLHEAAYYGQVGCLKVLQRAYPGTIDQRTLQEETAVYLATCRGHLDCLLSLLQAGAEPDISNKSRETPLYKACERKNAEAVKILVQHNADTNHRCNRGWTALHESVSRNDLEVMQILVSGGAKVESKNAYGITPLFVAAQSGQLEALRFLAKYGADINTQASDNASALYEACKNEHEEVVEFLLSQGADANKTNKDGLLPLHIASKKGNYRIVQMLLPVTSRTRIRRSGVSPLHLAAERNHDEVLEALLSARFDVNTPLAPERARLYEDRRSSALYFAVVNNNVYATELLLQHGADPNRDVISPLLVAIRHGCLRTMQLLLDHGANIDAYIATHPTAFPATIMFAMKCLSLLKFLMDLGCDGEPCFSCLYGNGPHPPAPQPSSRFNDAPAADKEPSVVQFCEFVSAPEVSRWAGPIIDVLLDYVGNVQLCSRLKEHIDSFEDWAVIKEKAEPPRPLAHLCRLRVRKAIGKYRIKLLDTLPLPGRLIRYLKYENTQGRG

SEQ ID NO: 908081 - protein, 269 aa, Homo sapiens
MTRFSYAEYFSLFHSCSAPSRSTAPPESSPARAPMGLFQGVMQKYSSSLFKTSQLAPADPLIKAIKDGDEEALKTMIKEGKNLAEPNKEGWLPLHEAAYYGQVGCLKVLQRAYPGTIDQRTLQEETAVYLATCRGHLDCLLSLLQAGAEPDISNKSRETPLYKACERKNAEAVKILVQHNADTNHRCNRGWTALHESVSRNDLEVMQILVSGGAKVESKNAYGITPLFVAAQSGQLEALRFLAKYGEWLRVPRSWSPQRAHGKDVRGQL

SEQ ID NO: 908082 - protein, 3705 aa, Homo sapiens
MQRALGMDMTTAPRSKSQQQLHSPALSPAHSPAKQPLGKPDQERSRGPGGPQPGSRQAETARATSVPGPAQAAAPPEVGRVSPQPPQPTKPSTAEPRPPAGEAPAKSATAVPAGLGATEQTQEGLTGKLFGLGASLLTQASTLMSVQPEADTQGQPAPSKGTPKIVFNDASKEAGPKPLGSGPGPGPAPGAKTEPGARMGPGSGPGALPKTGGTTSPKHGRAEHQAASKAAAKPKTMPKERAICPLCQAELNVGSKSPANYNTCTTCRLQVCNLCGFNPTPHLVEKTEWLCLNCQTKRLLEGSLGEPTPLPPPTSQQPPVGAPHRASGTSPLKQKGPQGLGQPSGPLPAKASPLSTKASPLPSKASPQAKPLRASEPSKTPSSVQEKKTRVPTKAEPMPKPPPETTPTPATPKVKSGVRRAEPATPVVKAVPEAPKGGEAEDLVGKPYSQDASRSPQSLSDTGYSSDGISSSQSEITGVVQQEVEQLDSAGVTGPHPPSPSEIHKVGSSMRPLLQAQGLAPSERSKPLSSGTGEEQKQRPHSLSITPEAFDSDEELEDILEEDEDSAEWRRRREQQDTAESSDDFGSQLRHDYVEDSSEGGLSPLPPQPPARAAELTDEDFMRRQILEMSAEEDNLEEDDTATSGRGLAKHGTQKGGPRPRPEPSQEPAALPKRRLPHNATTGYEELLPEGGSAEATDGSGTLQGGLRRFKTIELNSTGSYGHELDLGQGPDPSLDREPELEMESLTGSPEDRSRGEHSSTLPASTPSYTSGTSPTSLSSLEEDSDSSPSRRQRLEEAKQQRKARHRSHGPLLPTIEDSSEEEELREEEELLREQEKMREVEQQRIRSTARKTRRDKEELRAQRRRERSKTPPSNLSPIEDASPTEELRQAAEMEELHRSSCSEYSPSPSLDSEAEALDGGPSRLYKSGSEYNLPTFMSLYSPTETPSGSSTTPSSGRPLKSAEEAYEEMMRKAELLQRQQGQAAGARGPHGGPSQPTGPRGLGSFEYQDTTDREYGQAAQPAAEGTPASLGAAVYEEILQTSQSIVRMRQASSRDLAFAEDKKKEKQFLNAESAYMDPMKQNGGPLTPGTSPTQLAAPVSFSTPTSSDSSGGRVIPDVRVTQHFAKETQDPLKLHSSPASPSSASKEIGMPFSQGPGTPATTAVAPCPAGLPRGYMTPASPAGSERSPSPSSTAHSYGHSPTTANYGSQTEDLPQAPSGLAAAGRAAREKPLSASDGEGGTPQPSRAYSYFASSSPPLSPSSPSESPTFSPGKMGPRATAEFSTQTPSPAPASDMPRSPGAPTPSPMVAQGTQTPHRPSTPRLVWQESSQEAPFMVITLASDASSQTRMVHASASTSPLCSPTETQPTTHGYSQTTPPSVSQLPPEPPGPPGFPRVPSAGADGPLALYGWGALPAENISLCRISSVPGTSRVEPGPRTPGTAVVDLRTAVKPTPIILTDQGMDLTSLAVEARKYGLALDPIPGRQSTAVQPLVINLNAQEHTFLATATTVSITMASSVFMAQQKQPVVYGDPYQSRLDFGQGGGSPVCLAQVKQVEQAVQTAPYRSGPRGRPREAKFARYNLPNQVAPLARRDVLITQMGTAQSIGLKPGPVPEPGAEPHRATPAELRSHALPGARKPHTVVVQMGEGTAGTVTTLLPEEPAGALDLTGMRPESQLACCDMVYKLPFGSSCTGTFHPAPSVPEKSMADAAPPGQSSSPFYGPRDPEPPEPPTYRAQGVVGPGPHEEQRPYPQGLPGRLYSSMSDTNLAEAGLNYHAQRIGQLFQGPGRDSAMDLSSLKHSYSLGFADGRYLGQGLQYGSVTDLRHPTDLLAHPLPMRRYSSVSNIYSDHRYGPRGDAVGFQEASLAQYSATTAREISRMCAALNSMDQYGGRHGSGGGGPDLVQYQPQHGPGLSAPQSLVPLRPGLLGNPTFPEGHPSPGNLAQYGPAAGQGTAVRQLLPSTATVRAADGMIYSTINTPIAATLPITTQPASVLRPMVRGGMYRPYASGGITAVPLTSLTRVPMIAPRVPLGPTGLYRYPAPSRFPIASSVPPAEGPVYLGKPAAAKAPGAGGPSRPEMPVGAAREEPLPTTTPAAIKEAAGAPAPAPLAGQKPPADAAPGGGSGALSRPGFEKEEASQEERQRKQQEQLLQLERERVELEKLRQLRLQEELERERVELQRHREEEQLLVQRELQELQTIKHHVLQQQQEERQAQFALQREQLAQQRLQLEQIQQLQQQLQQQLEEQKQRQKAPFPAACEAPGRGPPLAAAELAQNGQYWPPLTHAAFIAMAGPEGLGQPREPVLHRGLPSSASDMSLQTEEQWEASRSGIKKRHSMPRLRDACELESGTEPCVVRRIADSSVQTDDEDGESRYLLSRRRRARRSADCSVQTDDEDSAEWEQPVRRRRSRLPRHSDSGSDSKHDATASSSSAAATVRAMSSVGIQTISDCSVQTEPDQLPRVSPAIHITAATDPKVEIVRYISAPEKTGRGESLACQTEPDGQAQGVAGPQLVGPTAISPYLPGIQIVTPGPLGRFEKKKPDPLEIGYQAHLPPESLSQLVSRQPPKSPQVLYSPVSPLSPHRLLDTSFASSERLNKAHVSPQKHFTADSALRQQTLPRPMKTLQRSLSDPKPLSPTAEESAKERFSLYQHQGGLGSQVSALPPNSLVRKVKRTLPSPPPEEAHLPLAGQASPQLYAASLLQRGLTGPTTVPATKASLLRELDRDLRLVEHESTKLRKKQAELDEEEKEIDAKLKYLELGITQRKESLAKDRGGRDYPPLRGLGEHRDYLSDSELNQLRLQGCTTPAGQFVDFPATAAAPATPSGPTAFQQPRFQPPAPQYSAGSGGPTQNGFPAHQAPTYPGPSTYPAPAFPPGASYPAEPGLPNQQAFRPTGHYAGQTPMPTTQSTLFPVPADSRAPLQKPRQTSLADLEQKVPTNYEVIASPVVPMSSAPSETSYSGPAVSSGYEQGKVPEVPRAGDRGSVSQSPAPTYPSDSHYTSLEQNVPRNYVMIDDISELTKDSTSTAPDSQRLEPLGPGSSGRPGKEPGEPGVLDGPTLPCCYARGEEESEEDSYDPRGKGGHLRSMESNGRPASTHYYGDSDYRHGARVEKYGPGPMGPKHPSKSLAPAAISSKRSKHRKQGMEQKISKFSPIEEAKDVESDLASYPPPAVSSSLVSRGRKFQDEITYGLKKNVYEQQKYYGMSSRDAVEDDRIYGGSSRSRAPSAYSGEKLSSHDFSGWGKGYEREREAVERLQKAGPKPSSLSMAHSRVRPPMRSQASEEESPVSPLGRPRPAGGPLPPGGDTCPQFCSSHSMPDVQEHVKDGPRAHAYKREEGYILDDSHCVVSDSEAYHLGQEETDWFDKPRDARSDRFRHHGGHAVSSSSQKRGPARHSYHDYDEPPEEGLWPHDEGGPGRHASAKEHRHGDHGRHSGRHTGEEPGRRAAKPHARDLGRHEARPHSQPSSAPAMPKKGQPGYPSSAEYSQPSRASSAYHHASDSKKGSRQAHSGPAALQSKAEPQAQPQLQGRQAAPGPQQSQSPSSRQIPSGAASRQPQTQQQQQGLGLQPPQQALTQARLQQQSQPTTRGSAPAASQPAGKPQPGPSTATGPQPAGPPRAEQTNGSKGTAKAPQQGRAPQAQPTPGPGPAGVKAGARPGGTPGAPAGQPGADGESVFSKILPGGAAEQAGKLTEAVSAFGKKFSSFW

SEQ ID NO: 908083 - protein, 3705 aa, Homo sapiens; identical to SEQ ID NO: 908082

SEQ ID NO: 908084 - protein, 3810 aa, Homo sapiens
MQRALGMDMTTAPRSKSQQQLHSPALSPAHSPAKQPLGKPDQERSRGPGGPQPGSRQAETARATSVPGPAQAAAPPEVGRVSPQPPQPTKPSTAEPRPPAGEAPAKSATAVPAGLGATEQTQEGLTGKLFGLGASLLTQASTLMSVQPEADTQGQPAPSKGTPKIVFNDASKEAGPKPLGSGPGPGPAPGAKTEPGARMGPGSGPGALPKTGGTTSPKHGRAEHQAASKAAAKPKTMPKERAICPLCQAELNVGSKSPANYNTCTTCRLQVCNLCGFNPTPHLVEKTEWLCLNCQTKRLLEGSLGEPTPLPPPTSQQPPVGAPHRASGTSPLKQKGPQGLGQPSGPLPAKASPLSTKASPLPSKASPQAKPLRASEPSKTPSSVQEKKTRVPTKAEPMPKPPPETTPTPATPKVKSGVRRAEPATPVVKAVPEAPKGGEAEDLVGKPYSQDASRSPQSLSDTGYSSDGISSSQSEITGVVQQEVEQLDSAGVTGPHPPSPSEIHKVGSSMRPLLQAQGLAPSERSKPLSSGTGEEQKQRPHSLSITPEAFDSDEELEDILEEDEDSAEWRRRREQQDTAESSDDFGSQLRHDYVEDSSEGGLSPLPPQPPARAAELTDEDFMRRQILEMSAEEDNLEEDDTATSGRGLAKHGTQKGGPRPRPEPSQEPAALPKRRLPHNATTGYEELLPEGGSAEATDGSGTLQGGLRRFKTIELNSTGSYGHELDLGQGPDPSLDREPELEMESLTGSPEDRSRGEHSSTLPASTPSYTSGTSPTSLSSLEEDSDSSPSRRQRLEEAKQQRKARHRSHGPLLPTIEDSSEEEELREEEELLREQEKMREVEQQRIRSTARKTRRDKEELRAQRRRERSKTPPSNLSPIEDASPTEELRQAAEMEELHRSSCSEYSPSPSLDSEAEALDGGPSRLYKSGSEYNLPTFMSLYSPTETPSGSSTTPSSGRPLKSAEEAYEEMMRKAELLQRQQGQAAGARGPHGGPSQPTGPRGLGSFEYQDTTDREYGQAAQPAAEGTPASLGAAVYEEILQTSQSIVRMRQASSRDLAFAEDKKKEKQFLNAESAYMDPMKQNGGPLTPGTSPTQLAAPVSFSTPTSSDSSGGRVIPDVRVTQHFAKETQDPLKLHSSPASPSSASKEIGMPFSQGPGTPATTAVAPCPAGLPRGYMTPASPAGSERSPSPSSTAHSYGHSPTTANYGSQTEDLPQAPSGLAAAGRAAREKPLSASDGEGGTPQPSRAYSYFASSSPPLSPSSPSESPTFSPGKMGPRATAEFSTQTPSPAPASDMPRSPGAPTPSPMVAQGTQTPHRPSTPRLVWQESSQEAPFMVITLASDASSQTRMVHASASTSPLCSPTETQPTTHGYSQTTPPSVSQLPPEPPGPPGFPRVPSAGADGPLALYGWGALPAENISLCRISSVPGTSRVEPGPRTPGTAVVDLRTAVKPTPIILTDQGMDLTSLAVEARKYGLALDPIPGRQSTAVQPLVINLNAQEHTFLATATTVSITMASSVFMAQQKQPVVYGDPYQSRLDFGQGGGSPVCLAQVKQVEQAVQTAPYRSGPRGRPREAKFARYNLPNQVAPLARRDVLITQMGTAQSIGLKPGPVPEPGAEPHRATPAELRSHALPGARKPHTVVVQMGEGTAGTVTTLLPEEPAGALDLTGMRPESQLACCDMVYKLPFGSSCTGTFHPAPSVPEKSMADAAPPGQSSSPFYGPRDPEPPEPPTYRAQGVVGPGPHEEQRPYPQGLPGRLYSSMSDTNLAEAGLNYHAQRIGQLFQGPGRDSAMDLSSLKHSYSLGFADGRYLGQGLQYGSVTDLRHPTDLLAHPLPMRRYSSVSNIYSDHRYGPRGDAVGFQEASLAQYSATTAREISRMCAALNSMDQYGGRHGSGGGGPDLVQYQPQHGPGLSAPQSLVPLRPGLLGNPTFPEGHPSPGNLAQYGPAAGQGTAVRQLLPSTATVRAADGMIYSTINTPIAATLPITTQPASVLRPMVRGGMYRPYASGGITAVPLTSLTRVPMIAPRVPLGPTGLYRYPAPSRFPIASSVPPAEGPVYLGKPAAAKAPGAGGPSRPEMPVGAAREEPLPTTTPAAIKEAAGAPAPAPLAGQKPPADAAPGGGSGALSRPGFEKEEASQEERQRKQQEQLLQLERERVELEKLRQLRLQEELERERVELQRHREEEQLLVQRELQELQTIKHHVLQQQQEERQAQFALQREQLAQQRLQLEQIQQLQQQLQQQLEEQKQRQKAPFPAACEAPGRGPPLAAAELAQNGQYWPPLTHAAFIAMAGPEGLGQPREPVLHRGLPSSASDMSLQTEEQWEASRSGIKKRHSMPRLRDACELESGTEPCVVRRIADSSVQTDDEDGESRYLLSRRRRARRSADCSVQTDDEDSAEWEQPVRRRRSRLPRHSDSGSDSKHDATASSSSAAATVRAMSSVGIQTISDCSVQTEPDQLPRVSPAIHITAATDPKVEIVRYISAPEKTGRGESLACQTEPDGQAQGVAGPQLVGPTAISPYLPGIQIVTPGPLGRFEKKKPDPLEIGYQAHLPPESLSQLVSRQPPKSPQVLYSPVSPLSPHRLLDTSFASSERLNKAHVSPQKHFTADSALRQQTLPRPMKTLQRSLSDPKPLSPTAEESAKERFSLYQHQGGLGSQVSALPPNSLVRKVKRTLPSPPPEEAHLPLAGQASPQLYAASLLQRGLTGPTTVPATKASLLRELDRDLRLVEHESTKLRKKQAELDEEEKEIDAKLKYLELGITQRKESLAKDRGGRDYPPLRGLGEHRDYLSDSELNQLRLQGCTTPAGQFVDFPATAAAPATPSGPTAFQQPRFQPPAPQYSAGSGGPTQNGFPAHQAPTYPGPSTYPAPAFPPGASYPAEPGLPNQQAFRPTGHYAGQTPMPTTQSTLFPVPADSRAPLQKPRQTSLADLEQKVPTNYEVIASPVVPMSSAPSETSYSGPAVSSGYEQGKVPEVPRAGDRGSVSQSPAPTYPSDSHYTSLEQNVPRNYVMIDDISELTKDSTSTAPDSQRLEPLGPGSSGRPGKEPGEPGVLDGPTLPCCYARGEEESEEDSYDPRGKGGHLRSMESNGRPASTHYYGDSDYRHGARVEKYGPGPMGPKHPSKSLAPAAISSKRSKHRKQGMEQKISKFSPIEEAKDVESDLASYPPPAVSSSLVSRGRKFQDEITYGLKKNVYEQQKYYGMSSRDAVEDDRIYGGSSRSRAPSAYSGEKLSSHDFSGWGKGYEREREAVERLQKAGPKPSSLSMAHSRVRPPMRSQASEEESPVSPLGRPRPAGGPLPPGGDTCPQFCSSHSMPDVQEHVKDGPRAHAYKREEGYILDDSHCVVSDSEGNGSQEVISADTQQLGGLPTCGALGPKMSQQGLVWRLIWWALLQAELPLPAPSVPWSVVAGGWAGGLLICLWLWHPLSWFLCMASARPPPAASPGVDGILFLVSEAYHLGQEETDWFDKPRDARSDRFRHHGGHAVSSSSQKRGPARHSYHDYDEPPEEGLWPHDEGGPGRHASAKEHRHGDHGRHSGRHTGEEPGRRAAKPHARDLGRHEARPHSQPSSAPAMPKKGQPGYPSSAEYSQPSRASSAYHHASDSKKGSRQAHSGPAALQSKAEPQAQPQLQGRQAAPGPQQSQSPSSRQIPSGAASRQPQTQQQQQGLGLQPPQQALTQARLQQQSQPTTRGSAPAASQPAGKPQPGPSTATGPQPAGPPRAEQTNGSKGTAKAPQQGRAPQAQPTPGPGPAGVKAGARPGGTPGAPAGQPGADGESVFSKILPGGAAEQAGKLTEAVSAFGKKFSSFW

SEQ ID NO: 908085 - protein, 107 aa, Homo sapiens
ILFEDFSVFLIFINPLSHFLAENRVALSELPNQAATGGQPRRADPPAAAHLTAAPCRGPSPCIWNIPSEAERATGAGPAFRPPACQGQPSIHQGQPSAQQGQPPGQA

SEQ ID NO: 908086 - protein, 3926 aa, Homo sapiens
MGNEVSLEGGAGDGPLPPGGAGPGPGPGPGPGAGKPPSAPAGGGQLPAAGAARSTAVPPVPGPGPGPGPGPGPGSTSRRLDPKEPLGNQRAASPTPKQASATTPGHESPRETRAQGPAGQEADGPRRTLQVDSRTQRSGRSPSVSPDRGSTPTSPYSVPQIAPLPSSTLCPICKTSDLTSTPSQPNFNTCTQCHNKVCNQCGFNPNPHLTQVKEWLCLNCQMQRALGMDMTTAPRSKSQQQLHSPALSPAHSPAKQPLGKPDQERSRGPGGPQPGSRQAETARATSVPGPAQAAAPPEVGRVSPQPPQPTKPSTAEPRPPAGEAPAKSATAVPAGLGATEQTQEGLTGKLFGLGASLLTQASTLMSVQPEADTQGQPAPSKGTPKIVFNDASKEAGPKPLGSGPGPGPAPGAKTEPGARMGPGSGPGALPKTGGTTSPKHGRAEHQAASKAAAKPKTMPKERAICPLCQAELNVGSKSPANYNTCTTCRLQVCNLCGFNPTPHLVEKTEWLCLNCQTKRLLEGSLGEPTPLPPPTSQQPPVGAPHRASGTSPLKQKGPQGLGQPSGPLPAKASPLSTKASPLPSKASPQAKPLRASEPSKTPSSVQEKKTRVPTKAEPMPKPPPETTPTPATPKVKSGVRRAEPATPVVKAVPEAPKGGEAEDLVGKPYSQDASRSPQSLSDTGYSSDGISSSQSEITGVVQQEVEQLDSAGVTGPHPPSPSEIHKVGSSMRPLLQAQGLAPSERSKPLSSGTGEEQKQRPHSLSITPEAFDSDEELEDILEEDEDSAEWRRRREQQDTAESSDDFGSQLRHDYVEDSSEGGLSPLPPQPPARAAELTDEDFMRRQILEMSAEEDNLEEDDTATSGRGLAKHGTQKGGPRPRPEPSQEPAALPKRRLPHNATTGYEELLPEGGSAEATDGSGTLQGGLRRFKTIELNSTGSYGHELDLGQGPDPSLDREPELEMESLTGSPEDRSRGEHSSTLPASTPSYTSGTSPTSLSSLEEDSDSSPSRRQRLEEAKQQRKARHRSHGPLLPTIEDSSEEEELREEEELLREQEKMREVEQQRIRSTARKTRRDKEELRAQRRRERSKTPPSNLSPIEDASPTEELRQAAEMEELHRSSCSEYSPSPSLDSEAEALDGGPSRLYKSGSEYNLPTFMSLYSPTETPSGSSTTPSSGRPLKSAEEAYEEMMRKAELLQRQQGQAAGARGPHGGPSQPTGPRGLGSFEYQDTTDREYGQAAQPAAEGTPASLGAAVYEEILQTSQSIVRMRQASSRDLAFAEDKKKEKQFLNAESAYMDPMKQNGGPLTPGTSPTQLAAPVSFSTPTSSDSSGGRVIPDVRVTQHFAKETQDPLKLHSSPASPSSASKEIGMPFSQGPGTPATTAVAPCPAGLPRGYMTPASPAGSERSPSPSSTAHSYGHSPTTANYGSQTEDLPQAPSGLAAAGRAAREKPLSASDGEGGTPQPSRAYSYFASSSPPLSPSSPSESPTFSPGKMGPRATAEFSTQTPSPAPASDMPRSPGAPTPSPMVAQGTQTPHRPSTPRLVWQESSQEAPFMVITLASDASSQTRMVHASASTSPLCSPTETQPTTHGYSQTTPPSVSQLPPEPPGPPGFPRVPSAGADGPLALYGWGALPAENISLCRISSVPGTSRVEPGPRTPGTAVVDLRTAVKPTPIILTDQGMDLTSLAVEARKYGLALDPIPGRQSTAVQPLVINLNAQEHTFLATATTVSITMASSVFMAQQKQPVVYGDPYQSRLDFGQGGGSPVCLAQVKQVEQAVQTAPYRSGPRGRPREAKFARYNLPNQVAPLARRDVLITQMGTAQSIGLKPGPVPEPGAEPHRATPAELRSHALPGARKPHTVVVQMGEGTAGTVTTLLPEEPAGALDLTGMRPESQLACCDMVYKLPFGSSCTGTFHPAPSVPEKSMADAAPPGQSSSPFYGPRDPEPPEPPTYRAQGVVGPGPHEEQRPYPQGLPGRLYSSMSDTNLAEAGLNYHAQRIGQLFQGPGRDSAMDLSSLKHSYSLGFADGRYLGQGLQYGSVTDLRHPTDLLAHPLPMRRYSSVSNIYSDHRYGPRGDAVGFQEASLAQYSATTAREISRMCAALNSMDQYGGRHGSGGGGPDLVQYQPQHGPGLSAPQSLVPLRPGLLGNPTFPEGHPSPGNLAQYGPAAGQGTAVRQLLPSTATVRAADGMIYSTINTPIAATLPITTQPASVLRPMVRGGMYRPYASGGITAVPLTSLTRVPMIAPRVPLGPTGLYRYPAPSRFPIASSVPPAEGPVYLGKPAAAKAPGAGGPSRPEMPVGAAREEPLPTTTPAAIKEAAGAPAPAPLAGQKPPADAAPGGGSGALSRPGFEKEEASQEERQRKQQEQLLQLERERVELEKLRQLRLQEELERERVELQRHREEEQLLVQRELQELQTIKHHVLQQQQEERQAQFALQREQLAQQRLQLEQIQQLQQQLQQQLEEQKQRQKAPFPAACEAPGRGPPLAAAELAQNGQYWPPLTHAAFIAMAGPEGLGQPREPVLHRGLPSSASDMSLQTEEQWEASRSGIKKRHSMPRLRDACELESGTEPCVVRRIADSSVQTDDEDGESRYLLSRRRRARRSADCSVQTDDEDSAEWEQPVRRRRSRLPRHSDSGSDSKHDATASSSSAAATVRAMSSVGIQTISDCSVQTEPDQLPRVSPAIHITAATDPKVEIVRYISAPEKTGRGESLACQTEPDGQAQGVAGPQLVGPTAISPYLPGIQIVTPGPLGRFEKKKPDPLEIGYQAHLPPESLSQLVSRQPPKSPQVLYSPVSPLSPHRLLDTSFASSERLNKAHVSPQKHFTADSALRQQTLPRPMKTLQRSLSDPKPLSPTAEESAKERFSLYQHQGGLGSQVSALPPNSLVRKVKRTLPSPPPEEAHLPLAGQASPQLYAASLLQRGLTGPTTVPATKASLLRELDRDLRLVEHESTKLRKKQAELDEEEKEIDAKLKYLELGITQRKESLAKDRGGRDYPPLRGLGEHRDYLSDSELNQLRLQGCTTPAGQFVDFPATAAAPATPSGPTAFQQPRFQPPAPQYSAGSGGPTQNGFPAHQAPTYPGPSTYPAPAFPPGASYPAEPGLPNQQAFRPTGHYAGQTPMPTTQSTLFPVPADSRAPLQKPRQTSLADLEQKVPTNYEVIASPVVPMSSAPSETSYSGPAVSSGYEQGKVPEVPRAGDRGSVSQSPAPTYPSDSHYTSLEQNVPRNYVMIDDISELTKDSTSTAPDSQRLEPLGPGSSGRPGKEPGEPGVLDGPTLPCCYARGEEESEEDSYDPRGKGGHLRSMESNGRPASTHYYGDSDYRHGARVEKYGPGPMGPKHPSKSLAPAAISSKRSKHRKQGMEQKISKFSPIEEAKDVESDLASYPPPAVSSSLVSRGRKFQDEITYGLKKNVYEQQKYYGMSSRDAVEDDRIYGGSSRSRAPSAYSGEKLSSHDFSGWGKGYEREREAVERLQKAGPKPSSLSMAHSRVRPPMRSQASEEESPVSPLGRPRPAGGPLPPGGDTCPQFCSSHSMPDVQEHVKDGPRAHAYKREEGYILDDSHCVVSDSEAYHLGQEETDWFDKPRDARSDRFRHHGGHAVSSSSQKRGPARHSYHDYDEPPEEGLWPHDEGGPGRHASAKEHRHGDHGRHSGRHTGEEPGRRAAKPHARDLGRHEARPHSQPSSAPAMPKKGQPGYPSSAEYSQPSRASSAYHHASDSKKGSRQAHSGPAALQSKAEPQAQPQLQGRQAAPGPQQSQSPSSRQIPSGAASRQPQTQQQQQGLGLQPPQQALTQARLQQQSQPTTRGSAPAASQPAGKPQPGPSTATGPQPAGPPRAEQTNGSKGTAKAPQQGRAPQAQPTPGPGPAGVKAGARPGGTPGAPAGQPGADGESVFSKILPGGAAEQAGKLTEAVSAFGKKFSSFW

SEQ ID NO: 908087 - protein, 3705 aa, Homo sapiens; identical to SEQ ID NO: 908082

SEQ ID NO: 908088 - protein, 2542 aa, Homo sapiens
MQRALGMDMTTAPRSKSQQQLHSPALSPAHSPAKQPLGKPDQERSRGPGGPQPGSRQAETARATSVPGPAQAAAPPEVGRVSPQPPQPTKPSTAEPRPPAGEAPAKSATAVPAGLGATEQTQEGLTGKLFGLGASLLTQASTLMSVQPEADTQGQPAPSKGTPKIVFNDASKEAGPKPLGSGPGPGPAPGAKTEPGARMGPGSGPGALPKTGGTTSPKHGRAEHQAASKAAAKPKTMPKERAICPLCQAELNVGSKSPANYNTCTTCRLQVCNLCGFNPTPHLVEKTEWLCLNCQTKRLLEGSLGEPTPLPPPTSQQPPVGAPHRASGTSPLKQKGPQGLGQPSGPLPAKASPLSTKASPLPSKASPQAKPLRASEPSKTPSSVQEKKTRVPTKAEPMPKPPPETTPTPATPKVKSGVRRAEPATPVVKAVPEAPKGGEAEDLVGKPYSQDASRSPQSLSDTGYSSDGISSSQSEITGVVQQEVEQLDSAGVTGPHPPSPSEIHKVGSSMRPLLQAQGLAPSERSKPLSSGTGEEQKQRPHSLSITPEAFDSDEELEDILEEDEDSAEWRRRREQQDTAESSDDFGSQLRHDYVEDSSEGGLSPLPPQPPARAAELTDEDFMRRQILEMSAEEDNLEEDDTATSGRGLAKHGTQKGGPRPRPEPSQEPAALPKRRLPHNATTGYEELLPEGGSAEATDGSGTLQGGLRRFKTIELNSTGSYGHELDLGQGPDPSLDREPELEMESLTGSPEDRSRGEHSSTLPASTPSYTSGTSPTSLSSLEEDSDSSPSRRQRLEEAKQQRKARHRSHGPLLPTIEDSSEEEELREEEELLREQEKMREVEQQRIRSTARKTRRDKEELRAQRRRERSKTPPSNLSPIEDASPTEELRQAAEMEELHRSSCSEYSPSPSLDSEAEALDGGPSRLYKSGSEYNLPTFMSLYSPTETPSGSSTTPSSGRPLKSAEEAYEEMMRKAELLQRQQGQAAGARGPHGGPSQPTGPRGLGSFEYQDTTDREYGQAAQPAAEGTPASLGAAVYEEILQTSQSIVRMRQASSRDLAFAEDKKKEKQFLNAESAYMDPMKQNGGPLTPGTSPTQLAAPVSFSTPTSSDSSGGRVIPDVRVTQHFAKETQDPLKLHSSPASPSSASKEIGMPFSQGPGTPATTAVAPCPAGLPRGYMTPASPAGSERSPSPSSTAHSYGHSPTTANYGSQTEDLPQAPSGLAAAGRAAREKPLSASDGEGGTPQPSRAYSYFASSSPPLSPSSPSESPTFSPGKMGPRATAEFSTQTPSPAPASDMPRSPGAPTPSPMVAQGTQTPHRPSTPRLVWQESSQEAPFMVITLASDASSQTRMVHASASTSPLCSPTETQPTTHGYSQTTPPSVSQLPPEPPGPPGFPRVPSAGADGPLALYGWGALPAENISLCRISSVPGTSRVEPGPRTPGTAVVDLRTAVKPTPIILTDQGMDLTSLAVEARKYGLALDPIPGRQSTAVQPLVINLNAQEHTFLATATTVSITMASSVFMAQQKQPVVYGDPYQSRLDFGQGGGSPVCLAQVKQVEQAVQTAPYRSGPRGRPREAKFARYNLPNQVAPLARRDVLITQMGTAQSIGLKPGPVPEPGAEPHRATPAELRSHALPGARKPHTVVVQMGEGTAGTVTTLLPEEPAGALDLTGMRPESQLACCDMVYKLPFGSSCTGTFHPAPSVPEKSMADAAPPGQSSSPFYGPRDPEPPEPPTYRAQGVVGPGPHEEQRPYPQGLPGRLYSSMSDTNLAEAGLNYHAQRIGQLFQGPGRDSAMDLSSLKHSYSLGFADGRYLGQGLQYGSVTDLRHPTDLLAHPLPMRRYSSVSNIYSDHRYGPRGDAVGFQEASLAQYSATTAREISRMCAALNSMDQYGGRHGSGGGGPDLVQYQPQHGPGLSAPQSLVPLRPGLLGNPTFPEGHPSPGNLAQYGPAAGQGTAVRQLLPSTATVRAADGMIYSTINTPIAATLPITTQPASVLRPMVRGGMYRPYASGGITAVPLTSLTRVPMIAPRVPLGPTGLYRYPAPSRFPIASSVPPAEGPVYLGKPAAAKAPGAGGPSRPEMPVGAAREEPLPTTTPAAIKEAAGAPAPAPLAGQKPPADAAPGGGSGALSRPGFEKEEASQEERQRKQQEQLLQLERERVELEKLRQLRLQEELERERVELQRHREEEQLLVQRELQELQTIKHHVLQQQQEERQAQFALQREQLAQQRLQLEQIQQLQQQLQQQLEEQKQRQKAPFPAACEAPGRGPPLAAAELAQNGQYWPPLTHAAFIAMAGPEGLGQPREPVLHRGLPSSASDMSLQTEEQWEASRSGIKKRHSMPRLRDACELESGTEPCVVRRIADSSVQTDDEDGESRYLLSRRRRARRSADCSVQTDDEDSAEWEQPVRRRRSRLPRHSDSGSDSKHDATASSSSAAATVRAMSSVGIQTISDCSVQTEPDQLPRVSPAIHITAATDPKVEIVRYISAPEKTGRGESLACQTEPDGQAQGVAGPQLVGPTAISPYLPGIQIVTPGPLGRLPVPLK

SEQ ID NO: 908089 - protein, 125 aa, Homo sapiens
MGSQCLLFTLLQDLVGKPYSQDASRSPQSLSDTGYSSDGISSSQSEITGVVQQEVEQLDSAGVTGPHPPSPSEIHKVGSSMRPLLQAQGLAPSERSKPLSSGTGEEQKQRPHSLSITPEAFDSDE

SEQ ID NO: 908090 - protein, 328 aa, Homo sapiens
INDLQKDIEGSRKRESELLLFTERLTSKNAQLQSESNSLQSQFDKVSCSESQLQSQCEQMKQTNINLESRLLKEEELRKEEVQTLQAELACRQTEVKALSTQVEELKDELVTQRRKHASSIKDLTKQLQQARRKLDQVESGSYDKEVSSMGSRSSSSGSLNARSSAEDRSPENTGSSVAVDNFPQVDKAMLIERIVRLQKAHARKNEKIEFMEDHIKQLVEEIRKKTKIIQSYILREESGTLSSEASDFNKVHLSRRGGIMASLYTSHPADNGLTLELSLEINRKLQAVLEDTLLKNITLKENLQTLGTEIERLIKHQHELEQRTKKT

SEQ ID NO: 908091 - protein, 137 aa, Homo sapiens
INDLQKDIEGSRKRESELLLFTERLTSKNAQLQSESNSLQSQFDKVSCSESQLQSQCEQMKQTNINLESRLLKEEELRKEEVQTLQAELACRQTEVKALSTQVEELKDELVTQRRKHASSIKDLTKQLQQGIKFFHT

SEQ ID NO: 908092 - protein, 144 aa, Homo sapiens
INDLQKDIEGSRKRESELLLFTERLTSKNAQLQSESNSLQSQFDKVSCSESQLQSQCEQMKQTNINLESRLLKEEELRKEEVQTLQAELACRQTEVKALSTQVEELKDELVTQRRKHASSIKDLTKQLQQGYRHLGCRYPRCVL

SEQ ID NO: 908093 - protein, 260 aa, Homo sapiens
MGKEKTHINIVVIGHVDSGKSTTTGHLIYKCGGIDKRTIEKFEKEAAEMGKGSFKYAWVLDKLKAPASPGCLQNWWYWYCSCWPSGDWCSQTRYGGHLCSSQRYNADMLTHNKHRPLVKMHHEALSEALSLGGNPQTILGFWGGGGPPFFFSPHNTNKTFFVGGAPISFPARQNTKHTTVRAVRPNTTPHPQPPRLSCCWWGRGHHIIIGGGPAPRLLLLPPPAPLTSLLAGGGHHILRLSPPPLSRTNPCTHDTRVSLM

SEQ ID NO: 908094 - protein, 373 aa, Homo sapiens
MGKEKTHINIVVIGHVDSGKSTTTGHLIYKCGGIDKRTIEKFEKEAAEMGKGSFKYAWVLDKLKAERERGITIDISLWKFETSKYYVTIIDAPGHRDFIKNMITGTSQADCAVLIVAAGVGEFEAGISKNGQTREHALLAYTLGVKQLIVGVNKMDSTEPPYSQKRYEEIVKEVSTYIKKIGYNPDTVAFVPISGWNGDNMLEPSANMPWFKGWKVTRKDGNASGTTLLEALDCILPPTRPTDKPLRLPLQDVYKIGGIGTVPVGRVETGVLKPGMVVTFAPVNVTTEVKSVEMHHEALSEALPGDNVGFNVKNVSVKDVRRGNVAGDSKNDPPMEAAGFTAQVIILNHPGQISAGYAPVLGLPHGSHCMQVC

SEQ ID NO: 908095 - protein, 370 aa, Homo sapiens
CRCDCERIPSKTQAYLKEPFPGHLIYKCGGIDKRTIEKFEKEAAEMGKGSFKYAWVLDKLKAERERGITIDISLWKFETSKYYVTIIDAPGHRDFIKNMITGTSQADCAVLIVAAGVGEFEAGISKNGQTREHALLAYTLGVKQLIVGVNKMDSTEPPYSQKRYEEIVKEVSTYIKKIGYNPDTVAFVPISGWNGDNMLEPSANMPWFKGWKVTRKDGNASGTTLLEALDCILPPTRPTDKPLRLPLQDVYKIGGIGTVPVGRVETGVLKPGMVVTFAPVNVTTEVKSVEMHHEALSEALPGDNVGFNVKNVSVKDVRRGNVAGDSKNDPPMEAAGFTAQVIILNHPGQISAGYAPVLGLPHGSHCMQVC

SEQ ID NO: 908096 - protein, 373 aa, Homo sapiens; identical to SEQ ID NO: 908094

SEQ ID NO: 908097 - protein, 373 aa, Homo sapiens; identical to SEQ ID NO: 908094

SEQ ID NO: 908098 - protein, 373 aa, Homo sapiens; identical to SEQ ID NO: 908094

SEQ ID NO: 908099 - protein, 355 aa, Homo sapiens
MGKEKTHINIVVIGHVDSGKSTTTGHLIYKCGGIDKRTIEKFEKEAAEMGKGSFKYAWVLDKLKAERERGITIDISLWKFETSKYYVTIIDAPGHRDFIKNMITGTSQADCAVLIVAAGVGEFEAGISKNGQTREHALLAYTLGVKQLIVGVNKMDSTEPPYSQKRYEEIVKEVSTYIKGDNMLEPSANMPWFKGWKVTRKDGNASGTTLLEALDCILPPTRPTDKPLRLPLQDVYKIGGIGTVPVGRVETGVLKPGMVVTFAPVNVTTEVKSVEMHHEALSEALPGDNVGFNVKNVSVKDVRRGNVAGDSKNDPPMEAAGFTAQVIILNHPGQISAGYAPVLGLPHGSHCMQVC

SEQ ID NO: 908100 - protein, 315 aa, Homo sapiens
MGKEKTHINIVVIGHVDSGKSTTTGHLIYKCGGIDKRTIEKFEKEAAEMGKGSFKYAWVLDKLKAERERGITIDISLWKFETSKYYVTIIDAPGHRDFIKNMITGTSQADCAVLIVAAGVGEFEAGISKNGQTREHALLAYTLGVKQLIVGVNKMDSTEPPYSQKRYEEIVKEVSTYIKKIGYNPDTVAFVPISGWNGDNMLEPSANMPWFKGWKVTRKDGNASGTTLLEALDCILPPTRPTDKPLRLPLQDVYKIGGIGTVPVGRVETGVLKPGMVVTFAPVNVTTEVKSVEMHHEALSEALPGDNVGFNVKNV

SEQ ID NO: 908101 - protein, 362 aa, Homo sapiens
MGKEKTHINIVVIGHVDSGKSTTTGHLIYKCGGIDKRTIEKFEKEAAEMGKGSFKYAWVLDKLKAERERGITIDISLWKFETSKYYVTIIDAPGHRDFIKNMITGTSQADCAVLIVAAGVGEFEAGISKNGQTREHALLAYTLGVKQLIVGVNKMDSTEPPYSQKRYEEIVKEVSTYIKKIGYNPDTVAFVPISGWNGDNMLEPSANMPWFKGWKVTRKDGNASGTTLLEALDCILPPTRPTDKPLGIGTVPVGRVETGVLKPGMVVTFAPVNVTTEVKSVEMHHEALSEALPGDNVGFNVKNVSVKDVRRGNVAGDSKNDPPMEAAGFTAQVIILNHPGQISAGYAPVLGLPHGSHCMQVC

SEQ ID NO: 908102 - protein, 367 aa, Homo sapiens
MGKEKTHINIVVIGHVDSGKSTTTGHLIYKCGGIDKRTIEKFEKEAAEMGKGSFKYAWVLDKLKAERERGITIDISLWKFETSKYYVTIIDAPGHRDFIKNMITGTSQADCAVLIVAAGVGEFEAGISKNGQTREHALLAYTLGVKQLIVGVNKMDSTEPPYSQKRYEEIVKEVSTYIKKIGYNPDTVAFVPISGWNGDNMLEPSANMPWFKGWKVTRKDGNASGTTLLEALDCILPPTRPTDKPLRLPLQDVYKIGGIGTVPVGRVETGVLKPGMVVTFAPVNVTTEVKSVEMHHEALSEALPGDNVGFNVKNVSVKDVRRGNVAGDSKNDPPMEAAGFTAQVIILNHPGQISAGYAPVLGARVNA

SEQ ID NO: 908103 - protein, 161 aa, Homo sapiens
AFSQRVCRQNTGVVKTTPKSQNGKGKDSYQHCRHWTRRFGQVHHYGIGTVPVGRVETGVLKPGMVVTFAPVNVTTEVKSVEMHHEALSEALPGDNVGFNVKNVSVKDVRRGNVAGDSKNDPPMEAAGFTAQVIILNHPGQISAGYAPVLGLPHGSHCMQVC

SEQ ID NO: 908104 - protein, 292 aa, Homo sapiens
  misc_feature (258)..(259): Xaa can be any naturally occurring amino acid
MGKEKTHINIVVIGHVDSGKSTTTGHLIYKCGGIDKRTIEKFEKEAAEMGKGSFKYAWVLDKLKAERERGITIDISLWKFETSKYYVTIIDAPGHRDFIKNMITGTSQADCAVLIVAAGVGEFEAGISKNGQTREHALLAYTLGVKQLIVGVNKMDSTEPPYSQKRYEEIVKEVSTYIKKIGYNPDTVAFVPISGWNGDNMLEPSANMPWFKGWKVTRKDGNASGTTLLEALDCILPPTRPTDKPLRLPLQDVYKIGXXLHPTTNSSNSNKRRLCPCIGIATRLTLHASLLS

SEQ ID NO: 908105 - protein, 368 aa, Homo sapiens
MGKEKTHINIVVIGHVDSGKSTTTGHLIYKCGGIDKRTIEKFEKEAAEMGKGSFKYAWVLDKLKAERERGITIDISLWKFETSKYYVTIIDAPGHRDFIKNMITGTSQADCAVLIVAAGVGEFEAGISKNGQTREHALLAYTLGVKQLIVGVNKMDSTEPPYSQKRYEEIVKEVSTYIKKIGYNPDTVAFVPISGWNGDNMLEPSANMPWFKGWKVTRKDGNASGTTLLEALDCILPPTRPTDKPLRLPLQDVYKIGGIGTVPVGRVETGVLKPGMVVTFAPVNVTTEVKSVEMHHEALSEALPGDNVGFNVKNVSVKDVRRGNVAGDSKNDPPMEAAGFTAQVIILNHPGRCWSWQGHQVCPESSEG

SEQ ID NO: 908106 - protein, 155 aa, Homo sapiens
MGKEKTHINIVVIGHVDSGKSTTTGHLIYKCGGIDKRTIEKFEKEAAEMGKGSFKYAWVLDKLKAERERGITIDISLWKFETSKYYVTIIDAPGHRDFIKNMITGTSQADCAVLIVAAGVGEFEAGISKNGQTREHALQCQECVCQGCSSWQRCW

SEQ ID NO: 908107 - protein, 154 aa, Homo sapiens
MGKEKTHINIVVIGHVDSGKSTTTGHLIYKCGGIDKRTIEKFEKEAAEMGKGSFKYAWVLDKLKAERERGITIDISLWKFETSKYYVTIIDAPGHRDFIKNMITGTSQADCAVLIVAAGVGEFEAGISKNGQTREHALLAVGWLSGIHLCDTDH

SEQ ID NO: 908108 - protein, 325 aa, Homo sapiens
MGKGSFKYAWVLDKLKAERERGITIDISLWKFETSKYYVTIIDAPGHRDFIKNMITGTSQADCAVLIVAAGVGEFEAGISKNGQTREHALLAYTLGVKQLIVGVNKMDSTEPPYSQKRYEEIVKEVSTYIKKIGYNPDTVAFVPISGWNGDNMLEPSANMPWFKGWKVTRKDGNASGTTLLEALDCILPPTRPTDKPLRLPLQDVYKIGGIGTVPVGRVETGVLKPGMVVTFAPVNVTTEVKSVEMHHEALSEALPGDNVGFNVKNVSVKDVRRGNVAGDSKNDPPMEAAGFTAQVIILNHPGQISAGYAPVLGLPHGSHCMQVC

SEQ ID NO: 908109 - protein, 373 aa, Homo sapiens; identical to SEQ ID NO: 908094

SEQ ID NO: 908110 - protein, 373 aa, Homo sapiens; identical to SEQ ID NO: 908094

SEQ ID NO: 908111 - protein, 373 aa, Homo sapiens; identical to SEQ ID NO: 908094

SEQ ID NO: 908112 - protein, 376 aa, Homo sapiens
MGKEKTHINIVVIGHVDSGKSTTTGHLIYKCGGIDKRTIEKFEKEAAEMGKGSFKYAWVLDKLKAERERGITIDISLWKFETSKYYVTIIDAPGHRDFIKNMITGTSQADCAVLIVAAGVGEFEAGISKNGQTREHALLAYTLGVKQLIVGVNKMDSTEPPYSQKRYEEIVKEVSTYIKKIGYNPDTVAFVPISGWNGDNMLEPSANMPWFKGWKVTRKDGNASGTTLLEALDCILPPTRPTDKPLRLPLQDVYKIGGIGTVPVGRVETGVLKPGMVVTFAPVNVTTEVKSVEMHHEALSEALPGDNVGFNVKNVSVKDVRRGNVAGDSKNDPPMEAAGFTAQVIILNHPGQISAGYAPVLGLPHGSHCMQVLAGA

SEQ ID NO: 908113 - protein, 364 aa, Homo sapiens
MGKEKTHINIVVIGHVDSGKSTTTGHLIYKCGGIDKRTIEKFEKEAAEMGKGSFKYAWVLDKLKAERERGITIDISLWKFETSKYYVTIIDAPGHRDFIKNMITGTSQADCAVLIVAAGVGEFEAGISKNGQTREHALLAYTLGVKQLIVGVNKMDSTEPPYSQKRYEEIVKEVSTYIKKIGYNPDTVAFVPISGWNGDNMLEPSANMPWFKGWKVTRKDGNASGTTLLEALDCILPPTRPTDKPLRLPLQDVYKIGGIGTVPVGRVETGVLKPGMVVTFAPVNVTTEVKSVEMHHEALSEALPGDNVGFNVKNVSVKDVRRGNVAGDSKNDPPMEAAGFTAQVIILNHPGLATRLTLHASLLS

SEQ ID NO: 908114 - protein, 354 aa, Homo sapiens
MGKEKTHINIVVIGHVDSGKSTTTGHLIYKCGGIDKRTIEKFEKEAAEMGKGSFKYAWVLDKLKAERERGITIDISLWKFETSKYYVTIIDAPGHRDFIKNMITGTSQADCAVLIVAAGVGEFEAGISKNGQTREHALLAYTLGVKQLIVGVNKMDSTEPPYSQKRYEEIVKEVSTYIKKIGYNPDTVAFVPISGWNGDNMLEPSANMPWFKGWKVTRKDGNASGTTLLEALDCILPPTRPTDKPLRLPLQDVYKIGVVTFAPVNVTTEVKSVEMHHEALSEALPGDNVGFNVKNVSVKDVRRGNVAGDSKNDPPMEAAGFTAQVIILNHPGQISAGYAPVLGLPHGSHCMQVC

SEQ ID NO: 908115 - protein, 243 aa, Homo sapiens
MGKEKTHINIVVIGHVDSGKSTTTGHLIYKCGGIDKRTIEKFEKEAAEMGKGSFKYAWVLDKLKAERERGITIDISLWKFETSKYYVTIIDAPGHRDFIKNMITGTSQADCAVLIVAAGVGEFEAGISKNGQTREHALLAYTLGVKQLIVGVNKMDSTEPPYSQKRYEEIVKEVSTYIKKIGYNPDTVAFVPISGWNGDNMLEPSANMPWFKGWKVTRKDGNASGHLCSSQRYNGSKICRNAP

SEQ ID NO: 908116 - protein, 155 aa, Homo sapiens; identical to SEQ ID NO: 908106

SEQ ID NO: 908117 - protein, 369 aa, Homo sapiens
MGKEKTHINIVVIGHVDSGKSTTTGHLIYKCGGIDKRTIEKFEKEAAEMGKGSFKYAWVLDKLKAERERGITIDISLWKFETSKYYVTIIDAPGHRDFIKNMITGTSQADCAVLIVAAGVGEFEAGISKNGQTREHALLAYTLGVKQLIVGVNKMDSTEPPYSQKRYEEIVKEVSTYIKKIGYNPDTVAFVPISGWNGDNMLEPSANMPWFKGWKVTRKDGNASGTTLLEALDCILPPTRPTDKPLRLPLQDVYKIGGIGTVPVGRVETGVLKPGMVVTFAPVNVTTCSRLHTSATLPELVPLLGGVRAFLRVLYFQGTWWGCVSQRQKLFPSHTLGLTVLHLTHSVDCSLLRPSKRPWVFLFNDCIAS

SEQ ID NO: 908118 - protein, 1430 aa, Homo sapiens
MTVFRQENVDDYYDTGEELGSGQFAVVKKCREKSTGLQYAAKFIKKRRTKSSRRGVSREDIEREVSILKEIQHPNVITLHEVYENKTDVILILELVAGGELFDFLAEKESLTEEEATEFLKQILNGVYYLHSLQIAHFDLKPENIMLLDRNVPKPRIKIIDFGLAHKIDFGNEFKNIFGTPEFVAPEIVNYEPLGLEADMWSIGVITYILLSGASPFLGDTKQETLANVSAVNYEFEDEYFSNTSALAKDFIRRLLVKDPKKRMTIQDSLQHPWIKPKDTQQALSRKASAVNMEKFKKFAARKKWKQSVRLISLCQRLSRSFLSRSNMSVARSDDTLDEEDSFVMKAIIHAINDDNVPGLQHLLGSLSNYDVNQPNKHGTPPLLIAAGCGNIQILQLLIKRGSRIDVQDKGGSNAVYWAARHGHVDTLKFLSENKCPLDVKDKSGEMALHVAARYGHADVAQLLCSFGSNPNIQDKEEETPLHCAAWHGYYSVAKALCEAGCNVNIKNREGETPLLTASARGYHDIVECLAEHGADLNACDKDGHIALHLAVRRCQMEVIKTLLSQGCFVDYQDRHGNTPLHVACKDGNMPIVVALCEANCNLDISNKYGRTPLHLAANNGILDVVRYLCLMGASVEALTTDGKTAEDLARSEQHEHVAGLLARLRKDTHRGLFIQQLRPTQNLQPRIKLKLFGHSGSGKTTLVESLKCGLLRSFFRRRRPRLSSTNSSRFPPSPLASKPTVSVSINNLYPGCENVSVRSRSMMFEPGLTKGMLEVFVAPTHHPHCSADDQSTKAIDIQNAYLNGVGDFSVWEFSGNPVYFCCYDYFAANDPTSIHVVVFSLEEPYEIQLNQVIFWLSFLKSLVPVEEPIAFGGKLKNPLQVVLVATHADIMNVPRPAGGEFGYDKDTSLLKEIRNRFGNDLHISNKLFVLDAGASGSKDMKVLRNHLQEIRSQIVSVCPPMTHLCEKIISTLPSWRKLNGPNQLMSLQQFVYDVQDQLNPLASEEDLRRIAQQLHSTGEINIMQSETVQDVLLLDPRWLCTNVLGKLLSVETPRALHHYRGRYTVEDIQRLVPDSDVEELLQILDAMDICARDLSSGTMVDVPALIKTDNLHRSWADEEDEVMVYGGVRIVPVEHLTPFPCGIFHKVQVNLCRWIHQQSTEGDADIRLWVNGCKLANRGAELLVLLVNHGQGIEVQVRGLETEKIKCCLLLDSVCSTIENVMATTLPGLLTVKHYLSPQQLREHHEPVMIYQPRDFFRAQTLKETSLTNTMGGYKESFSSIMCFGCHDVYSQASLGMDIHASDLNLLTRRKLSRLLDPPDPLGKDWCLLAMNLGLPDLVAKYNTSNGAPKDFLPSPLHALLREWTTYPESTVGTLMSKLRELGRRDAADFLLKASSVFKINLDGNGQEAYASSCNSGTSYNSISSVVSR

SEQ ID NO: 908119 - protein, 108 aa, Homo sapiens
MALHVAARYGHADVAQLLCSFGSNPNIQDKEEETPLHCAAWHGYYSVAKALCEAGCNVNIKNREGETPLLTASARGYHDIVECLAEHGADLNACDKVPYGGRLICTGK

SEQ ID NO: 908120 - protein, 539 aa, Homo sapiens
MNVPRPAGGEFGYDKDTSLLKEIRNRFGNDLHISNKLFVLDAGASGSKDMKVLRNHLQEIRSQIVSVCPPMTHLCEKIISTLPSWRKLNGPNQLMSLQQFVYDVQDQLNPLASEEDLRRIAQQLHSTGEINIMQSETVQDVLLLDPRWLCTNVLGKLLSVETPRALHHYRGRYTVEDIQRLVPDSDVEELLQILDAMDICARDLSSGTMVDVPALIKTDNLHRSWADEEDEVMVYGGVRIVPVEHLTPFPCGIFHKVQVNLCRWIHQQSTEGDADIRLWVNGCKLANRGAELLVLLVNHGQGIEVQVRGLETEKIKCCLLLDSVCSTIENVMATTLPGLLTVKHYLSPQQLREHHEPVMIYQPRDFFRAQTLKETSLTNTMGGYKESFSSIMCFGCHDVYSQASLGMDIHASDLNLLTRRKLSRLLDPPDPLGKDWCLLAMNLGLPDLVAKYNTSNGAPKDFLPSPLHALLREWTTYPESTVGTLMSKLRELGRRDAADFLLKASSVFKINLDGNGQEAYASSCNSGTSYNSISSVVSR

SEQ ID NO: 908121 - protein, 1430 aa, Homo sapiens; identical to SEQ ID NO: 908118

SEQ ID NO: 908122 - protein, 554 aa, Homo sapiens
MTVFRQENVDDYYDTGEELGSGQFAVVKKCREKSTGLQYAAKFIKKRRTKSSRRGVSREDIEREVSILKEIQHPNVITLHEVYENKTDVILILELVAGGELFDFLAEKESLTEEEATEFLKQILNGVYYLHSLQIAHFDLKPENIMLLDRNVPKPRIKIIDFGLAHKIDFGNEFKNIFGTPEFVAPEIVNYEPLGLEADMWSIGVITYILLSGASPFLGDTKQETLANVSAVNYEFEDEYFSNTSALAKDFIRRLLVKDPKKRMTIQDSLQHPWIKPKDTQQALSRKASAVNMEKFKKFAARKKWKQSVRLISLCQRLSRSFLSRSNMSVARSDDTLDEEDSFVMKAIIHAINDDNVPGLQHLLGSLSNYDVNQPNKHGTPPLLIAAGCGNIQILQLLIKRGSRIDVQDKGGSNAVYWAARHGHVDTLKFLSENKCPLDVKDKSGEMALHVAARYGHADVAQLLCSFGSNPNIQDKEEETPLHCAAWHGYYSVAKALCEAGCNVNIKNREGETPLLTASARGYHDIVECLAEHGADLNACDKVPYGGRLICTGK

SEQ ID NO: 908123 - protein, 429 aa, Homo sapiens
MTVFRQENVDDYYDTGEELGSGQFAVVKKCREKSTGLQYAAKFIKKRRTKSSRRGVSREDIEREVSILKEIQHPNVITLHEVYENKTDVILILELVAGGELFDFLAEKESLTEEEATEFLKQILNGVYYLHSLQIAHFDLKPENIMLLDRNVPKPRIKIIDFGLAHKIDFGNEFKNIFGTPEFVAPEIVNYEPLGLEADMWSIGVITYILLSGASPFLGDTKQETLANVSAVNYEFEDEYFSNTSALAKDFIRRLLVKDPKKRMTIQDSLQHPWIKPKDTQQALSRKASAVNMEKFKKFAARKKWKQSVRLISLCQRLSRSFLSRSNMSVARSDDTLDEEDSFVMKAIIHAINDDNVPGLQHLLGSLSNYDVNQPNKVWFCSAAYWRGGSQRPCPSISKERPHLLLHSPFQLEAPYCGENHFCLESDLS

SEQ ID NO: 908124 - protein, 367 aa, Homo sapiens [sequence omitted]

SEQ ID NO: 908125 - protein, 668 aa, Homo sapiens [sequence omitted]

SEQ ID NO: 908126 - protein, 1430 aa, Homo sapiens; identical to SEQ ID NO: 908118

SEQ ID NO: 908127 - protein, 641 aa, Homo sapiens
MTVFRQENVDDYYDTGEELGSGQFAVVKKCREKSTGLQYAAKFIKKRRTKSSRRGVSREDIEREVSILKEIQHPNVITLHEVYENKTDVILILELVAGGELFDFLAEKESLTEEEATEFLKQILNGVYYLHSLQIAHFDLKPENIMLLDRNVPKPRIKIIDFGLAHKIDFGNEFKNIFGTPEFVAPEIVNYEPLGLEADMWSIGVITYILLSGASPFLGDTKQETLANVSAVNYEFEDEYFSNTSALAKDFIRRLLVKDPKKRMTIQDSLQHPWIKPKDTQQALSRKASAVNMEKFKKFAARKKWKQSVRLISLCQRLSRSFLSRSNMSVARSDDTLDEEDSFVMKAIIHAINDDNVPGLQHLLGSLSNYDVNQPNKHGTPPLLIAAGCGNIQILQLLIKRGSRIDVQDKGGSNAVYWAARHGHVDTLKFLSENKCPLDVKDKSGEMALHVAARYGHADVAQLLCSFGSNPNIQDKEEETPLHCAAWHGYYSVAKALCEAGCNVNIKNREGETPLLTASARGYHDIVECLAEHGADLNACDKDGHIALHLAVRRCQMEVIKTLLSQGCFVDYQDRHGNTPLHVACKDGNMPIVVALCEANCNLDISNKYGRTPLHLAANNGILDVVRYLCLMGASVEALTT

SEQ ID NO: 908128 - protein, 495 aa, Homo sapiens
PSWDIGAARGWEAITYLALRKKTKASMHSFPPLLLLLFWGVVSHSFPATLETQEQDVDLVQKYLEKYYNLKNDGRQVEKRRNSGPVVEKLKQMQEFFGLKVTGKPDAETLKVMKQPRCGVPDVAQFVLTEGNPRWEQTHLTYRIENYTPDLPRADVDHAIEKAFQLWSNVTPLTFTKVSEGQADIMISFVRGDHRDNSPFDGPGGNLAHAFQPGPGIGGDAHFDEDERWTNNFREYNLHRVAAHELGHSLGLSHSTDIGALMYPSYTFSGDVQLAQDDIDGIQAIYGRSQNPVQPIGPQTPKACDSKLTFDAITTIRGEVMFFKDRFYMRTNPFYPEVELNFISVFWPQLPNGLEAAYEFADRDEVRFFKGNKYWAVQGQNVLHGYPKDIYSSFGFPRTVKHIDAALSEENTGKTYFFVANKYWRYDEYKRSMDPGYPKMIAHDFPGIGHKVDAVFMKDGFFYFFHGTRQYKFDPKTKRILTLQKANSWFNCRKN

SEQ ID NO: 908129 - protein, 784 aa, Homo sapiens
MSGGWPGGQACQPAVEMALEDVNSRRDILPDYELKLIHHDSKCDPGQATKYLYELLYNDPIKIILMPGCSSVSTLVAEAARMWNLIVLSYGSSSPALSNRQRFPTFFRTHPSATLHNPTRVKLFEKWGWKKIATIQQTTEVFTSTLDDLEERVKEAGIEITFRQSFFSDPAVPVKNLKRQDARIIVGLFYETEARKVFCEVYKERLFGKKYVWFLIGWYADNWFKIYDPSINCTVDEMTEAVEGHITTEIVMLNPANTRSISNMTSQEFVEKLTKRLKRHPEETGGFQEAPLAYDAIWALALALNKTSGGGGRSGVRLEDFNYNNQTITDQIYRAMNSSSFEGVSGHVVFDASGSRMAWTLIEQLQGGSYKKIGYYDSTKDDLSWSKTDKWIGGSPPADQTLVIKTFRFLSQKLFISVSVLSSLGIVLAVVCLSFNIYNSHVRYIQNSQPNLNNLTAVGCSLALAAVFPLGLDGYHIGRNQFPFVCQARLWLLGLGFSLGYGSMFTKIWWVHTVFTKKEEKKEWRKTLEPWKLYATVGLLVGMDVLTLAIWQIVDPLHRTIETFAKEEPKEDIDVSILPQLEHCSSRKMNTWLGIFYGYKGLLLLLGIFLAYETKSVSTEKINDHRAVGMAIYNVAVLCLITAPVTMILSSQQDAAFAFASLAIVFSSYITLVVLFVPKMRRLITRGEWQSEAQDTMKTGSSTNNNEEEKSRLLEKENRELEKIIAEKEERVSELRHQLQSRQQLRSRRHPPTPPEPSGGLPRGPPEPPDRLSCDGSRVHLLYK

SEQ ID NO: 908130 - protein, 835 aa, Homo sapiens
MRLSMCAGGSARWWGPRSASAWPTAPGQIWTHPAAVPHSERRAVYIGALFPMSGGWPGGQACQPAVEMALEDVNSRRDILPDYELKLIHHDSKCDPGQATKYLYELLYNDPIKIILMPGCSSVSTLVAEAARMWNLIVLSYGSSSPALSNRQRFPTFFRTHPSATLHNPTRVKLFEKWGWKKIATIQQTTEVFTSTLDDLEERVKEAGIEITFRQSFFSDPAVPVKNLKRQDARIIVGLFYETEARKVFCEVYKERLFGKKYVWFLIGWYADNWFKIYDPSINCTVDEMTEAVEGHITTEIVMLNPANTRSISNMTSQEFVEKLTKRLKRHPEETGGFQEAPLAYDAIWALALALNKTSGGGGRSGVRLEDFNYNNQTITDQIYRAMNSSSFEGVSGHVVFDASGSRMAWTLIEQLQGGSYKKIGYYDSTKDDLSWSKTDKWIGGSPPADQTLVIKTFRFLSQKLFISVSVLSSLGIVLAVVCLSFNIYNSHVRYIQNSQPNLNNLTAVGCSLALAAVFPLGLDGYHIGRNQFPFVCQARLWLLGLGFSLGYGSMFTKIWWVHTVFTKKEEKKEWRKTLEPWKLYATVGLLVGMDVLTLAIWQIVDPLHRTIETFAKEEPKEDIDVSILPQLEHCSSRKMNTWLGIFYGYKGLLLLLGIFLAYETKSVSTEKINDHRAVGMAIYNVAVLCLITAPVTMILSSQQDAAFAFASLAIVFSSYITLVVLFVPKMRRLITRGEWQSEAQDTMKTGSSTNNNEEEKSRLLEKENRELEKIIAEKEERVSELRHQLQSRQQLRSRRHPPTPPEPSGGLPRGPPEPPDRLSCDGSRVHLLYK

SEQ ID NO: 908131 - protein, 167 aa, Homo sapiens
MLLLLLLAPLFLRPPGAGGAQTPNATSEGCQIIHPPWEGGIRYRGLTRDQVKAINFLPVDYEIEYVCRGEREVVGPKVRKCLANGSWTDMDTPSRCVRICSKSYLTLENGKVFLTGGDLPALDGARVDFRCDPDFHLVGSSRSICSQGQWSTPKPHCQVNRTLPACS

SEQ ID NO: 908132 - protein, 961 aa, Homo sapiens
MLLLLLLAPLFLRPPGAGGAQTPNATSEGCQIIHPPWEGGIRYRGLTRDQVKAINFLPVDYEIEYVCRGEREVVGPKVRKCLANGSWTDMDTPSRCVRICSKSYLTLENGKVFLTGGDLPALDGARVDFRCDPDFHLVGSSRSICSQGQWSTPKPHCQVNRTPHSERRAVYIGALFPMSGGWPGGQACQPAVEMALEDVNSRRDILPDYELKLIHHDSKCDPGQATKYLYELLYNDPIKIILMPGCSSVSTLVAEAARMWNLIVLSYGSSSPALSNRQRFPTFFRTHPSATLHNPTRVKLFEKWGWKKIATIQQTTEVFTSTLDDLEERVKEAGIEITFRQSFFSDPAVPVKNLKRQDARIIVGLFYETEARKVFCEVYKERLFGKKYVWFLIGWYADNWFKIYDPSINCTVDEMTEAVEGHITTEIVMLNPANTRSISNMTSQEFVEKLTKRLKRHPEETGGFQEAPLAYDAIWALALALNKTSGGGGRSGVRLEDFNYNNQTITDQIYRAMNSSSFEGVSGHVVFDASGSRMAWTLIEQLQGGSYKKIGYYDSTKDDLSWSKTDKWIGGSPPADQTLVIKTFRFLSQKLFISVSVLSSLGIVLAVVCLSFNIYNSHVRYIQNSQPNLNNLTAVGCSLALAAVFPLGLDGYHIGRNQFPFVCQARLWLLGLGFSLGYGSMFTKIWWVHTVFTKKEEKKEWRKTLEPWKLYATVGLLVGMDVLTLAIWQIVDPLHRTIETFAKEEPKEDIDVSILPQLEHCSSRKMNTWLGIFYGYKGLLLLLGIFLAYETKSVSTEKINDHRAVGMAIYNVAVLCLITAPVTMILSSQQDAAFAFASLAIVFSSYITLVVLFVPKMRRLITRGEWQSEAQDTMKTGSSTNNNEEEKSRLLEKENRELEKIIAEKEERVSELRHQLQSRQQLRSRRHPPTPPEPSGGLPRGPPEPPDRLSCDGSRVHLLYK

SEQ ID NO: 908133 - protein, 578 aa, Homo sapiens
MLLLLLLAPLFLRPPGAGGAQTPNATSEGCQIIHPPWEGGIRYRGLTRDQVKAINFLPVDYEIEYVCRGEREVVGPKVRKCLANGSWTDMDTPSRCVRICSKSYLTLENGKVFLTGGDLPALDGARVDFRCDPDFHLVGSSRSICSQGQWSTPKPHCQVNRTPHSERRAVYIGALFPMSGGWPGGQACQPAVEMALEDVNSRRDILPDYELKLIHHDSKCDPGQATKYLYELLYNDPIKIILMPGCSSVSTLVAEAARMWNLIVLSYGSSSPALSNRQRFPTFFRTHPSATLHNPTRVKLFEKWGWKKIATIQQTTEVFTSTLDDLEERVKEAGIEITFRQSFFSDPAVPVKNLKRQDARIIVGLFYETEARKVFCEVYKERLFGKKYVWFLIGWYADNWFKIYDPSINCTVDEMTEAVEGHITTEIVMLNPANTRSISNMTSQEFVEKLTKRLKRHPEETGGFQEAPLAYDAIWALALALNKTSGGGGRSGVRLEDFNYNNQTITDQIYRAMNSSSFEGVSGHVVFDASGSRMAWTLIEQLQGGSYKKIGYYDSTKDDLSWSKTDKWIVISRTHSPT

SEQ ID NO: 908134 - protein, 200 aa, Homo sapiens
AQVLSPAILGIFYGYKGLLLLLGIFLAYETKSVSTEKINDHRAVGMAIYNVAVLCLITAPVTMILSSQQDAAFAFASLAIVFSSYITLVVLFVPKMRRLITRGEWQSEAQDTMKTGSSTNNNEEEKSRLLEKENRELEKIIAEKEERVSELRHQLQSRQQLRSRRHPPTPPEPSGGLPRGPPEPPDRLSCDGSRVHLLYK

SEQ ID NO: 908135 - protein, 138 aa, Homo sapiens [sequence omitted]

SEQ ID NO: 908136 - protein, 578 aa, Homo sapiens; identical to SEQ ID NO: 908133

SEQ ID NO: 908137 - protein, 578 aa, Homo sapiens; identical to SEQ ID NO: 908133

SEQ ID NO: 908138 - protein, 117 aa, Homo sapiens
HRPRPTLPFLPLGSLPFPLSHHSSLYASPTHPLGCQIIHPPWEGGIRYRGLTRDQVKAINFLPVDYEIEYVCRGEREVVGPKVRKCLANGSWTDMDTPSRCGVASEAPPLFKTIPFP

SEQ ID NO: 908139 - protein, 145 aa, Homo sapiens
SCSVLISPFNLFCPLTLRPPPTFFCALPLFPCALPLFPSSPLLHHLLFSYYPNCASSSRKRSVSLNCAINSSLGSSSAPGATHRHPQNPLGACPGDPLSPPTGLAVMGVECICFISEGRVREDRPVGGGKGRGEGQGTQEAGGPH

SEQ ID NO: 908140 - protein, 961 aa, Homo sapiens; identical to SEQ ID NO: 908132

SEQ ID NO: 908141 - protein, 578 aa, Homo sapiens; identical to SEQ ID NO: 908133

SEQ ID NO: 908142 - protein, 961 aa, Homo sapiens; identical to SEQ ID NO: 908132

SEQ ID NO: 908143 - protein, 961 aa, Homo sapiens; identical to SEQ ID NO: 908132

SEQ ID NO: 908144 - protein, 196 aa, Homo sapiens
MNTWLGIFYGYKGLLLLLGIFLAYETKSVSTEKINDHRAVGMAIYNVAVLCLITAPVTMILSSQQDAAFAFASLAIVFSSYITLVVLFVPKMRRLITRGEWQSEAQDTMKTGSSTNNNEEEKSRLLEKENRELEKIIAEKEERVSELRHQLQSRQQLRSRRHPPTPPEPSGGLPRGPPEPPDRLSCDGSRVHLLYK

SEQ ID NO: 908145 - protein, 961 aa, Homo sapiens; identical to SEQ ID NO: 908132

SEQ ID NO: 908146 - protein, 578 aa, Homo sapiens; identical to SEQ ID NO: 908133

SEQ ID NO: 908147 - protein, 138 aa, Homo sapiens
MLLLLLLAPLFLRPPGAGGAQTPNATSEGCQIIHPPWEGGIRYRGLTRDQVKAINFLPVDYEIEYVCRGEREVVGPKVRKCLANGSWTDMDTPSRCGVASEAPPLFKTIPFPAANLALLLASQHFKSSIPKFTNTFIE

SEQ ID NO: 908148 - protein, 134 aa, Homo sapiens
MLLVLLSVVLLALSSAQSTDNDVNYEDFTFTIPDVEDSSQRPDQGPQRPPPEGLLPRPPGDSGNQDDGPQQRPPKPGGHHRHPPPPPFQNQQRPPQRGHRQLSLPRFPSVSLQEASSFFRRDRPARHPQEQPLW

SEQ ID NO: 908149 - protein, 191 aa, Homo sapiens
EVFEAGWCVGYPNLCGWAAGSPQGPGAVPRVYAWGLCAGGGSPGSVGERRSGGSGEQREGSSCCRRIFCLLEPAVSTQEWKFSQKMQHTVKISGDASTKAHRGVKSVITFFLLYAIFSLSFFISVWTSERLEENLIILSQVMGMAYPSCHSCVLILGNKKLRQASLSVLLWLRYMFKDGEPSGHKEFRESS

SEQ ID NO: 908150 - protein, 158 aa, Homo sapiens
MVLLWVLLLVLLGEFVVLLGEFVVMLLVLLSVVLLALSSAQSTDNDVNYEDFTFTIPDVEDSSQRPDQGPQRPPPEGLLPRPPGDSGNQDDGPQQRPPKPGGHHRHPPPPPFQNQQRPPQRGHRQLSLPRFPSVSLQEASSFFRRDRPARHPQEQPLW

SEQ ID NO: 908151 - protein, 166 aa, Homo sapiens
MLLILLSVALLAFSSAQDLNEDVSQEDVPLVISDGGDSEQFIDEERQGPPLGGQQSQPSAGDGNQNDGPQQGPPQQGGQQQQGPPPPQGKPQGPPQQGGHPPPPQGRPQGPPQQGGHPRPPRGRPQGPPQQGGHQQGPPPPPPGKPQGPPPQGGRPQGPPQGQSPQ

SEQ ID NO: 908152 - protein, 185 aa, Homo sapiens
MLLILLSVALLAFSSAQDLNEDVSQEDVPLVISDGGDSEQFIDEERQGPPLGGQQSQPSAGDGNQNDGPQQGPPQQGGQQQQGPPPPQGKPQGPPQQGGHPPPPQGRPQGPPQQGGHPRPPRGRPQGPPQQGGHQQGPPPHQQRPPQRGHRQLSLPRFPSVSLQEASSFFRRDRPARHPQEQPLW

SEQ ID NO: 908153 - protein, 147 aa, Homo sapiens [sequence omitted]

SEQ ID NO: 908154 - protein, 108 aa, Homo sapiens
LSINYSHNVEDSSQRPDQGPQRPPPEGLLPRPPGDSGNQDDGPQQRPPKPGGHHRHPPPPPFQNQQRPPQRGHRQLSLPRFPSVSLQEASSFFRRDRPARHPQEQPLW

SEQ ID NO: 908155 - protein, 125 aa, Homo sapiens
MVLLWVLLLVLLGEFVVLLGEFVVMLLVLLSVVLLALSSAQSTDNDVNYEDFTFTIPDVEDSSQRPDQGPQRPPPEGLLPRPPGDSGNQDDGPQQRPPKPGGHHRHPPPPPFQTASSQPPVLQRP

SEQ ID NO: 908156 - protein, 182 aa, Homo sapiens
REIGRGVDEYGRVRCSDRVGSSNLNPLLVMGTRMMALSRDHPNKEASSNKVHHLLRESHKDHPNKEASSNKVHHLLRESHKDHPNREAIPLLLKEGHKDHPNREAIPVLLEEGHKDHPNREAISKVLPHISNDHPNEDTVNSLYPDFLLSACRKHHHSSGGTDQQDIPRSNHSGNLEFSGRK

SEQ ID NO: 908157 - protein, 184 aa, Homo sapiens
REIGRGVDEYGRVRCSDRVGSSNLNPLLVMGTRMMALSRDHPNKEASSNKVHHLLRESHKDHPNKEASSNKVHHLLRESHKDHPNREAIPLLLKEGHKDHPNREAIPVLLEEGHKDHPNREAISKVLPHLLLESPRDHLPKGAAHKDLHRGSLLSNLGFNDRYDSSLLSIKGSNCYSSPTSLCQ

SEQ ID NO: 908158 - protein, 317 aa, Homo sapiens
MGGVIKSIFTFVLIVEFIIGNLGNSFIALVNCIDWVKGRKISSVDRILTALAISRISLVWLIFGSWCVSVFFPALFATEKMFRMLTNIWTVINHFSVWLATGLGTFYFLKIANFSNSIFLYLKWRVKKVVLVLLLVTSVFLFLNIALINIHINASINGYRRNKTCSSDSSNFTRFSSLIVLTSTVFIFIPFTLSLAMFLLLIFSMWKHRKKMQHTVKISGDASTKAHRGVKSVITFFLLYAIFSLSFFISVWTSERLEENLIILSQVMGMAYPSCHSCVLILGNKKLRQASLSVLLWLRYMFKDGEPSGHKEFRESS

SEQ ID NO: 908159 - protein, 141 aa, Homo sapiens
GAVNTGWMLLVLLSVVLLALSSAQSTDNDVNYEDFTFTIPDVEDSSQRPDQGPQRPPPEGLLPRPPGDSGNQDDGPQQRPPKPGGHHRHPPPPPFQNQQRPPQRGHRQLSLPRFPSVSLQEASSFFRRDRPARHPQEQPLW

SEQ ID NO: 908160 - protein, 166 aa, Homo sapiens; identical to SEQ ID NO: 908151

SEQ ID NO: 908161 - protein, 166 aa, Homo sapiens; identical to SEQ ID NO: 908151

SEQ ID NO: 908162 - protein, 121 aa, Homo sapiens
APWYRWSLLRTIILVPLSPYHVEDSSQRPDQGPQRPPPEGLLPRPPGDSGNQDDGPQQRPPKPGGHHRHPPPPPFQNQQRPPQRGHRQLSLPRFPSVSLQEASSFFRRDRPARHPQEQPLW

SEQ ID NO: 908163 - protein, 132 aa, Homo sapiens
MGTRMMALSRDHPNKEASSNKVHHLLRESHKDHPNREAIPLLLKEGHKDHPNREAIPVLLEEGHKDHPNREAISKVLPHISNDHPNEDTVNSLYPDFLLSACRKHHHSSGGTDQQDIPRSNHSGNLEFSGRK

SEQ ID NO: 908164 - protein, 132 aa, Homo sapiens
MRSVRDHLWEDSNLNPLLVMGTRMMALSRDHPNKEASSNKVHHLLRESHKDHPNREAIPLLLKEGHKDHPNREAIPVLLEEGHKDHPNREAISKVLPHLLLESPRDHLPKGAAHKDLHRGSLLSNLGFNDRK

SEQ ID NO: 908165 - protein, 274 aa, Homo sapiens
ACAGRAGARALPPRPHPDPEGATMAAPPQPVTHLIFDMDGLLLGYTGSIVAAASGESSRGLQSRWTDTERLYSVVFQEICNRYDKKYSWDVKSLVMGKKALEAAQIIIDVLQLPMSKEELVEESQTKLKEVFPTAALMPGAEKLIIHLRKHGIPFALATSSGSASFDMKTSRHKEFFSLFSHIVLGDDPEVQHGKPDPDIFLACAKRFSPPPAMEKCLVFEDAPNGVEAALAAGMQVVMVPDGNLSRDLTTKATLVLNSLQDFQPELFGLPSYE

SEQ ID NO: 908166 - protein, 251 aa, Homo sapiens
ACAGRAGARALPPRPHPDPEGATMAAPPQPVTHLIFDMDGLLLDTERLYSVVFQEICNRYDKKYSWDVKSLVMGKKALEAAQIIIDVLQLPMSKEELVEESQTKLKEVFPTAALMPGAEKLIIHLRKHGIPFALATSSGSASFDMKTSRHKEFFSLFSHIVLGDDPEVQHGKPDPDIFLACAKRFSPPPAMEKCLVFEDAPNGVEAALAAGMQVVMVPDGNLSRDLTTKATLVLNSLQDFQPELFGLPSYE

SEQ ID NO: 908167 - protein, 131 aa, Homo sapiens
ACAGRAGARALPPRPHPDPEGATMAAPPQPVTHLIFDMDGLLLDTERLYSVVFQEICNRYDKKYSWDVKSLVMGKKALEAAQIIIDVLQLPMSKEELVEESQTKLKEVFPTAALMPGHQLFTQQQLPACGP

SEQ ID NO: 908168 - protein, 418 aa, Homo sapiens
MEVNPPKQEHLLALKVMRLTKPTLFTNIPVTCEEKDLPGDLFNQLMRDDPSTVNGAEVLMLGEMLTLPQNFGNIFLGETFSSYISVHNDSNQVVKDILVKADLQTSSQRLNLSASNAAVAELKPDCCIDDVIHHEVKEIGTHILVCAVSYTTQAGEKMYFRKFFKFQVLKPLDVKTKFYNAESDLSSVTDEVFLEAQIQNMTTSPMFMEKVSLEPSIMYNVTELNSVSQAGECVSTFGSRAYLQPMDTRQYLYCLKPKNEFAEKAGIIKGVTVIGKLDIVWKTNLGERGRLQTSQLQRMAPGYGDVRLSLEAIPDTVNLEEPFHITCKITNCSSERTMDLVLEMCNTNSIHWCGISGRQLGKLHPSSSLCLALTLLSSVQGLQSISGLRLTDTFLKRTYEYDDIAQVCVVSSAIKVES

SEQ ID NO: 908169 - protein, 418 aa, Homo sapiens; identical to SEQ ID NO: 908168

SEQ ID NO: 908170 - protein, 168 aa, Homo sapiens
MEVNPPKQEHLLALKVMRLTKPTLFTNIPVTCEEKDLPGDLFNQLMRDDPSTVNGAEVLMLGEMLTLPQNFGNIFLGETFSSYISVHNDSNQVVKDILVKADLQTSSQRLNLSASNAAVAELKPDCCIDDVIHHEVKEIGTHILVCAVSYTTQAGEKMYFRKFFKFQD

SEQ ID NO: 908171 - protein, 218 aa, Homo sapiens
MTTSPMFMEKVSLEPSIMYNVTELNSVSQAGECVSTFGSRAYLQPMDTRQYLYCLKPKNEFAEKAGIIKGVTVIGKLDIVWKTNLGERGRLQTSQLQRMAPGYGDVRLSLEAIPDTVNLEEPFHITCKITNCSSERTMDLVLEMCNTNSIHWCGISGRQLGKLHPSSSLCLALTLLSSVQGLQSISGLRLTDTFLKRTYEYDDIAQVCVVSSAIKVES

SEQ ID NO: 908172 - protein, 261 aa, Homo sapiens [sequence omitted]

SEQ ID NO: 908173 - protein, 418 aa, Homo sapiens; identical to SEQ ID NO: 908168

SEQ ID NO: 908174 - protein, 250 aa, Homo sapiens
MTTEVILHYRPCESDPTQLPKIAEKAIQDFPTRPLSRFIPWFPYDGSKLPLRPKRSPPVISEEAAEDVKQYLTISEHDAKSHSYDCTVDLLEFQPSLKKQHLTWSHTLKEQTNSGNLGKQSEKGKQHKRRSWSISLPSNNCTKNVSPLSKKLQDSLKALNLHSLYRARWTIEHTICNSQTLEDIWTKLNQIIRHNELPSCNATIQRHLGQIWVFCDIMYCEYVGSLLKGRLALTGKINLFVHKYGVIFSM

SEQ ID NO: 908175 - protein, 399 aa, Homo sapiens
MEVNPPKQEHLLALKVMRLTKPTLFTNIPVTCEEKDLPGDLFNQLMRDDPSTVNGAEVLMLGEMLTLPQNFGNIFLGETFSSYISVHNDSNQVVKDILVKADLQTSSQRLNLSASNAAVAELKPDCCIDDVIHHEVKEIGTHILVCAVSYTTQAGEKMYFRKFFKFQVLKPLDVKTKFYNAESDLSSVTDEVFLEAQIQNMTTSPMFMEKVSLEPSIMYNVTELNSVSQAGECVSTFGSRAYLQPMDTRQYLYCLKPKNEFAEKAGIIKGVTVIGKLDIVWKTNLGERGRLQTSQLQRMAPGYGDVRLSLEAIPDTVNLEEPFHITYTNSIHWCGISGRQLGKLHPSSSLCLALTLLSSVQGLQSISGLRLTDTFLKRTYEYDDIAQVCVVSSAIKVES

SEQ ID NO: 908176 - protein, 427 aa, Homo sapiens
MEVNPPKQEHLLALKVMRLTKPTLFTNIPVTCEEKDLPGDLFNQLMRDDPSTVNGAEVLMLGEMLTLPQNFGNIFLGETFSSYISVHNDSNQVVKDILVKADLQTSSQRLNLSASNAAVAELKPDCCIDDVIHHEVKEIGTHILVCAVSYTTQAGEKMYFTHHTNFFPFFSKKISGSQTIGMGKPNFTMQRVTSVLWTDEVFLEAQIQNMTTSPMFMEKVSLEPSIMYNVTELNSVSQAGECVSTFGSRAYLQPMDTRQYLYCLKPKNEFAEKAGIIKGVTVIGKLDIVWKTNLGERGRLQTSQLQRMAPGYGDVRLSLEAIPDTVNLEEPFHITCKITNCSSERTMDLVLEMCNTNSIHWCGISGRQLGKLHPSSSLCLALTLLSSVQGLQSISGLRLTDTFLKRTYEYDDIAQVCVVSSAIKVES

SEQ ID NO: 908177 - protein, 418 aa, Homo sapiens; identical to SEQ ID NO: 908168

SEQ ID NO: 908178 - protein, 233 aa, Homo sapiens
MEVNPPKQEHLLALKVMRLTKPTLFTNIPVTCEEKDLPGDLFNQLMRDDPSTVNGAEVLMLGEMLTLPQNFGNIFLGETFSSYISVHNDSNQVVKDILVKADLQTSSQRLNLSASNAAVAELKPDCCIDDVIHHEVKEIGTHILVCAVSYTTQAGEKMYFRKFFKFQVLKPLDVKTKFYNAESDLSSVTDEVFLEAQIQNMTTSPMFMEKVSLEPSIMYNVTELNSVSQAGEW

SEQ ID NO: 908179 - protein, 215 aa, Homo sapiens
VAGKRRPRRLLRDAEGPEETVRLWPAARAAMDAAEVEFLAEKELVTIIPNFSLDKIYLIGGDLGPFNPGLPVEVPLWLAINLKQRQKCRLLPPEWMDVEKLEKMRDHERKEETFTPMPSPYYMELTKLLLNHASDNIPKADEIRTLVKDMWDTRIAKLRVSADSFVRQQEAHAKLDNLTLMEINTSGTFLTQALNHMYKLRTNLQPLESTQSQDF

SEQ ID NO: 908180 - protein, 166 aa, Homo sapiens
VAGKRRPRRLLRDAEGPEETVRLWPAARAAMDAAEVEFLAEKELVTIIPNFSLDKIYLIGGDLGPFNPGLPVEVPLWLAINLKQRQKCRLLPPEWMDVEKLEKMRDHERKEETFTPMPSPYYMELTKLLLNHASDNIPKADEIRTLVKDMWDTRIAKLRVSADSFC

SEQ ID NO: 908181 - protein, 185 aa, Homo sapiens
MDAAEVEFLAEKELVTIIPNFSLDKIYLIGGDLGPFNPGLPVEVPLWLAINLKQRQKCRLLPPEWMDVEKLEKMRDHERKEETFTPMPSPYYMELTKLLLNHASDNIPKADEIRTLVKDMWDTRIAKLRVSADSFVRQQEAHAKLDNLTLMEINTSGTFLTQALNHMYKLRTNLQPLESTQSQDF

SEQ ID NO: 908182 - protein, 215 aa, Homo sapiens; identical to SEQ ID NO: 908179

SEQ ID NO: 908183 - protein, 140 aa, Homo sapiens
YKKQLYRPESPDMSLLSPEWMDVEKLEKMRDHERKEETFTPMPSPYYMELTKLLLNHASDNIPKADEIRTLVKDMWDTRIAKLRVSADSFVRQQEAHAKLDNLTLMEINTSGTFLTQALNHMYKLRTNLQPLESTQSQDF

SEQ ID NO: 908184 - protein, 215 aa, Homo sapiens; identical to SEQ ID NO: 908179

SEQ ID NO: 908185 - protein, 215 aa, Homo sapiens; identical to SEQ ID NO: 908179

SEQ ID NO: 908186 - protein, 215 aa, Homo sapiens; identical to SEQ ID NO: 908179

SEQ ID NO: 908187 - protein, 1063 aa, Homo sapiens
MGSPLEVVTVLYTPHDASHVAGVECPEAALLILGPPRMEPLRHSPGPGGQRLLLPSMLLALLLLLAPSPGHATRVVYKVPEEQPPNTLIGSLAADYGFPDVGHLYKLEVGAPYLRVDGKTGDIFTTETSIDREGLRECQNQLPGDPCILEFEVSITDLVQNGSPRLLEGQIEVQDINDNTPNFASPVITLAIPENTNIGSLFPIPLASDRDAGPNGVASYELQVAEDQEEKQPQLIVMGNLDRERWDSYDLTIKVQDGGSPPRASSALLRVTVLDTNDNAPKFERPSYEAELSENSPIGHSVIQVKANDSDQGANAEIEYTFHQAPEVVRRLLRLDRNTGLITVQGPVDREDLSTLRFSVLAKDRGTNPKSARAQVVVTVKDMNDNAPTIEIRGIGLVTHQDGMANISEDVAEETAVALVQVSDRDEGENAAVTCVVAGDVPFQLRQASETGSDSKKKYFLQTTTPLDYEKVKDYTIEIVAVDSGNPPLSSTNSLKVQVVDVNDNAPVFTQSVTEVAFPENNKPGEVIAEITASDADSGSNAELVYSLEPEPAAKGLFTISPETGEIQVKTSLDREQRESYELKVVAADRGSPSLQGTATVLVNVLDCNDNDPKFMLSGYNFSVMENMPALSPVGMVTVIDGDKGENAQVQLSVEQDNGDFVIQNGTGTILSSLSFDREQQSTYTFQLKAVDGGVPPRSAYVGVTINVLDENDNAPYITAPSNTSHKLLTPQTRLGETVSQVAAEDFDSGVNAELIYSIAGGNPYGLFQIGSHSGAITLEKEIERRHHGLHRLVVKVSDRGKPPRYGTALVHLYVNETLANRTLLETLLGHSLDTPLDIDIAGDPEYERSKQRGNILFGVVAGVVAVALLIALAVLVRYCRQREAKSGYQAGKKETKDLYAPKPSGKASKGNKSKGKKSKSPKPVKPVEDEDEAGLQKSLKFNLMSDAPGDSPRIHLPLNYPPGSPDLGRHYRSNSPLPSIQLQPQSPSASKKHQVVQDLPPANTFVGTGDTTSTGSEQYSDYSYRTNPPKYPSKQVGQPFQLSTPQPLPHPYHGAIWTEVWE

SEQ ID NO: 908188 - protein, 1086 aa, Homo sapiens
AGAGARTAAPAPAVRSRSPGRGRRRLMDSGAGGRRCPEAALLILGPPRMEPLRHSPGPGGQRLLLPSMLLALLLLLAPSPGHATRVVYKVPEEQPPNTLIGSLAADYGFPDVGHLYKLEVGAPYLRVDGKTGDIFTTETSIDREGLRECQNQLPGDPCILEFEVSITDLVQNGSPRLLEGQIEVQDINDNTPNFASPVITLAIPENTNIGSLFPIPLASDRDAGPNGVASYELQAGPEAQELFGLQVAEDQEEKQPQLIVMGNLDRERWDSYDLTIKVQDGGSPPRASSALLRVTVLDTNDNAPKFERPSYEAELSENSPIGHSVIQVKANDSDQGANAEIEYTFHQAPEVVRRLLRLDRNTGLITVQGPVDREDLSTLRFSVLAKDRGTNPKSARAQVVVTVKDMNDNAPTIEIRGIGLVTHQDGMANISEDVAEETAVALVQVSDRDEGENAAVTCVVAGDVPFQLRQASETGSDSKKKYFLQTTTPLDYEKVKDYTIEIVAVDSGNPPLSSTNSLKVQVVDVNDNAPVFTQSVTEVAFPENNKPGEVIAEITASDADSGSNAELVYSLEPEPAAKGLFTISPETGEIQVKTSLDREQRESYELKVVAADRGSPSLQGTATVLVNVLDCNDNDPKFMLSGYNFSVMENMPALSPVGMVTVIDGDKGENAQVQLSVEQDNGDFVIQNGTGTILSSLSFDREQQSTYTFQLKAVDGGVPPRSAYVGVTINVLDENDNAPYITAPSNTSHKLLTPQTRLGETVSQVAAEDFDSGVNAELIYSIAGGNPYGLFQIGSHSGAITLEKEIERRHHGLHRLVVKVSDRGKPPRYGTALVHLYVNETLANRTLLETLLGHSLDTPLDIDIAGDPEYERSKQRGNILFGVVAGVVAVALLIALAVLVRYCRQREAKSGYQAGKKETKDLYAPKPSGKASKGNKSKGKKSKSPKPVKPVEDEDEAGLQKSLKFNLMSDAPGDSPRIHLPLNYPPGSPDLGRHYRSNSPLPSIQLQPQSPSASKKHQVVQDLPPANTFVGTGDTTSTGSEQYSDYSYRTNPPKYPSKQVGQPFQLSTPQPLPHPYHGAIWTEVWE

SEQ ID NO: 908189 - protein, 1135 aa, Homo sapiens
AGAGARTAAPAPAVRSRSPGRGRRRLMDSGAGGRRCPEAALLILGPPRMEPLRHSPGPGGQRLLLPSMLLALLLLLAPSPGHATRVVYKVPEEQPPNTLIGSLAADYGFPDVGHLYKLEVGAPYLRVDGKTGDIFTTETSIDREGLRECQNQLPGDPCILEFEVSITDLVQNGSPRLLEGQIEVQDINDNTPNFASPVITLAIPENTNIGSLFPIPLASDRDAGPNGVASYELQAGPEAQELFGLQVAEDQEEKQPQLIVMGNLDRERWDSYDLTIKVQDGGSPPRASSALLRVTVLDTNDNAPKFERPSYEAELSENSPIGHSVIQSLVDWDLEKRLRKKRETDSREIANNNSLGARHRSKHMMCIISFNPYQYKVKANDSDQGANAEIEYTFHQAPEVVRRLLRLDRNTGLITVQGPVDREDLSTLRFSVLAKDRGTNPKSARAQVVVTVKDMNDNAPTIEIRGIGLVTHQDGMANISEDVAEETAVALVQVSDRDEGENAAVTCVVAGDVPFQLRQASETGSDSKKKYFLQTTTPLDYEKVKDYTIEIVAVDSGNPPLSSTNSLKVQVVDVNDNAPVFTQSVTEVAFPENNKPGEVIAEITASDADSGSNAELVYSLEPEPAAKGLFTISPETGEIQVKTSLDREQRESYELKVVAADRGSPSLQGTATVLVNVLDCNDNDPKFMLSGYNFSVMENMPALSPVGMVTVIDGDKGENAQVQLSVEQDNGDFVIQNGTGTILSSLSFDREQQSTYTFQLKAVDGGVPPRSAYVGVTINVLDENDNAPYITAPSNTSHKLLTPQTRLGETVSQVAAEDFDSGVNAELIYSIAGGNPYGLFQIGSHSGAITLEKEIERRHHGLHRLVVKVSDRGKPPRYGTALVHLYVNETLANRTLLETLLGHSLDTPLDIDIAGDPEYERSKQRGNILFGVVAGVVAVALLIALAVLVRYCRQREAKSGYQAGKKETKDLYAPKPSGKASKGNKSKGKKSKSPKPVKPVEDEDEAGLQKSLKFNLMSDAPGDSPRIHLPLNYPPGSPDLGRHYRSNSPLPSIQLQPQSPSASKKHQVVQDLPPANTFVGTGDTTSTGSEQYSDYSYRTNPPKYPSKQVGQPFQLSTPQPLPHPYHGAIWTEVWE

SEQ ID NO: 908190 - protein, 1263 aa, Homo sapiens
AGAGARTAAPAPAVRSRSPGRGRRRLMDSGAGGRRCPEAALLILGPPRMEPLRHSPGPGGQRLLLPSMLLALLLLLAPSPGHATRVVYKVPEEQPPNTLIGSLAADYGFPDVGHLYKLEVGAPYLRVDGKTGDIFTTETSIDREGLRECQNQLPGDPCILEFEVSITDLVQNGSPRLLEGQIEVQDINDNTPNFASPVITLAIPENTNIGSLFPIPLASDRDAGPNGVASYELQAGPEAQELFGLQVAEDQEEKQPQLIVMGNLDRERWDSYDLTIKVQDGGSPPRASSALLRVTVLDTNDNAPKFERPSYEAELSENSPIGHSVIQVKANDSDQGANAEIEYTFHQAPEVVRRLLRLDRNTGLITVQGPVDREDLSTLRFSVLAKDRGTNPKSARAQVVVTVKDMNDNAPTIEIRGIGLVTHQDGMANISEDVAEETAVALVQVSDRDEGENAAVTCVVAGDVPFQLRQASETGSDSKKKYFLQTTTPLDYEKVKDYTIEIVAVDSGNPPLSSTNSLKVQVVDVNDNAPVFTQSVTEVAFPENNKPGEVIAEITASDADSGSNAELVYSLEPEPAAKGLFTISPETGEIQVKTSLDREQRESYELKVVAADRGSPSLQGTATVLVNVLDCNDNDPKFMLSGYNFSVMENMPALSPVGMVTVIDGDKGENAQVQLSVEQDNGDFVIQNGTGTILSSLSFDREQQSTYTFQLKAVDGGVPPRSAYVGVTINVLDENDNAPYITAPSNTSHKLLTPQTRLGETVSQVAAEDFDSGVNAELIYSIAGGNPYGLFQIGSHSGAITLEKEIERRHHGLHRLVVKVSDRGKPPRYGTALVHLYVNETLANRTLLETLLGHSLDTPLDIDIAGDPEYERSKQRGNILFGVVAGVVAVALLIALAVLVRYCRQREAKSGYQAGKKETKDLYAPKPSGKASKGNKSKGKKSKSPKPVKPVEDEDEAGLQKSLKFNLMSDAPGDSPRIHLPLNYPPGSPDLGRHYRSNSPLPSIQLQPQSPSASKKHQVVQDLPPANTFVGTGDTTSTGSEQYSDYSYRTNPPKYPSKQLPHRRVTFSATSQAQELQDPSQHSYYDSGLEESETPSSKSSSGPRLGPLALPEDHYERTTPDGSIGEMEHPENDLRPLPDVAMTGTCTRECSEFGHSDTCWMPGQSSPSRRTKSSALKLSTFVPYQDRGGQEPAGAGSPSPPEDRNTKTAPVRLLPSYSAFSHSSHDSCKDSATLEEIPLTQTSDFPPAATPASAQTAKREIYL

SEQ ID NO: 908191 - protein, 699 aa, Homo sapiens
AGAGARTAAPAPAVRSRSPGRGRRRLMDSGAGGRRCPEAALLILGPPRMEPLRHSPGPGGQRLLLPSMLLALLLLLAPSPGHATRVVYKVPEEQPPNTLIGSLAADYGFPDVGHLYKLEVGAPYLRVDGKTGDIFTTETSIDREGLRECQNQLPGDPCILEFEVSITDLVQNGSPRLLEGQIEVQDINDNTPNFASPVITLAIPENTNIGSLFPIPLASDRDAGPNGVASYELQAGPEAQELFGLQVAEDQEEKQPQLIVMGNLDRERWDSYDLTIKVQDGGSPPRASSALLRVTVLDTNDNAPKFERPSYEAELSENSPIGHSVIQVKANDSDQGANAEIEYTFHQAPEVVRRLLRLDRNTGLITVQGPVDREDLSTLRFSVLAKDRGTNPKSARAQVVVTVKDMNDNAPTIEIRGIGLVTHQDGMANISEDVAEETAVALVQVSDRDEGENAAVTCVVAGDVPFQLRQASETGSDSKKKYFLQTTTPLDYEKVKDYTIEIVAVDSGNPPLSSTNSLKVQVVDVNDNAPVFTQSVTEVAFPENNKPGEVIAEITASDADSGSNAELVYSLEPEPAAKGLFTISPETGEIQVKTSLDREQRESYELKVVAADRGSPSLQGTATVLVNVLDCNDNDPKFMLSGYNFSVMENMPALSPVGMVTRTAPVRLPPPSTHSSPAVPDPEMSYTWISPVSGESLST

SEQ ID NO: 908192 - protein, 1240 aa, Homo sapiens
MGSPLEVVTVLYTPHDASHVAGVECPEAALLILGPPRMEPLRHSPGPGGQRLLLPSMLLALLLLLAPSPGHATRVVYKVPEEQPPNTLIGSLAADYGFPDVGHLYKLEVGAPYLRVDGKTGDIFTTETSIDREGLRECQNQLPGDPCILEFEVSITDLVQNGSPRLLEGQIEVQDINDNTPNFASPVITLAIPENTNIGSLFPIPLASDRDAGPNGVASYELQVAEDQEEKQPQLIVMGNLDRERWDSYDLTIKVQDGGSPPRASSALLRVTVLDTNDNAPKFERPSYEAELSENSPIGHSVIQVKANDSDQGANAEIEYTFHQAPEVVRRLLRLDRNTGLITVQGPVDREDLSTLRFSVLAKDRGTNPKSARAQVVVTVKDMNDNAPTIEIRGIGLVTHQDGMANISEDVAEETAVALVQVSDRDEGENAAVTCVVAGDVPFQLRQASETGSDSKKKYFLQTTTPLDYEKVKDYTIEIVAVDSGNPPLSSTNSLKVQVVDVNDNAPVFTQSVTEVAFPENNKPGEVIAEITASDADSGSNAELVYSLEPEPAAKGLFTISPETGEIQVKTSLDREQRESYELKVVAADRGSPSLQGTATVLVNVLDCNDNDPKFMLSGYNFSVMENMPALSPVGMVTVIDGDKGENAQVQLSVEQDNGDFVIQNGTGTILSSLSFDREQQSTYTFQLKAVDGGVPPRSAYVGVTINVLDENDNAPYITAPSNTSHKLLTPQTRLGETVSQVAAEDFDSGVNAELIYSIAGGNPYGLFQIGSHSGAITLEKEIERRHHGLHRLVVKVSDRGKPPRYGTALVHLYVNETLANRTLLETLLGHSLDTPLDIDIAGDPEYERSKQRGNILFGVVAGVVAVALLIALAVLVRYCRQREAKSGYQAGKKETKDLYAPKPSGKASKGNKSKGKKSKSPKPVKPVEDEDEAGLQKSLKFNLMSDAPGDSPRIHLPLNYPPGSPDLGRHYRSNSPLPSIQLQPQSPSASKKHQVVQDLPPANTFVGTGDTTSTGSEQYSDYSYRTNPPKYPSKQLPHRRVTFSATSQAQELQDPSQHSYYDSGLEESETPSSKSSSGPRLGPLALPEDHYERTTPDGSIGEMEHPENDLRPLPDVAMTGTCTRECSEFGHSDTCWMPGQSSPSRRTKSSALKLSTFVPYQDRGGQEPAGAGSPSPPEDRNTKTAPVRLLPSYSAFSHSSHDSCKDSATLEEIPLTQTSDFPPAATPASAQTAKREIYL

SEQ ID NO: 908193 - protein, 1086 aa, Homo sapiens; identical to SEQ ID NO: 908188

SEQ ID NO: 908194 - protein, 165 aa, Homo sapiens
MGTPRWSVGSQALLISLGPLLSCCRCRGETPRPVGSFRCLSLQYSPSPTPPKPPGHPCSYCSQIPGSPDLGRHYRSNSPLPSIQLQPQSPSASKKHQVVQDLPPANTFVGTGDTTSTGSEQYSDYSYRTNPPKYPSKQVGQPFQLSTPQPLPHPYHGAIWTEVWE

SEQ ID NO: 908195 - protein, 161 aa, Homo sapiens
MPDTFNSWFLITLLHVWMCLVRMKQEGRSGKYMCRIIVHFMWEDVQQRGRVMGVNPYILKKNMILMTNHFYAAILGYDEGILSDDHGLAAALWRTFFNRKCEDPRHLELLVEYVRKQIQYLDSMNGEDLLLTGEVSWRPLVEKNPQSILKPHSPTYNDEGL

SEQ ID NO: 908196 - protein, 332 aa, Homo sapiens
GRACPGTTAWCTAEKTTARARSDLFAPAPPLPVFRRQKEDVEKGTPETHSSPRKWLLRNMALLVRVLRNQTSISQWVPVCSRLIPVSPTQGQGDRALSRTSQWPQMSQSQACGGSEQIPGIDIQLNRKYHTTRKLSTTKDSPQPVEEKVGAFTKIIEAMGFTGPLKYSKWKIKIAALRMYTSCVEKTDFEEFFLRCQMPDTFNSWFLITLLHVWMCLVRMKQEGRSGKYMCRIIVHFMWEDVQQRGRVMGGILSDDHGLAAALWRTFFNRKCEDPRHLELLVEYVRKQIQYLDSMNGEDLLLTGEVSWRPLVEKNPQSILKPHSPTYNDEGL

SEQ ID NO: 908197 - protein, 118 aa, Homo sapiens
MVRSPPHAPSPSFLSSGRLVPDAGSSPLPCLCRFLLPPPLVADTVPGLHERGGSASDRGGELAPSSGEESSEHPEAPFSDLQRRGTLMGWALRTARQLASRNLQERSACWSRTLQKVA

SEQ ID NO: 908198 - protein, 358 aa, Homo sapiens
GRACPGTTAWCTAEKTTARARSDLFAPAPPLPVFRRQKEDVEKGTPETHSSPRKWLLRNMALLVRVLRNQTSISQWVPVCSRLIPVSPTQGQGDRALSRTSQWPQMSQSQACGGSEQIPGIDIQLNRKYHTTRKLSTTKDSPQPVEEKVGAFTKIIEAMGFTGPLKYSKWKIKIAALRMYTSCVEKTDFEEFFLRCQMPDTFNSWFLITLLHVWMCLVRMKQEGRSGKYMCRIIVHFMWEDVQQRGRVMGVNPYILKKNMILMTNHFYAAILGYDEGILSDDHGLAAALWRTFFNRKCEDPRHLELLVEYVRKQIQYLDSMNGEDLLLTGEVSWRPLVEKNPQSILKPHSPTYNDEGL

SEQ ID NO: 908199 - protein, 324 aa, Homo sapiens
FLYFTDKKTEPQRGIPGQVPWLTPVIPAHWEAERNQTSISQWVPVCSRLIPVSPTQGQGDRALSRTSQWPQMSQSQACGGSEQIPGIDIQLNRKYHTTRKLSTTKDSPQPVEEKVGAFTKIIEAMGFTGPLKYSKWKIKIAALRMYTSCVEKTDFEEFFLRCQMPDTFNSWFLITLLHVWMCLVRMKQEGRSGKYMCRIIVHFMWEDVQQRGRVMGVNPYILKKNMILMTNHFYAAILGYDEGILSDDHGLAAALWRTFFNRKCEDPRHLELLVEYVRKQIQYLDSMNGEDLLLTGEVSWRPLVEKNPQSILKPHSPTYNDEGL

SEQ ID NO: 908200 - protein, 372 aa, Homo sapiens
GRACPGTTAWCTAEKTTARARSDLFAPAPPLPVFRRQKEDVEKGTPETHSSPRKWLLRNMALLVRVLRNQTSISQWVPVCSRLIPVSPTQGQGDRALSRTSQVPWLETSASEWHPQWPQMSQSQACGGSEQIPGIDIQLNRKYHTTRKLSTTKDSPQPVEEKVGAFTKIIEAMGFTGPLKYSKWKIKIAALRMYTSCVEKTDFEEFFLRCQMPDTFNSWFLITLLHVWMCLVRMKQEGRSGKYMCRIIVHFMWEDVQQRGRVMGVNPYILKKNMILMTNHFYAAILGYDEGILSDDHGLAAALWRTFFNRKCEDPRHLELLVEYVRKQIQYLDSMNGEDLLLTGEVSWRPLVEKNPQSILKPHSPTYNDEGL

SEQ ID NO: 908201 - protein, 326 aa, Homo sapiens
GRACPGTTAWCTAEKTTARARSDLFAPAPPLPVFRRQKEDVEKGTPETHSSPRKWLLRNMALLVRVLRNQTSISQWVPVCSRLIPVSPTQGQGDRALSRTSQLSTTKDSPQPVEEKVGAFTKIIEAMGFTGPLKYSKWKIKIAALRMYTSCVEKTDFEEFFLRCQMPDTFNSWFLITLLHVWMCLVRMKQEGRSGKYMCRIIVHFMWEDVQQRGRVMGVNPYILKKNMILMTNHFYAAILGYDEGILSDDHGLAAALWRTFFNRKCEDPRHLELLVEYVRKQIQYLDSMNGEDLLLTGEVSWRPLVEKNPQSILKPHSPTYNDEGL

SEQ ID NO: 908202 - protein, 340 aa, Homo sapiens
GRACPGTTAWCTAEKTTARARSDLFAPAPPLPVFRRQKEDVEKGTPETHSSPRKWLLRNMALLVRVLRNQTSISQWVPVCSRLIPVSPTQGQGDRALSRTSQWPQMSQSQACGGSEQIPGIDIQLNRKYHTTRKLSTTKDSPQPVEEKVGAFTKIIEAMGFTGPLKYSKWKIKIAALRMYTSCVESWFLITLLHVWMCLVRMKQEGRSGKYMCRIIVHFMWEDVQQRGRVMGVNPYILKKNMILMTNHFYAAILGYDEGILSDDHGLAAALWRTFFNRKCEDPRHLELLVEYVRKQIQYLDSMNGEDLLLTGEVSWRPLVEKNPQSILKPHSPTYNDEGL

SEQ ID NO: 908203 - protein, 358 aa, Homo sapiens; identical to SEQ ID NO: 908198

SEQ ID NO: 908204 - protein, 338 aa, Homo sapiens
GRACPGTTAWCTAEKTTARARSDLFAPAPPLPVFRRQKEDVEKGTPETHSSPRKWLLRNMALLVRVLRNQTSISQWVPVCSRLIPVSPTQGQGDRALSRTSQWPQMSQSQACGGSEQIPGIDIQLNRKYHTTRKLSTTKDSPQPVEEKVGAFTKIIEAMGFTGPLKYSKWKIKIAALRMYTSCVEKTDFEEFFLRCQMPDTFNSWFLITLLHVWMCLVRMKQEGRSGKYMCRIIVHFMWEDVQQRGRVMGVNPYILKKNMILMTNHFYAAILGYDEGILSDDHGLAAALWRTFFNRKCEDPRHLELLVEYVRKQVSDPFPPLPSPGNSGSSSWAFRGS

SEQ ID NO: 908205 - protein, 221 aa, Homo sapiens
HGLLVRVLRNQTSISQWVPVCSRLIPVSPTQGQGDRALSRTSQWPQMSQSQACGGSEQIPGIDIQLNRKYHTTRKLSTTKDSPQPVEEKVGAFTKIIEAMGFTGPLKYSKWKIKIAALRMYTSCVEKTDFEEFFLRCQMPDTFNSWFLITLLHVWMCLVRMKQEGRSGKYMCRIIVHFMWEDVQQRGRVMGVSECCQMLVLDNSREGFEFGVLSVVKWPCF

SEQ ID NO: 908206 - protein, 387 aa, Homo sapiens
LVQNMASLVSHLLYETPRLDMPSEGDSDLCSRLIPVSPTQGQGDRALSRTSQWPQMSQSQACGGSEQIPGIDIQLNRKYHTTRKLSTTKDSPQPVEEKVGAFTKIIEAMGFTGPLKYSKWKIKIAALRMYTSCVEKTDFEEFFLRCQMPDTFNSWFLITLLHVWMCLVRMKQEGRSGKYMCRIIVHFMWEDVQQRGRVMGWVRGLADFKNEAADLHSKCYQLLKVVRTQRVSSSKIYGEDRKNKASTVWKGDLSGLPLLARVASFYSLICPCPCLLIGPFYRVLIGAFLQSADWCIYNPVARHRALIGAFLQNADWCIYNPLARHRALIGASIHPTQKPSWLHLPLVSSFVYVVYFVYLDHVLVACSSLLLGSISLPPSLGASKVEP

SEQ ID NO: 908207 - protein, 358 aa, Homo sapiens; identical to SEQ ID NO: 908198

SEQ ID NO: 908208 - protein, 187 aa, Homo sapiens
MQPIDTCVSYPRTGGQGSVSHFPGCQMPDTFNSWFLITLLHVWMCLVRMKQEGRSGKYMCRIIVHFMWEDVQQRGRVMGVNPYILKKNMILMTNHFYAAILGYDEGILSDDHGLAAALWRTFFNRKCEDPRHLELLVEYVRKQIQYLDSMNGEDLLLTGEVSWRPLVEKNPQSILKPHSPTYNDEGL

SEQ ID NO: 908209 - protein, 144 aa, Homo sapiens
LGTLPVRPNSWFLITLLHVWMCLVRMKQEGRSGKYMCRIIVHFMWEDVQQRGRVMGVNPYILKKNMILMTNHFYAAILGYDEGILSDDHGLAAALWRTFFNRKCEDPRHLELLVEYVRKQVSDPFPPLPSPGNSGSSSWAFRGS

SEQ ID NO: 908210 - protein, 299 aa, Homo sapiens
HGLLVRVLRNQTSISQWVPVCSRLIPVSPTQGQGDRALSRTSQWPQMSQSQACGGSEQIPGIDIQLNRKYHTTRKLSTTKDSPQPVEEKVGAFTKIIEAMGFTGPLKYSKWKIKIAALRMYTSCVEKTDFEEFFLRCQMPDTFNSWFLITLLHVWMCLVRMKQEGRSGKYMCRIIVHFMWEDVQQRGRVMGVNPYILKKNMILMTNHFYAAILGYDEGILSDDHGLAAALWRTFFNRKCEDPRHLELLVEYVRKQIQYLDSMNGEDLLLTGEVSWRPLVEKNPQSILKPHSPTYNDEGL

SEQ ID NO: 908211 - protein, 253 aa, Homo sapiens
MSQSQACGGSEQIPGIDIQLNRKYHTTRKLSTTKDSPQPVEEKVGAFTKIIEAMGFTGPLKYSKWKIKIAALRMYTSCVEKTDFEEFFLRCQMPDTFNSWFLITLLHVWMCLVRMKQEGRSGKYMCRIIVHFMWEDVQQRGRVMGVNPYILKKNMILMTNHFYAAILGYDEGILSDDHGLAAALWRTFFNRKCEDPRHLELLVEYVRKQIQYLDSMNGEDLLLTGEVSWRPLVEKNPQSILKPHSPTYNDEGL

SEQ ID NO: 908212 - protein, 161 aa, Homo sapiens; identical to SEQ ID NO: 908195

SEQ ID NO: 908213 - protein, 105 aa, Homo sapiens
MCLCSGQDTASQACRLGPRRPLMTKGFHILSHLEGGLENKVTFVTPSELNEEHAVSCLGLPFHEILGRREHSSWLSCSRPRPVPSFGPPSQLLKHVLQSHLGLST

SEQ ID NO: 908214 - protein, 221 aa, Homo sapiens; identical to SEQ ID NO: 908205

SEQ ID NO: 908215 - protein, 229 aa, Homo sapiens
HGLLVRVLRNQTSISQWVPVCSRLIPVSPTQGQGDRALSRTSQWPQMSQSQACGGSEQIPGIDIQLNRKYHTTRKLSTTKDSPQPVEEKVGAFTKIIEAMGFTGPLKYSKWKIKIAALRMYTSCVEKTDFEEFFLRCQMPDTFNSWFLITLLHVWMCLVRMKQEGRSGKYMCRIIVHFMWEDVQQRGRVMGELKLKLLDHWQPRRVCGFVVSLTSRMKPQTFTASVTSS

SEQ ID NO: 908216 - protein, 222 aa, Homo sapiens
MLSRAVCGTSRQLAPVLGYLGSRQKHSLPDLPYDYGALEPHINAQIMQLHHSKHHAAYVNNLNVTEEKYQEALAKGDVTAQIALQPALKFNGGGHINHSIFWTNLSPNGGGEPKGELLEAIKRDFGSFDKFKEKLTAASVGVQGSGWGWLGFNKERGHLQIAACPNQDPLQGTTGLIPLLGIDVWEHAYYLQYKNVRPDYLKAIWNVINWENVTERYMACKK

SEQ ID NO: 908217 - protein, 222 aa, Homo sapiens; identical to SEQ ID NO: 908216

SEQ ID NO: 908218 - protein, 141 aa, Homo sapiens
MLSRAVCGTSRQLAPVLGYLGSRQKHSLPDLPYDYGALEPHINAQIMQLHHSKHHAAYVNNLNVTEEKYQEALAKGRFQAERREAVPGRGDPREPGPIRTGLSVEENSLRICTGSEFSRRCYSPDSSSACTEVQWWWSYQS

SEQ ID NO: 908219 - protein, 222 aa, Homo sapiens; identical to SEQ ID NO: 908216

SEQ ID NO: 908220 - protein, 222 aa, Homo sapiens; identical to SEQ ID NO: 908216

SEQ ID NO: 908221 - protein, 222 aa, Homo sapiens; identical to SEQ ID NO: 908216

SEQ ID NO: 908222 - protein, 222 aa, Homo sapiens; identical to SEQ ID NO: 908216

SEQ ID NO: 908223 - protein, 222 aa, Homo sapiens; identical to SEQ ID NO: 908216

SEQ ID NO: 908224 - protein, 222 aa, Homo sapiens; identical to SEQ ID NO: 908216

SEQ ID NO: 908225 - protein, 222 aa, Homo sapiens; identical to SEQ ID NO: 908216

SEQ ID NO: 908226 - protein, 222 aa, Homo sapiens; identical to SEQ ID NO: 908216

SEQ ID NO: 908227 - protein, 222 aa, Homo sapiens; identical to SEQ ID NO: 908216

SEQ ID NO: 908228 - protein, 222 aa, Homo sapiens; identical to SEQ ID NO: 908216

SEQ ID NO: 908229 - protein, 222 aa, Homo sapiens; identical to SEQ ID NO: 908216

SEQ ID NO: 908230 - protein, 140 aa, Homo sapiens
MLSRAVCGTSRQLAPVLGYLGSRQKHSLPDLPYDYGALEPHINAQIMQLHHSKHHAAYVNNLNVTEEKYQEALAKGRFQAERREAVPGRGDPREPGPIRTGLSVEENSLRICTGSEFSRHDSLSFKHMVYLIVEGVPRWV

SEQ ID NO: 908231 - protein, 183 aa, Homo sapiens
MLSRAVCGTSRQLAPVLGYLGSRQKHSLPDLPYDYGALEPHINAQIMQLHHSKHHAAYVNNLNVTEEKYQEALAKGELLEAIKRDFGSFDKFKEKLTAASVGVQGSGWGWLGFNKERGHLQIAACPNQDPLQGTTGLIPLLGIDVWEHAYYLQYKNVRPDYLKAIWNVINWENVTERYMACKK

SEQ ID NO: 908232 - protein, 137 aa, Homo sapiens
MLSRAVCGTSRQLAPVLGYLGSRQKHSLPDLPYDYGALEPHINAQIMQLHHSKHHAAYVNNLNVTEEKYQEALAKGDVTAQIALQPALKFNGGGHINHSIFWTNLSPNGGGEPKGELLEAIKRDFGSLAFLAYLPAG

SEQ ID NO: 908233 - protein, 38 aa, Homo sapiens
MDAHPHKYLPPGNKTYNSTTMVKPRYYRTKVGQKHGKL

SEQ ID NO: 908234 - protein, 222 aa, Homo sapiens; identical to SEQ ID NO: 908216

SEQ ID NO: 908235 - protein, 183 aa, Homo sapiens; identical to SEQ ID NO: 908231

SEQ ID NO: 908236 - protein, 222 aa, Homo sapiens; identical to SEQ ID NO: 908216

SEQ ID NO: 908237 - protein, 222 aa, Homo sapiens; identical to SEQ ID NO: 908216

SEQ ID NO: 908238 - protein, 222 aa, Homo sapiens; identical to SEQ ID NO: 908216

SEQ ID NO: 908239 - protein, 222 aa, Homo sapiens; identical to SEQ ID NO: 908216

SEQ ID NO: 908240 - protein, 222 aa, Homo sapiens; identical to SEQ ID NO: 908216

SEQ ID NO: 908241 - protein, 222 aa, Homo sapiens; identical to SEQ ID NO: 908216

SEQ ID NO: 908242 - protein, 222 aa, Homo sapiens; identical to SEQ ID NO: 908216

SEQ ID NO: 908243 - protein, 177 aa, Homo sapiens
MLSRAVCGTSRQLAPVLGYLGSRQKHSLPDLPYDYGALEPHINAQIMQLHHSKHHAAYVNNLNVTEEKYQEALAKGDVTAQIALQPALKFNGGGHINHSIFWTNLSPNGGGEPKGELLEAIKRDFGSFDKFKEKLTAASVGVQGSGWGWLGFNKERGHLQIAACPNQDPLQGTTVIP

SEQ ID NO: 908244 - protein, 192 aa, Homo sapiens
MLSRAVCGTSRQLAPVLGYLGSRQKHSLPDLPYDYGALEPHINAQIMQLHHSKHHAAYVNNLNVTEEKYQEALAKGDVTAQIALQPALKFNGGGHINHSIFWTNLSPNGGGEPKGELLEAIKRDFGSFDKFKEKLTAASVGVQGSGWGWLIELDKGQSQTAHQDLSHPSNFAIYQHLAKPISHLFHHEFTLS

SEQ ID NO: 908245 - protein, 63 aa, Homo sapiens
MRTRHVMLPKDIAKLVPKTHLMSESEWRNLGVQQSQGWVHYMIHEPEPHILLFRRPLPKKPKK

SEQ ID NO: 908246 - protein, 109 aa, Homo sapiens
ESPVRKDIKAYVCSRDINIQEAFRIKVKSYMSHKQIYYSDKYDDEEFEYRHVMLPKDIAKLVPKTHLMSESEWRNLGVQQSQGWVHYMIHEPEPHILLFRRPLPKKPKK

SEQ ID NO: 908247 - protein, 75 aa, Homo sapiens
YGSRSGQGATRQFEYRHVMLPKDIAKLVPKTHLMSESEWRNLGVQQSQGWVHYMIHEPEPHILLFRRPLPKKPKK

SEQ ID NO: 908248 - protein, 257 aa, Homo sapiens
PFLPRPPQPLLYQRGPSPPPPPPPPLPPSPPPPLPPWGPPPSPPPSPPLHVLGLLSWRRSYSRSPLWARGAAMADGGGGGGTGAVGGGGTSQASAGAATGATGASGGGGPINPASLPPGDPQLIALIVEQLKSRGLFDSFRRDCLADVDTKPAYQNLRQKVDNFVSTHLDKQEWNPTMNKNQLRNGLRQSVVQSGMLEAGVDRIISQVVDPKLNHIFRPQIERAIHEFLAAQKKAAVPAPPPEPEGQDPPAPSQDTS

SEQ ID NO: 908249 - protein, 201 aa, Homo sapiens
PFLPRPPQPLLYQRGPSPPPPPPPPLPPSPPPPLPPWGPPPSPPPSPPLHVLGLLSWRRSYSRSPLWARGAAMADGGGGGGTGAVGGGGTSQASAGAATGATGASGGGGPINPASLPPGDPQLIALIVEQLKSRGLFDSFRRDCLADVDTKPAYQNLRQKVDNFVSTHLDKQEWNPTMNKNQLRNGLRQSVVQIRQTPFES

SEQ ID NO: 908250 - protein, 257 aa, Homo sapiens; identical to SEQ ID NO: 908248

SEQ ID NO: 908251 - protein, 198 aa, Homo sapiens
PFLPRPPQPLLYQRGPSPPPPPPPPLPPSPPPPLPPWGPPPSPPPSPPLHVLGLLSWRRSYSRSPLWARGAAMADGGGGGGTGAVGGGGTSQASAGAATGATGASGGGGPINPASLPPGDPQLIALIVEQLKSRGLFDSFRRDCLADVDTKPAYQNLRQKVDNFVSTHLDKQEWNPTMNKNQLRNGLRQSVVQLGDCG

SEQ ID NO: 908252 - protein, 257 aa, Homo sapiens; identical to SEQ ID NO: 908248

SEQ ID NO: 908253 - protein, 201 aa, Homo sapiens; identical to SEQ ID NO: 908249

SEQ ID NO: 908254 - protein, 803 aa, Homo sapiens
MKVISLFILVGFIGEFQSFSSASSPVNCQWDFYAPWSECNGCTKTQTRRRSVAVYGQYGGQPCVGNAFETQSCEPTRGCPTEEGCGERFRCFSGQCISKSLVCNGDSDCDEDSADEDRCEDSERRPSCDIDKPPPNIELTGNGYNELTGQFRNRVINTKSFGGQCRKVFSGDGKDFYRLSGNVLSYTFQVKINNDFNYEFYNSTWSYVKHTSTEHTSSSRKRSFFRSSSSSSRSYTSHTNEIHKGKSYQLLVVENTVEVAQFINNNPEFLQLAEPFWKELSHLPSLYDYSAYRRLIDQYGTHYLQSGSLGGEYRVLFYVDSEKLKQNDFNSVEEKKCKSSGWHFVVKFSSHGCKELENALKAASGTQNNVLRGEPFIRGGGAGFISGLSYLELDNPAGNKRRYSAWAESVTNLPQVIKQKLTPLYELVKEVPCASVKKLYLKWALEEYLDEFDPCHCRPCQNGGLATVEGTHCLCHCKPYTFGAACEQGVLVGIKQEGLMEVGVAGPLGAPVSKGRKQEAVNAITHLPVGVGDPALEKRQKAHDEGTMFPVGKNVVYTCNEGYSLIGNPVARCGEDLRWLVGEMHCQKIACVLPVLMDGIQSHPQKPFYTVGEKVTVSCSGGMSLEGPSAFLCGSSLKWSPEMKNARCVQKENPLTQAVPKCQRWEKLQNSRCVCKMPYECGPSLDVCAQDERSKRILPLTVCKMHVLHCQGRNYTLTGRDSCTLPASAEKACGACPLWGKCDAESSKCVCREASECEEEGFSICVEVNGKEQTMSECEAGALRCRGQSISVTSIRPCAAETQ

SEQ ID NO: 908255 - protein, 271 aa, Homo sapiens
RADSCKDGFVQDEGTMFPVGKNVVYTCNEGYSLIGNPVARCGEDLRWLVGEMHCQKIACVLPVLMDGIQSHPQKPFYTVGEKVTVSCSGGMSLEGPSAFLCGSSLKWSPEMKNARCVQKENPLTQAVPKCQRWEKLQNSRCVCKMPYECGPSLDVCAQDERSKRILPLTVCKMHVLHCQGRNYTLTGRDSCTLPASAEKACGACPLWGKCDAESSKCVCREASECEEEGFSICVEVNGKEQTMSECEAGALRCRGQSISVTSIRPCAAETQ

SEQ ID NO: 908256 - protein, 100 aa, Homo sapiens
PPCRPREFDSALPLTGRDSCTLPASAEKACGACPLWGKCDAESSKCVCREASECEEEGFSICVEVNGKEQTMSECEAGALRCRGQSISVTSIRPCAAETQ

SEQ ID NO: 908257 - protein, 69 aa, Homo sapiens
LPTKWGKCDAESSKCVCREASECEEEGFSICVEVNGKEQTMSECEAGALRCRGQSISVTSIRPCAAETQ

SEQ ID NO: 908258 - protein, 843 aa, Homo sapiens
MKVISLFILVGFIGEFQSFSSASSPVNCQWDFYAPWSECNGCTKTQTRRRSVAVYGQYGGQPCVGNAFETQSCEPTRGCPTEEGCGERFRCFSGQCISKSLVCNGDSDCDEDSADEDRCEDSERRPSCDIDKPPPNIELTGNGYNELTGQFRNRVINTKSFGGQCRKVFSGDGKDFYRLSGNVLSYTFQVKINNDFNYEFYNSTWSYVKHTSTEHTSSSRKRSFFRSSSSSSRSYTSHTNEIHKGKSYQLLVVENTVEVAQFINNNPEFLQLAEPFWKELSHLPSLYDYSAYRRLIDQYGTHYLQSGSLGGEYRVLFYVDSEKLKQNDFNSVEEKKCKSSGWHFVVKFSSHGCKELENALKAASGTQNNVLRGEPFIRGGGAGFISGLSYLELDNPAGNKRRYSAWAESVTNLPQVIKQKLTPLYELVKEVPCASVKKLYLKWALEEYLDEFDPCHCRPCQNGGLATVEGTHCLCHCKPYTFGAACEQGVLVGNQAGGVDGGWSCWSSWSPCVQGKKTRSRECNNPPPSGGGRSCVGETTESTQCEDEELEHLRLLEPHCFPLSLVPTEFCPSPPALKDGFVQDEGTMFPVGKNVVYTCNEGYSLIGNPVARCGEDLRWLVGEMHCQKIACVLPVLMDGIQSHPQKPFYTVGEKVTVSCSGGMSLEGPSAFLCGSSLKWSPEMKNARCVQKENPLTQAVPKCQRWEKLQNSRCVCKMPYECGPSLDVCAQDERSKRILPLTVCKMHVLHCQGRNYTLTGRDSCTLPASAEKACGACPLWGKCDAESSKCVCREASECEEEGFSICVEVNGKEQTMSECEAGALRCRGQSISVTSIRPCAAETQ

SEQ ID NO: 908259 - protein, 726 aa, Homo sapiens
MKVISLFILVGFIGEFQSFSSASSPVNCQWDFYAPWSECNGCTKTQTRRRSVAVYGQYGGQPCVGNAFETQSCEPTRGCPTEEGCGERFRCFSGQCISKSLVCNGDSDCDEDSADEDRCEDSERRPSCDIDKPPPNIELTGNGYNELTGQFRNRVINTKSFGGQCRKVFSGDGKDFYRLSGNVLSYTFQVKINNDFNYEFYNSTWSYVKHTSTEHTSSSRKRSFFRSSSSSSRSYTSHTNEIHKGKSYQLLVVENTVEVAQFINNNPEFLQLAEPFWKELSHLPSLYDYSAYRRLIDQYGTHYLQSGSLGGEYRVLFYVDSEKLKQNDFNSVEEKKCKSSGWHFVVKFSSHGCKELENALKAASGTQNNVLRGEPFIRGGGAGFISGLSYLELDNPAGNKRRYSAWAESVTNLPQVIKQKLTPLYELVKEVPCASVKKLYLKWALEEYLDEFDPCHCRPCQNGGLATVEGTHCLCHCKPYTFGAACEQGVLVGNQAGGVDGGWSCWSSWSPCVQGKKTRSRECNNPPPSGGGRSCVGETTESTQCEDEELEHLRLLEPHCFPLSLVPTEFCPSPPALKDGFVQDEGTMFPVGKNVVYTCNEGYSLIGNPVARCGEDLRWLVGEMHCQKIACVLPVLMDGIQSHPQKPFYTVGEKVTVSCSGGMSLEGPSAFLCGSSLKWSPEMKNARCVQKENPLTQAVPKFRARPGSELRPGSGDDGERLLGLGV

SEQ ID NO: 908260 - protein, 253 aa, Homo sapiens
MKVISLFILVGFIGEFQSFSSASSPVNCQWDFYAPWSECNGCTKTQTRRRSVAVYGQYGGQPCVGNAFETQSCEPTRGCPTEEGCGERFRCFSGQCISKSLVCNGDSDCDEDSADEDRCEDSERRPSCDIDKPPPNIELTGNGYNELTGQFRNRVINTKSFGGQCRKVFSGDGKDFYRLSGNVLSYTFQVKINNDFNYEFYNSTWSYVKHTSTEHTSSSRKRSFFRSSSSSSRSYTSHTNEIHKGKVSIKCQL

SEQ ID NO: 908261 - protein, 843 aa, Homo sapiens; identical to SEQ ID NO: 908258

SEQ ID NO: 908262 - protein, 375 aa, Homo sapiens
  misc_feature (4)..(4): Xaa can be any naturally occurring amino acid
  misc_feature (8)..(8): Xaa can be any naturally occurring amino acid
RLLXLCCXKDDRRFGAACEQGVLVGNQAGGVDGGWSCWSSWSPCVQGKKTRSRECNNPPPSGGGRSCVGETTESTQCEDEELEHLRLLEPHCFPLSLVPTEFCPSPPALKDGFVQDEGTMFPVGKNVVYTCNEGYSLIGNPVARCGEDLRWLVGEMHCQKIACVLPVLMDGIQSHPQKPFYTVGEKVTVSCSGGMSLEGPSAFLCGSSLKWSPEMKNARCVQKENPLTQAVPKCQRWEKLQNSRCVCKMPYECGPSLDVCAQDERSKRILPLTVCKMHVLHCQGRNYTLTGRDSCTLPASAEKACGACPLWGKCDAESSKCVCREASECEEEGFSICVEVNGKEQTMSECEAGALRCRGQSISVTSIRPCAAETQ

SEQ ID NO: 908263 - protein, 843 aa, Homo sapiens; identical to SEQ ID NO: 908258

SEQ ID NO: 908264 - protein, 843 aa, Homo sapiens; identical to SEQ ID NO: 908258

SEQ ID NO: 908265 - protein, 784 aa, Homo sapiens
MKVISLFILVGFIGEFQSFSSASSPVNCQWDFYAPWSECNGCTKTQTRRRSVAVYGQYGGQPCVGNAFETQSCEPTRGCPTEEGCGERFRCFSGQCISKSLVCNGDSDCDEDSADEDRCEDSERRPSCDIDKPPPNIELTGNGYNELTGQFRNRVINTKSFGGQCRKVFSGDGKDFYRLSGNVLSYTFQVKINNDFNYEFYNSTWSYVKHTSTEHTSSSRKRSFFRSSSSSSRSYTSHTNEIHKGKSYQLLVVENTVEVAQFINNNPEFLQLAEPFWKELSHLPSLYDYSAYRRLIDQYGTHYLQSGSLGGEYRVLFYVDSEKLKQNDFNSVEEKKCKSSGWHFVVKFSSHGCKELENALKAASGTQNNVLRGEPFIRGGGAGFISGLSYLELDNPAGNKRRYSAWAESVTNLPQVIKQKLTPLYELVKEVPCASVKKLYLKWALEEYLDEFDPCHCRPCQNGGLATVEGTHCLCHCKPYTFGAACEQGVLVGNQAGGVDGGWSCWSSWSPCVQGKKTRSRECNNPPPSGGGRSCVGETTESTQCEDEELEHLRLLEPHCFPLSLVPTEFCPSPPALKDGFVQDEGTMFPVGKNVVYTCNEGYSLIGNPVARCGEDLRWLVGEMHCQKIACVLPVLMDGIQSHPQKPFYTVGEKVTVSCSGGMSLEGPSAFLCGSSLKWSPEMKNARCVQKENPLTQAVPKCQRWEKLQNSRCVCKMPYECGPSLDVCAQDERSKRILPLTVCKMHVLHCQGRNYTLTGRDSCTLPASAEKACGACPLWGKCDV

SEQ ID NO: 908266 - protein, 164 aa, Homo sapiens
MKVISLFILVGFIGEFQSFSSASSPVNCQWDFYAPWSECNGCTKTQTRRRSVAVYGQYGGQPCVGNAFETQSCEPTRGCPTEEGCGERFRCFSGQCISKSLVCNGDSDCDEDSADEDRCEDSERRPSCDIDKPPPNIELTGNGFNSKPAVAIDTKEPCVSQICS

SEQ ID NO: 908267 - protein, 1082 aa, Homo sapiens
CSARCSASYLGFQFDKKRLPVEESEGKEEELAHSCLGGCGRRKMARALCPLQALWLLEWVLLLLGPCAAPPAWALNLDPVQLTFYAGPNGSQFGFSLDFHKDSHGRVAIVVGAPRTLGPSQEETGGVFLCPWRAEGGQCPSLLFDLRDETRNVGSQTLQTFKARQGLGASVVSWSDVIVACAPWQHWNVLEKTEEAEKTPVGSCFLAQPESGRRAEYSPCRGNTLSRIYVENDFSWDKRYCEAGFSSVVTQAGELVLGAPGGYYFLGLLAQAPVADIFSSYRPGILLWHVSSQSLSFDSSNPEYFDGYWGYSVAVGEFDGDLNTTEYVVGAPTWSWTLGAVEILDSYYQRLHRLRAEQMASYFGHSVAVTDVNGDGRHDLLVGAPLYMESRADRKLAEVGRVYLFLQPRGPHALGAPSLLLTGTQLYGRFGSAIAPLGDLDRDGYNDIAVAAPYGGPSGRGQVLVFLGQSEGLRSRPSQVLDSPFPTGSAFGFSLRGAVDIDDNGYPDLIVGAYGANQVAVYRAQPVVKASVQLLVQDSLNPAVKSCVLPQTKTPVSCFNIQMCVGATGHNIPQKLSLNAELQLDRQKPRQGRRVLLLGSQQAGTTLNLDLGGKHSPICHTTMAFLRDEADFRDKLSPIVLSLNVSLPPTEAGMAPAVVLHGDTHVQEQTRIVLDCGEDDVCVPQLQLTASVTGSPLLVGADNVLELQMDAANEGEGAYEAELAVHLPQGAHYMRALSNVEGFERLICNQKKENETRVVLCELGNPMKKNAQIGIAMLVSVGNLEEAGESVSFQLQIRSKNSQNPNSKIVLLDVPVRAEAQVELRGNSFPASLVVAAEEGEREQNSLDSWGPKVEHTYELHNNGPGTVNGLHLSIHLPGQSQPSDLLYILDIQPQGGLQCFPQPPVNPLKVDWGLPIPSPSPIHPAHHKRDRRQIFLPEPEQPSRLQDPVLVSCDSAPCTVVQCDLQEMARGQRAMVTVLAFLWLPSLYQRPLDQFVLQSHAWFNVSSLPYAVPPLSLPRGEAQVWTQLLRALEERAIPIWWVLVGVLGGLLLLTILVLAMWKVGFFKRNRPPLEEDDEEGE

SEQ ID NO: 908268 - protein, 227 aa, Homo sapiens
KILKGAWARWLTPVIPALWEPKVGRSLEVRSSRSAWPNSFPASLVVAAEEGEREQNSLDSWGPKVEHTYELHNNGPGTVNGLHLSIHLPGQSQPSDLLYILDIQPQGGLQCFPQPPVNPLKVDWGLPIPSPSPIHPAHHKRDRRQIFLPEPEQPSRLQDPVLVSCDSAPCTVVQCDLQEMARGQRAMVTVLAFLWLPSLYQRPLDQFVLQSHAWFNVSFEEEAKCSS

SEQ ID NO: 908269 - protein, 1136 aa, Homo sapiens
CSARCSASYLGFQFDKKRLPVEESEGKEEELAHSCLGGCGRRKMARALCPLQALWLLEWVLLLLGPCAAPPAWALNLDPVQLTFYAGPNGSQFGFSLDFHKDSHGRVAIVVGAPRTLGPSQEETGGVFLCPWRAEGGQCPSLLFDLRESQARRAGWGQRDVDCRASAPHPFLCLPGDETRNVGSQTLQTFKARQGLGASVVSWSDVIVVGPAVQGTGNNRGQGHLGPGGAQVSRPSPPPVAFLQACAPWQHWNVLEKTEEAEKTPVGSCFLAQPESGRRAEYSPCRGNTLSRIYVENDFSWDKRYCEAGFSSVVTQAVGSKSAVGAAPKQGPLSPSGLPFQAGELVLGAPGGYYFLGLLAQAPVADIFSSYRPGILLWHVSSQSLSFDSSNPEYFDGYWGYSVAVGEFDGDLNTTEYVVGAPTWSWTLERRHDLLVGAPLYMESRADRKLAEVGRVYLFLQPRGPHALGAPSLLLTGTQLYGRFGSAIAPLGDLDRDGYNDIAVAAPYGGPSGRGQVLVFLGQSEGLRSRPSQVLDSPFPTGSAFGFSLRGAVDIDDNGYPDLIVGAYGANQVAVYRAQPVVKASVQLLVQDSLNPAVKSCVLPQTKTPVSCFNIQMCVGATGHNIPQKLSLNAELQLDRQKPRQGRRVLLLGSQQAGTTLNLDLGGKHSPICHTTMAFLRDEADFRDKLSPIVLSLNVSLPPTEAGMAPAVVLHGDTHVQEQTRIVLDCGEDDVCVPQLQLTASVTGSPLLVGADNVLELQMDAANEGEGAYEAELAVHLPQGAHYMRALSNVEGFERLICNQKKENETRVVLCELGNPMKKNAQIGIAMLVSVGNLEEAGESVSFQLQIRSKNSQNPNSKIVLLDVPVRAEAQVELRGNSFPASLVVAAEEGEREQNSLDSWGPKVEHTYELHNNGPGTVNGLHLSIHLPGQSQPSDLLYILDIQPQGGLQCFPQPPVNPLKVDWGLPIPSPSPIHPAHHKRDRRQIFLPEPEQPSRLQDPVLVSCDSAPCTVVQCDLQEMARGQRAMVTVLAFLWLPSLYQRPLDQFVLQSHAWFNVSSLPYAVPPLSLPRGEAQVWTQLLRALEERAIPIWWVLVGVLGGLLLLTILVLAMWKVGFFKRNRPPLEEDDEEGE

SEQ ID NO: 908270 - protein, 1108 aa, Homo sapiens
CSARCSASYLGFQFDKKRLPVEESEGKEEELAHSCLGGCGRRKMARALCPLQALWLLEWVLLLLGPCAAPPAWALNLDPVQLTFYAGPNGSQFGFSLDFHKDSHGRVAIVVGAPRTLGPSQEETGGVFLCPWRAEGGQCPSLLFDLRESQARRAGWGQRDVDCRASAPHPFLCLPGDETRNVGSQTLQTFKARQGLGASVVSWSDVIVVGPAVQGTGNNRGQGHLGPGGAQVSRPSPPPVAFLQACAPWQHWNVLEKTEEAEKTPVGSCFLAQPESGRRAEYSPCRGNTLSRIYVENDFSWDKRYCEAGFSSVVTQAGELVLGAPGGYYFLGLLAQAPVADIFSSYRPGILLWHVSSQSLSFDSSNPEYFDGYWGYSVAVGEFDGDLNTTEYVVGAPTWSWTLGAVEILDSYYQRLHRLRAEQMASYFGHSVAVTDVNGDGRHDLLVGAPLYMESRADRKLAEVGRVYLFLQPRGPHALGAPSLLLTGTQLYGRFGSAIAPLGDLDRDGYNDIAVAAPYGGPSGRGQVLVFLGQSEGLRSRPSQVLDSPFPTGSAFGFSLRGAVDIDDNGYPDLIVGAYGANQVAVYRAQPVVKASVQLLVQDSLNPAVKSCVLPQTKTPVSCFNIQMCVGATGHNIPQKLSLNAELQLDRQKPRQGRRVLLLGSQQAGTTLNLDLGGKHSPICHTTMAFLRDEADFRDKLSPIVLSLNVSLPPTEAGMAPAVVLHGDTHVQEQTRIVLDCGEDDVCVPQLQLTASVTGSPLLVGADNVLELQMDAANEGEGAYEAELAVHLPQGAHYMRALSNVEGFERLICNQKKENETRVVLCELGNPMKKNAQIGIAMLVSVGNLEEAGESVSFQLQIRSKNSQNPNSKIVLLDVPVRAEAQVELRGNSFPASLVVAAEEGEREQNSLDSWGPKVEHTYELHNNGPGTVNGLHLSIHLPGQSQPSDLLYILDIQPQGGLQCFPQPPVNPLKVDWGLPIPSPSPIHPAHHKRDRRQIFLPEPEQPSRLQDPVLVSCDSAPCTVVQCDLQEMARGQRAMVTVLAFLWLPSLYQRPLDQFVLQSHAWFNVSSLPYAVPPLSLPRGEAQVGFFKRNRPPLEEDDEEGE

SEQ ID NO: 908271 - protein, 1147 aa, Homo sapiens
CSARCSASYLGFQFDKKRLPVEESEGKEEELAHSCLGGCGRRKMARALCPLQALWLLEWVLLLLGPCAAPPAWALNLDPVQLTFYAGPNGSQFGFSLDFHKDSHGRVAIVVGAPRTLGPSQEETGGVFLCPWRAEGGQCPSLLFDLRESQARRAGWGQRDVDCRASAPHPFLCLPGDETRNVGSQTLQTFKARQGLGASVVSWSDVIVVGPAVQGTGNNRGQGHLGPGGAQVSRPSPPPVAFLQACAPWQHWNVLEKTEEAEKTPVGSCFLAQPESGRRAEYSPCRGNTLSRIYVENDFSWDKRYCEAGFSSVVTQAGELVLGAPGGYYFLGLLAQAPVADIFSSYRPGILLWHVSSQSLSFDSSNPEYFDGYWGYSVAVGEFDGDLNTTEYVVGAPTWSWTLGAVEILDSYYQRLHRLRAEQMASYFGHSVAVTDVNGDGRHDLLVGAPLYMESRADRKLAEVGRVYLFLQPRGPHALGAPSLLLTGTQLYGRFGSAIAPLGDLDRDGYNDIAVAAPYGGPSGRGQVLVFLGQSEGLRSRPSQVLDSPFPTGSAFGFSLRGAVDIDDNGYPDLIVGAYGANQVAVYRAQPVVKASVQLLVQDSLNPAVKSCVLPQTKTPVSCFNIQMCVGATGHNIPQKLSLNAELQLDRQKPRQGRRVLLLGSQQAGTTLNLDLGGKHSPICHTTMAFLRDEADFRDKLSPIVLSLNVSLPPTEAGMAPAVVLHGDTHVQEQTRIVLDCGEDDVCVPQLQLTASVTGSPLLVGADNVLELQMDAANEGEGAYEAELAVHLPQGAHYMRALSNVEGFERLICNQKKENETRVVLCELGNPMKKNAQIGIAMLVSVGNLEEAGESVSFQLQIRSKNSQNPNSKIVLLDVPVRAEAQVELRGNSFPASLVVAAEEGEREQNSLDSWGPKVEHTYELHNNGPGTVNGLHLSIHLPGQSQPSDLLYILDIQPQGGLQCFPQPPVNPLKVDWGLPIPSPSPIHPAHHKRDRRQIFLPEPEQPSRLQDPVLVSCDSAPCTVVQCDLQEMARGQRAMVTVLAFLWLPSLYQRPLDQFVLQSHAWFNVSSLPYAVPPLSLPRGEAQVWTQLLRALEERAIPIWWVLVGVLGGLLLLTILVLAMWKVGFFKRNRPPLEEDDEEGE

SEQ ID NO: 908272 - protein, 1061 aa, Homo sapiens
CSARCSASYLGFQFDKKRLPVEESEGKEEELAHSCLGGCGRRKMARALCPLQALWLLEWVLLLLGPCAAPPAWALNLDPVQLTFYAGPNGSQFGFSLDFHKDSHGRVAIVVGAPRTLGPSQEETGGVFLCPWRAEGGQCPSLLFDLRESQARRAGWGQRDVDCRASAPHPFLCLPGDETRNVGSQTLQTFKARQGLGASVVSWSDVIVVGPAVQGTGNNRGQGHLGPGGAQVSRPSPPPVAFLQACAPWQHWNVLEKTEEAEKTPVGSCFLAQPESGRRAEYSPCRGNTLSRIYVENDFSWDKRYCEAGFSSVVTQAGELVLGAPGGYYFLGLLAQAPVADIFSSYRPGILLWHVSSQSLSFDSSNPEYFDGYWGYSVAVGEFDGDLNTTEYVVGAPTWSWTLGAVEILDSYYQRLHRLRAEQMASYFGHSVAVTDVNGDGRHDLLVGAPLYMESRADRKLAEVGRVYLFLQPRGPHALGAPSLLLTGTQLYGRFGSAIAPLGDLDRDGYNDIAVAAPYGGPSGRGQVLVFLGQSEGLRSRPSQVLDSPFPTGSAFGFSLRGAVDIDDNGYPDLIVGAYGANQVAVYRAQPVVKASVQLLVQDSLNPAVKSCVLPQTKTPVSCFNIQMCVGATGHNIPQKLSLNAELQLDRQKPRQGRRVLLLGSQQAGTTLNLDLGGKHSPICHTTMAFLRDEADFRDKLSPIVLSLNVSLPPTEAGMAPAVVLHGDTHVQEQTRIVLDCGEDDVCVPQLQLTASVTGSPLLVGADNVLELQMDAANEGEGAYEAELAVHLPQGAHYMRALSNVEGFERLICNQKKENETRVVLCELGNPMKKNAQIGIAMLVSVGNLEEAGESVSFQLQIRSKNSQNPNSKIVLLDVPVRAEAQVELRGNSFPASLVVAAEEGEREQNSLDSWGPKVEHTYELHNNGPGTVNGLHLSIHLPGQSQPSDLLYILDIQPQGGLQCFPQPPVNPLKVDWGLPIPSPSPIHPAHHKRDRRQIFLPEPEQPSRLQDPVLVVSRLSGLWPGLPGTHGAEGMGGGRGVRVCCGPLWATLGPWEHFK

SEQ ID NO: 908273 - protein, 164 aa, Homo sapiens
GYAGICAALTQLSYAEWPSWWAPRGPWAPARRRRAACSCAPGGPRAASAPRCSLTSVSPRQGEQGWGQRDVDCRASAPHPFLCLPGDETRNVGSQTLQTFKARQGLGASVVSWSDVIVVGPAVQGTGNNRGQGHLGPGGAQVSRPSPLLWPFSRPAPPGSTGTS

SEQ ID NO: 908274 - protein, 369 aa, Homo sapiens [sequence omitted]

SEQ ID NO: 908275 - protein, 410 aa, Homo sapiens
MWSGRKLGSSGGWFLRVLGPGGCNTKAARPLISSAVYVKNQLSGTLQIKPGVFNEYRTIWFKSYRTIFSCLNRIKSFRWSFTSVAQAGVQWCDLGSLQPPPPGFKRFSCLSLLSHWDYRYPWARLYSTSQTTVDSGEVKTFLALAHKWWDEQGVYAPLHSMNDLRVPFIRDNLLKTIPNHQPGKPLLGMKILDVGCGGGLLTEPLGRLGASVIGIDPVDENIKTAQCHKSFDPVLDKRIEYRVCSLEEIVEETAETFDAVVASEVVEHVIDLETFLQCCCQVLKPGGSLFITTINKTQLSYALGIVFSEQIAGIVPKGTHTWEKFVSPETLESILESNGLSVQTVVGMLYNPFSGYWHWSENTSLNYAAHAVKSRVQEHPASAEFVLKGETEELQANACTNPAVHEKLKK

SEQ ID NO: 908276 - protein, 151 aa, Homo sapiens
  misc_feature (7)..(7): Xaa can be any naturally occurring amino acid
  misc_feature (9)..(9): Xaa can be any naturally occurring amino acid
FYGGISXFXWPVFPDTPPHIKITHFPGGSLFITTINKTQLSYALGIVFSEQIAGIVPKGTHTWEKFVSPETLESILESNGLSVQTVVGMLYNPFSGYWHWSENTSLNYAAHAVKSRVQEHPASAEFVLKGETEELQANACTNPAVHEKLKK

SEQ ID NO: 908277 - protein, 369 aa, Homo sapiens [sequence omitted]

SEQ ID NO: 908278 - protein, 250 aa, Homo sapiens
MNDLRVPFIRDNLLKTIPNHQPGKPLLGMKILDVGCGGGLLTEPLGRLGASVIGIDPVDENIKTAQCHKSFDPVLDKRIEYRVCSLEEIVEETAETFDAVVASEVVEHVIDLETFLQCCCQVLKPGGSLFITTINKTQLSYALGIVFSEQIAGIVPKGTHTWEKFVSPETLESILESNGLSVQTVVGMLYNPFSGYWHWSENTSLNYAAHAVKSRVQEHPASAEFVLKGETEELQANACTNPAVHEKLKK

SEQ ID NO: 908279 - protein, 289 aa, Homo sapiens
MVGVKPVGSDPDFQPELSGAGSRLAVVKFTMRGCGPCLRIAPAFSSMSNKYPQAVFLEVDVHQCQGTAATNNISATPTFLFFRNKVRIDQYQGADAVGLEEKIKQHLENDPGSNEDTDIPKGYMDLMPFINKAGCECLNESDEHGFDNCLRKDTTFLESDCDEQLLITVAFNQPVKLYSMKFQGPDNGQGPKYVKIFINLPRSMDFEEAERSEPTQALELTEDDIKEDGIVPLRYVKFQNVNSVTIFVQSNQGEEETTRISYFTFIGTPVQATNMNDFKRVVGKKGESH

SEQ ID NO: 908280 - protein, 166 aa, Homo sapiens
MVGVKPVGSDPDFQPELSGAGSRLAVVKFTMRGCGPCLRIAPAFSSMSNKYPQAVFLEVDVHQCQGTAATNNISATPTFLFFRNKVRIDQYQGADAVGLEEKIKQHLENDPGSNEDTDIPKGYMDLMPFINKAGCECLNESDEHGFDNCLRCLLLWHSINLLSFIP

SEQ ID NO: 908281 - protein, 289 aa, Homo sapiens; identical to SEQ ID NO: 908279

SEQ ID NO: 908282 - protein, 289 aa, Homo sapiens; identical to SEQ ID NO: 908279

SEQ ID NO: 908283 - protein, 289 aa, Homo sapiens; identical to SEQ ID NO: 908279

SEQ ID NO: 908284 - protein, 322 aa, Homo sapiens
MVGVKPVGSDPDFQPELSGAGSRLAVVKFTMRGCGPCLRIAPAFSSMSNKYPQAVFLEVDVHQCQGTAATNNISATPTFLFFRNKVRIDQYQGADAVGLEEKIKQHLENDPGSNEDTDIPKGYMDLMPFINKAGCECLNESDEHGFDNCLRKDTTFLESDCDEQLLITVAFNQPVKLYSMKFQGPDNGQGPKYVKIFINLPRSMDFEEAERSEPTQALELTEDDIKEDGIVPLRYVKFQNVNSVTIFVQSNQGEEETTRISYFTFIGTPVQATNMNDFKRHLSALTLPMFSPLLVQDFYSFYHLDQPCYLGFLNHLFLQISS

SEQ ID NO: 908285 - protein, 293 aa, Homo sapiens
MVGVKPVGSDPDFQPELSGAGSRLAVVKFTMRGCGPCLRIAPAFSSMSNKYPQAVFLEVDVHQCQGTAATNNISATPTFLFFRNKVRIDQYQGADAVGLEEKIKQHLENDPGSNEDTDIPKGYMDLMPFINKAGCECLNESDEHGFDNCLRKDTTFLESDCDEQLLITVAFNQPVKLYSMKFQGPDNGQGPKYVKIFINLPRSMDFEEAERSEPTQALELTEDDIKEDGIVPLRYVKFQNVNSVTIFVQSNQGEEETTRISYFTQQSLYWVYIINHSTIKTHAHIYSLQHGLS

SEQ ID NO: 908286 - protein, 244 aa, Homo sapiens
LYSFLGHHRLFLGVDVHQCQGTAATNNISATPTFLFFRNKVRIDQYQGADAVGLEEKIKQHLENDPGSNEDTDIPKGYMDLMPFINKAGCECLNESDEHGFDNCLRKDTTFLESDCDEQLLITVAFNQPVKLYSMKFQGPDNGQGPKYVKIFINLPRSMDFEEAERSEPTQALELTEDDIKEDGIVPLRYVKFQNVNSVTIFVQSNQGEEETTRISYFTFIGTPVQATNMNDFKRVVGKKGESH

SEQ ID NO: 908287 - protein, 269 aa, Homo sapiens
MVGVKPVGSDPDFQPELSGAGSRLAVVKFTMRGCGPCLRIAPAFSSMSNKYPQAVFLEVDVHQCQGTAATNNISATPTFLFFRNKVRIDQYQGADAVGLEEKIKQHLENDPGSNEDTDIPKGYMDLMPFINKAGCECLNESDEHGFDNCLRKDTTFLESDCDEQLLITVAFNQPVKLYSMKFQGPDNEAERSEPTQALELTEDDIKEDGIVPLRYVKFQNVNSVTIFVQSNQGEEETTRISYFTFIGTPVQATNMNDFKRVVGKKGESH

SEQ ID NO: 908288 - protein, 175 aa, Homo sapiens
MVGVKPVGSDPDFQPELSGAGSRLAVVKFTMRGCGPCLRIAPAFSSMSNKYPQAVFLEVDVHQCQGTAATNNISATPTFLFFRNKVRIDQYQGADAVGLEEKIKQHLENDPGSNEDTDIPKGYMDLMPFINKAGCECLNESDEHGFDNCLRKDTTFLESDCDEQTCYYYYIQSNL

SEQ ID NO: 908289 - protein, 289 aa, Homo sapiens; identical to SEQ ID NO: 908279

SEQ ID NO: 908290 - protein, 289 aa, Homo sapiens; identical to SEQ ID NO: 908279

SEQ ID NO: 908291 - protein, 325 aa, Homo sapiens
MVGVKPVGSDPDFQPELSGAGSRLAVVKFTMRGCGPCLRIAPAFSSMSNKYPQAVFLEVDVHQCQGTAATNNISATPTFLFFRNKVRIDQYQGADAVGLEEKIKQHLENDPGSNEDTDIPKGYMDLMPFINKAGCECLNESDEHGFDNCLRKDTTFLESDCDEQLLITVAFNQPVKLYSMKFQGPDNGQGPKYVKIFINLPRSMDFEEAERSEPTQALELTEDDIKEDGIVPLRYVKFQNVNSVTIFVQSNQGEEETTRISYFTFIGTPVQATNMNDFKRHLSALTLPMFSPLLVQDFYSFYHLDQPCYLENTHWQVESYQPVKQ

SEQ ID NO: 908292 - protein, 130 aa, Homo sapiens
AAGCRTPSHPPPLPSPIPPRPLGRSAPWRDSALRVPGEDSAVATSSVQASAFLSISPSSPRSSSPSVSKPVASRPPCRALCEDGGGEARRERPGFPARAERRGLQTRRGQVHHERVWAMFEDCPSIQFYE

SEQ ID NO: 908293 - protein, 166 aa, Homo sapiens; identical to SEQ ID NO: 908280

SEQ ID NO: 908294 - protein, 134 aa, Homo sapiens
NETLIFTAALLITVAFNQPVKLYSMKFQGPDNGQGPKYVKIFINLPRSMDFEEAERSEPTQALELTEDDIKEDGIVPLRYVKFQNVNSVTIFVQSNQGEEETTRISYFTFIGTPVQATNMNDFKRVVGKKGESH

SEQ ID NO: 908295 - protein, 96 aa, Homo sapiens
LVLEVSIAEVQVDRGQEHDHVLDHILQEDTIIIGGVDLEHTARDQEAGPAVTVKALEDIIIMVLLTFKAKHTRDDLKRLWLCNSSKAQFPLTQPLR

SEQ ID NO: 908296 - protein, 215 aa, Homo sapiens
MTSRSTARPNGQPQASKICQFKLVLLGESAVGKSSLVLRFVKGQFHEYQESTIGAAFLTQSVCLDDTTVKFEIWDTAGQERYHSLAPMYYRGAQAAIVVYDITNQETFARAKTWVKELQRQASPSIVIALAGNKADLANKRMVEYEEAQAYADDNSLLFMETSAKTAMNVNDLFLAIAKKLPKSEPQNLGGAAGRSRGVDLHEQSQQNKSQCCSN

SEQ ID NO: 908297 - protein, 279 aa, Homo sapiens
RARRRRRGRRVWLSCSCLSVRHRLGADGGDGAPGVLKPGNPLPFPLPPLQYPPPSTLSHSDNLAMTSRSTARPNGQPQASKICQFKLVLLGESAVGKSSLVLRFVKGQFHEYQESTIGAAFLTQSVCLDDTTVKFEIWDTAGQERYHSLAPMYYRGAQAAIVVYDITNQETFARAKTWVKELQRQASPSIVIALAGNKADLANKRMVEYEEAQAYADDNSLLFMETSAKTAMNVNDLFLAIAKKLPKSEPQNLGGAAGRSRGVDLHEQSQQNKSQCCSN

SEQ ID NO: 908298 - protein, 101 aa, Homo sapiens
PPPKSHPSPSPRWKKATVRGWDMNWQREWGGKISGTRQEVPCKLTGRRWRCSVNCGSVTLQRPSFPSRSLLGSVSPNRGGWTPESSKEFSLVACIFGSAVI

SEQ ID NO: 908299 - protein, 279 aa, Homo sapiens; identical to SEQ ID NO: 908297

SEQ ID NO: 908300 - protein, 242 aa, Homo sapiens
RARRRRRGRRVWLSCSCLSVRHRLGADGGDGAPGVLKPGNPLPFPLPPLQYPPPSTLSHSDNLAMTSRSTARPNGQPQASKICQFKLVLLGESAVGKSSLVLRFVKGQFHEYQESTIGAAFLTQSVCLDDTTVKFEIWDTAGQERYHSLAPMYYRGAQAAIVVYDITNQETFARAKTWVKELQRQASPSIVIALAGNKADLANKRMVEYEVRWPVEFLSNTSSVPGTSFFPNQPGPAPSPAR

SEQ ID NO: 908301 - protein, 279 aa, Homo sapiens; identical to SEQ ID NO: 908297

SEQ ID NO: 908302 - protein, 275 aa, Homo sapiens
RARRRRRGRRVWLSCSCLSVRHRLGADGGDGAPGVLKPGNPLPFPLPPLQYPPPSTLSHSDNLAMTSRSTARPNGQPQASKICQFKLVLLGESAVGKSSLVLRFVKGQFHEYQESTIGAAFLTQSVCLDDTTVKFEIWDTAGQERYHSLAPMYYRGAQAAIVVYDITNQETFARAKTWVKELQRQASPSIVIALAGNKADLANKRMVEYEEAQAYADDNSLLFMETSAKTAMNVNDLFLAIAKKLPKSEPQNLGGAAGRSRGVDLHEQSQQNKNG

SEQ ID NO: 908303 - protein, 279 aa, Homo sapiens; identical to SEQ ID NO: 908297

SEQ ID NO: 908304 - protein, 279 aa, Homo sapiens; identical to SEQ ID NO: 908297

SEQ ID NO: 908305 - protein, 191 aa, Homo sapiens
GEEEKEGQEGWLSCSCLSVRHRLGADGGDGAPGVLKPGNPLPFPLPPLQYPPPSTLSHSDNLAMTSRSTARPNGQPQASKICQFKLVLLGESAVGKSSLVLRFVKGQFHEYQESTIGAAFLTQSVCLDDTTVKFEIWDTAGQERYHSLAHNDNYMGLHHKHFPITTFCNPTHCARPDKTGSNEHQRHTCRY

SEQ ID NO: 908306 - protein, 316 aa, Homo sapiens
MLSKLGHSPLGGLRARLTFPVCLLYHRLWASPAAPGKKKEMGNSMKSTPAPAERPLPNPEGLDSDFLAVLSDYPSPDISPPIFRRGEKLRVISDEGGWWKAISLSTGRESYIPGICVARVYHGWLFEGLGRDKAEELLQLPDTKVGSFMIRESETKKGFYSLSVRHRQVKHYRIFRLPNNWYYISPRLTFQCLEDLVNHYSEVADGLCCVLTTPCLTQSTAAPAVRASSSPVTLRQKTVDWRRVSRLQEDPEGTENPLGVDESLFSYGLRESIASYLSLTSEDNTSFDRKKKSISLMYGGSKRKSSFFSSPPYFED

SEQ ID NO: 908307 - protein, 77 aa, Homo sapiens
AAWFLTQTLLWLLTILSKGAEEWKLLPPTAFASNFPLCGFSVIPLIKELELRKSNQSSPISSSHINSRLSRSKLPEK

SEQ ID NO: 908308 - protein, 272 aa, Homo sapiens [sequence omitted]

SEQ ID NO: 908309 - protein, 272 aa, Homo sapiens [sequence omitted]

SEQ ID NO: 908310 - protein, 272 aa, Homo sapiens [sequence omitted]

SEQ ID NO: 908311 - protein, 272 aa, Homo sapiens [sequence omitted]

SEQ ID NO: 908312 - protein, 426 aa, Homo sapiens
MSGGVYGGDEVGALVFDIGSFSVRAGYAGEDCPKADFPTTVGLLAAEEGGGLELEGDKEKKGKIFHIDTNALHVPRDGAEVMSPLKNGMIEDWECFRAILDHTYSKHVKSEPNLHPVLMSEAPWNTRAKREKLTELMFEQYNIPAFFLCKTAVLTAFANGRSTGLVLDSGATHTTAIPVHDGYVLQQGIVKSPLAGDFISMQCRELFQEMAIDIIPPYMIAAKEPVREGAPPNWKKKEKLPQVSKSWHNYMCNEVIQDFQASVLQVSDSPYDEQVAAQMPTVHYEMPNGYNTDYGAERLRIPEGLFDPSNVKGLSGNTMLGVGHVVTTSIGMCDIDIRPGLYGSVIVTGGNTLLQGFTDRLNRELSQKTPPSMRLKLIASNSTMERKFSPWIGGSILASLGTFQQMWISKQEYEEGGKQCVERKCP

SEQ ID NO: 908313 - protein, 290 aa, Homo sapiens
MFEQYNIPAFFLCKTAVLTAFANGRSTGLVLDSGATHTTAIPVHDGYVLQQGIVKSPLAGDFISMQCRELFQEMAIDIIPPYMIAAKEPVREGAPPNWKKKEKLPQVSKSWHNYMCNEVIQDFQASVLQVSDSPYDEQVAAQMPTVHYEMPNGYNTDYGAERLRIPEGLFDPSNVKGLSGNTMLGVGHVVTTSIGMCDIDIRPGLYGSVIVTGGNTLLQGFTDRLNRELSQKTPPSMRLKLIASNSTMERKFSPWIGGSILASLGTFQQMWISKQEYEEGGKQCVERKCP

SEQ ID NO: 908314 - protein, 277 aa, Homo sapiens
TYPSDASFANGRSTGLVLDSGATHTTAIPVHDGYVLQQGIVKSPLAGDFISMQCRELFQEMAIDIIPPYMIAAKEPVREGAPPNWKKKEKLPQVSKSWHNYMCNEVIQDFQASVLQVSDSPYDEQVAAQMPTVHYEMPNGYNTDYGAERLRIPEGLFDPSNVKGLSGNTMLGVGHVVTTSIGMCDIDIRPGLYGSVIVTGGNTLLQGFTDRLNRELSQKTPPSMRLKLIASNSTMERKFSPWIGGSILASLGTFQQMWISKQEYEEGGKQCVERKCP

SEQ ID NO: 908315 - protein, 160 aa, Homo sapiens
MSGGVYGGDEVGALVFDIGSFSVRAGYAGEDCPKADFPTTVGLLAAEEGGGLELEGDKEKKGKIFHIDTNALHVPRDGAEVMSPLKNGMIEDWECFRAILDHTYSKHVKSEPNLHPVLMSEAPWNTRAKREKLTELMFEQYNIPAFFLCKTAVLTAYPLD

SEQ ID NO: 908316 - protein, 233 aa, Homo sapiens
MSGGVYGGDEVGALVFDIGSFSVRAGYAGEDCPKADFPTTVGLLAAEEGGGLELEGDKEKKGKIFHIDTNALHVPRDGAEVMSPLKNGMIEDWECFRAILDHTYSKHVKSEPNLHPVLMSEAPWNTRAKREKLTELMFEQYNIPAFFLCKTAVLTAFANGRSTGLVLDSGATHTTAIPVHDGYVLQQGIVKSPLAGDFISMQCRELFQEMAIDIIPPYMIAAKVGPLGTWSCH

SEQ ID NO: 908317 - protein, 254 aa, Homo sapiens
PLAGSTAEPAAPGSCRAGNSARKVGVGVRWARKGCSYTVPPQEPVREGAPPNWKKKEKLPQVSKSWHNYMCNEVIQDFQASVLQVSDSPYDEQQSPAPFWVGVAAQMPTVHYEMPNGYNTDYGAERLRIPEGLFDPSNVKGLSGNTMLGVGHVVTTSIGMCDIDIRPGLYGSVIVTGGNTLLQGFTDRLNRELSQKTPPSMRLKLIASNSTMERKFSPWIGGSILASLGTFQQMWISKQEYEEGGKQCVERKCP

SEQ ID NO: 908318 - protein, 252 aa, Homo sapiens
PPPAASTLAARAAAGWTLLARGAMSRSLDSARSFLERLEARGGREGAVLAGEFSVSGTRGPRAARPGPGPAYACPPRTAGSAFLSRCPRCLPASGGLSVFLSPALLCRSCCLRLHSLPPGPGARRPRPGRDGPCTPSFPVSSSRSRNNLAAGGTGGAGAAGEGGRPAALDSPGPAASGDLTVPCDHRKEGAAAGRRGTRRLWRGEGVNAGLESASGPESASRPESASRPSACGPGGLPGPSDLGFSLGEMGT

SEQ ID NO: 908319 - protein, 316 aa, Homo sapiens
RLPRRPHSPRARRPGWTLLARGAMSRSLDSARSFLERLEARGGREGAVLAGEFSDIQACSAAWKADGVCSTVAGSRPENVRKNRYKDVLPYDQTRVILSLLQEEGHSDYINGNFIRGVDGSLAYIATQGPLPHTLLDFWRLVWEFGVKVSTWGCGTMVGSTSKYPLGSFPGPLTQITFLSPDPPCLVILMACREIENGRKRCERYWAQEQEPLQTGLFCITLIKEKWLNEDIMLRTLKVTFQKESRSVYQLQYMSWPDRGVPSSPDHMLAMVEEARRLQGSGPEPLCVHCRFWKWASGGSGEAEGTEHGGEYRAWG

SEQ ID NO: 908320 - protein, 316 aa, Homo sapiens; identical to SEQ ID NO: 908319

SEQ ID NO: 908321 - protein, 483 aa, Homo sapiens
RLPRRPHSPRARRPGWTLLARGAMSRSLDSARSFLERLEARGGREGAVLAGEFSDIQACSAAWKADGVCSTVAGSRPENVRKNRYKDVLPYDQTRVILSLLQEEGHSDYINGNFIRGVDGSLAYIATQGPLPHTLLDFWRLVWEFGVKVILMACREIENGRKRCERYWAQEQEPLQTGLFCITLIKEKWLNEDIMLRTLKVTFQKESRSVYQLQYMSWPDRGVPSSPDHMLAMVEEARRLQGSGPEPLCVHCSAGCGRTGVLCTVDYVRQLLLTQMIPPDFSLFDVVLKMRKQRPAAVQTEEQYRFLYHTVAQMFCSTLQNASPHYQNIKENCAPLYDDALFLRTPQALLAIPRPPGGVLRSISVPGSPGHAMADTYAVVQKRGAPAGAGSGTQTGTGTGTGARSAEEAPLYSKVTPRAQRPGAHAEDARGTLPGRVPADQSPAGSGAYEDVAGGAQTGGLGFNLRIGRPKGPRDPPAEWTRV

SEQ ID NO: 908322 - protein, 316 aa, Homo sapiens; identical to SEQ ID NO: 908319

SEQ ID NO: 908323 - protein, 316 aa, Homo sapiens; identical to SEQ ID NO: 908319

SEQ ID NO: 908324 - protein, 316 aa, Homo sapiens; identical to SEQ ID NO: 908319

SEQ ID NO: 908325 - protein, 316 aa, Homo sapiens; identical to SEQ ID NO: 908319

SEQ ID NO: 908326 - protein, 316 aa, Homo sapiens; identical to SEQ ID NO: 908319

SEQ ID NO: 908327 - protein, 316 aa, Homo sapiens; identical to SEQ ID NO: 908319

SEQ ID NO: 908328 - protein, 316 aa, Homo sapiens; identical to SEQ ID NO: 908319

SEQ ID NO: 908329 - protein, 151 aa, Homo sapiens
APSPYPTQTPRFSPYLLTDDQTRVILSLLQEEGHSDYINGNFIRGVDGSLAYIATQGPLPHTLLDFWRLVWEFGVKVSTWGCGTMVGSTSKYPLGSFPGPLTQITFLSPDPPCLGDPDGLSRDREWAGRCPLPPGFMSLWEEGGGILLAPP

SEQ ID NO: 908330 - protein, 86 aa, Homo sapiens
VRVGVTEGGGLGVARGGPQNLSREFGLHQGVDGSLAYIATQGPLPHTLLDFWRLVWEFGVKVSTWGCGTMVGSTSKYPLGSFPGPL

SEQ ID NO: 908331 - protein, 483 aa, Homo sapiens; identical to SEQ ID NO: 908321

SEQ ID NO: 908332 - protein, 316 aa, Homo sapiens; identical to SEQ ID NO: 908319

SEQ ID NO: 908333 - protein, 376 aa, Homo sapiens
RLPRRPHSPRARRPGWTLLARGAMSRSLDSARSFLERLEARGGREGAVLAGEFSKRCERYWAQEQEPLQTGLFCITLIKEKWLNEDIMLRTLKVTFQKESRSVYQLQYMSWPDRGVPSSPDHMLAMVEEARRLQGSGPEPLCVHCSAGCGRTGVLCTVDYVRQLLLTQMIPPDFSLFDVVLKMRKQRPAAVQTEEQYRFLYHTVAQMFCSTLQNASPHYQNIKENCAPLYDDALFLRTPQALLAIPRPPGGVLRSISVPGSPGHAMADTYAVVQKRGAPAGAGSGTQTGTGTGTGARSAEEAPLYSKVTPRAQRPGAHAEDARGTLPGRVPADQSPAGSGAYEDVAGGAQTGGLGFNLRIGRPKGPRDPPAEWTRV

SEQ ID NO: 908334 - protein, 566 aa, Homo sapiens
RLPRRPHSPRARRPGWTLLARGAMSRSLDSARSFLERLEARGGREGAVLAGEFSDIQACSAAWKADGVCSTVAGSRPENVRKNRYKDVLPYDQTRVILSLLQEEGHSDYINGNFIRGVDGSLAYIATQGPLPHTLLDFWRLVWEFGVKVILMACREIENGRKRCERYWAQEQEPLQTGLFCITLIKEKWLNEDIMLRTLKVTFQKESRSVYQLQYMSWPDRGVPSSPDHMLAMVEEARRLQGSGPEPLCVHCSAGCGRTGVLCTVDYVRQLLLTQVRYRHPVCAVCCPGPRVLLKCLVCLPQMIPPDFSLFDVVLKMRKQRPAAVQTEEQYRFLYHTVAQMFCSTLQNASPHYQNIKENCAPLYDDALFLRTPQALLAIPRPPGGVLRALGTQKRGLQPKEPSLPSSAPPRREGSPWFARWAASPLPPCPAPPFHFLPALPACRSISVPGSPGHAMADTYAVVQKRGAPAGAGSGTQTGTGTGTGARSAEEAPLYSKVTPRAQRPGAHAEDARGTLPGRVPADQSPAGSGAYEDVAGGAQTGGLGFNLRIGRPKGPRDPPAEWTRV

SEQ ID NO: 908335 - protein, 316 aa, Homo sapiens; identical to SEQ ID NO: 908319

SEQ ID NO: 908336 - protein, 316 aa, Homo sapiens; identical to SEQ ID NO: 908319

SEQ ID NO: 908337 - protein, 316 aa, Homo sapiens; identical to SEQ ID NO: 908319

SEQ ID NO: 908338 - protein, 316 aa, Homo sapiens; identical to SEQ ID NO: 908319

SEQ ID NO: 908339 - protein, 316 aa, Homo sapiens; identical to SEQ ID NO: 908319

SEQ ID NO: 908340 - protein, 181 aa, Homo sapiens
RLPRRPHSPRARRPGWTLLARGAMSRSLDSARSFLERLEARGGREGAVLAGEFSDIQACSAAWKADGVCSTVAGSRPENVRKNRYKDVLPYDQTRVILSLLQEEGHSDYINGNFIRGVDGSLAYIATQGPLPHTLLDFWRLVWEFGVKVILMACREIENGRVGALCPQVSCPCGRREEGSC

SEQ ID NO: 908341 - protein, 151 aa, Homo sapiens; identical to SEQ ID NO: 908329

SEQ ID NO: 908342 - protein, 165 aa, Homo sapiens; identical to SEQ ID NO: 879533

SEQ ID NO: 908343 - protein, 165 aa, Homo sapiens; identical to SEQ ID NO: 879533

SEQ ID NO: 908344 - protein, 165 aa, Homo sapiens; identical to SEQ ID NO: 879533

SEQ ID NO: 908345 - protein, 165 aa, Homo sapiens; identical to SEQ ID NO: 879533

SEQ ID NO: 908346 - protein, 165 aa, Homo sapiens; identical to SEQ ID NO: 879533

SEQ ID NO: 908347 - protein, 147 aa, Homo sapiens
MVNPTVFFDIAVDGEPLGRVSFELFADKVPKTAGFHRIIPGFMCQGGDFTRHNGTGGKSIYGEKFEDENFILKHTGPGILSMANAGPNTNGSQFFICTAKTEWLDGKHVVFGKVKEGMNIVEAMERFGSRNGKTSKKITIADCGQLE

SEQ ID NO: 908348 - protein, 189 aa, Homo sapiens
MGGNKENMEPKGNCSESTKILGYCEQMGWRGALLSYRRNDLVVKIKHKSNLFELSTVSNGDLLAGLAIPGPKALHGFHRIIPGFMCQGGDFTRHNGTGGKSIYGEKFEDENFILKHTGPGILSMANAGPNTNGSQFFICTAKTEWLDGKHVVFGKVKEGMNIVEAMERFGSRNGKTSKKITIADCGQLE

SEQ ID NO: 908349 - protein, 165 aa, Homo sapiens; identical to SEQ ID NO: 879533

SEQ ID NO: 908350 - protein, 165 aa, Homo sapiens; identical to SEQ ID NO: 879533

SEQ ID NO: 908351 - protein, 165 aa, Homo sapiens; identical to SEQ ID NO: 879533

SEQ ID NO: 908352 - protein, 165 aa, Homo sapiens; identical to SEQ ID NO: 879533

SEQ ID NO: 908353 - protein, 160 aa, Homo sapiens
MVNPTVFFDIAVDGEPLGRVSFELFADKVPKTAENFRALSTGEKGFGYKGSCFHRIIPGFMCQGGDFTRHNGTGGKSIYGEKFEDENFILKHTGPGILSMANAGPNTNGSQFFICTAKTEWLDGKHVVFGKVKEGMNIVEAMERFGSHATWPPCTKGQEK

SEQ ID NO: 908354 - protein, 106 aa, Homo sapiens
MVNPTVFFDIAVDGEPLGRVSFELFADKVPKTAENFRALSTGEKGFGYKGSCFHRIIPGFMCQGGDFTRHNGTGGKSIYGEKFEYCGGHGALWVQEWQDQQEDHHC

SEQ ID NO: 908355 - protein, 353 aa, Homo sapiens
MAMTLLEDWCRGMDVNSQRALLVWGIPVNCDEAEIEETLQAAMPQVSYRMLGRMFWREENAKAALLELTGAVDYAAIPREMPGKGGVWKVLFKPPTSDAEFLERLHLFLAREGWTVQDVARVLGFQNPTPTPGPEMPAEMLNYILDNVIQPLVESIWYKRLTLFSGRDIPGPGEETFDPWLEHTNEVLEEWQVSDVEKRRRLMESLRGPAADVIRILKSNNPAITTAECLKALEQVFGSVESSRDAQIKFLNTYQNPGEKLSAYVIRLEPLLQKVVEKGAIDKDNVNQARLEQVIAGANHSGAIRRQLWLTGAGEGPAPNLFQLLVQIREEEAKEEEEEAEATLLQLGLEGHF

SEQ ID NO: 908356 - protein, 201 aa, Homo sapiens
GKFDPRQTAVKRGQPVGLSCPEDSHPAWEMQLSLGFSLSVVLASSLAVGGALYAYSPAADVIRILKSNNPAITTAECLKALEQVFGSVESSRDAQIKFLNTYQNPGEKLSAYVIRLEPLLQKVVEKGAIDKDNVNQARLEQVIAGANHSGAIRRQLWLTGAGEGPAPNLFQLLVQIREEEAKEEEEEAEATLLQLGLEGHF

SEQ ID NO: 908357 - protein, 353 aa, Homo sapiens; identical to SEQ ID NO: 908355

SEQ ID NO: 908358 - protein, 353 aa, Homo sapiens; identical to SEQ ID NO: 908355

SEQ ID NO: 908359 - protein, 353 aa, Homo sapiens; identical to SEQ ID NO: 908355

SEQ ID NO: 908360 - protein, 1488 aa, Homo sapiens
MEQLPGVPPGPPHPVRPPPPPPPPMPLQLEAHLRSHGLEPAAPSPRLRPEESLDPPGAMQELLGALEPLPPAPGDTGVGPPNSEGKDPAGAYRSPSPQGTKAPRFVPLTSICFPDSLLQDEERSFFPTMEEMFGGGAADDYGKAGPPEDEGDPKAGAGPPPGPPAYDPYGPYCPGRASGAGPETPGLGLDPNKPPELPSTVNAEPLGLIQSGPHQAAPPPPPPPPPPPAPASEPKGGLTSPIFCSTKPKKLLKTSSFHLLRRRDPPFQTPKKLYAQEYEFEADEDKADVPADIRLNPRRLPDLVSSCRSRPALSPLGDIDFCPPNPGPDGPRRRGRKPTKAKRDGPPRPRGRPRIRPLEVPTTAGPASASTPTDGAKKPRGRGRGRGRKAEEAGGTRLEPLKPLKIKLSVPKAGEGLGTSSGDAISGTDHNSLDSSLTREKIEAKIKEVEEKQPEMKSGFMASFLDFLKSGKRHPPLYQAGLTPPLSPPKSVPPSVPARGLQPQPPATPAVPHPPPSGAFGLGGALEAAESEGLGLGCPSPCKRLDEELKRNLETLPSFSSDEEDSVAKNRDLQESISSAISALDDPPLAGPKDTSTPDGPPLAPAAAVPGPPPLPGLPSANSNGTPEPPLLEEKPPPTPPPAPTPQPQPPPPPPPPQPALPSPPPLVAPTPSSPPPPPLPPPPPPAMPSPPPPPPPAAAPLAAPPEEPAAPSPEDPELPDTRPLHLAKKQETAAVCGETDEEAGESGGEGIFRERDEFVIRAEDIPSLKLALQTGREPPPIWRVQKALLQKFTPEIKDGQRQFCATSNYLGYFGDAKNRYQRLYVKFLENVNKKDYVRVCARKPWHRPPVPVRRSGQAKNPVSAGGSSAPPPKAPAPPPKPETPEKTTSEKPPEQTPETAMPEPPAPEKPSLLRPVEKEKEKEKVTRGERPLRGERATSGRQTRPERSLATGQPATSRLPKARPTKVKAEPPPKKRKKWLKEAGGNATAGGGPPGSSSDSESSPGAPSEDERAVPGRLLKTRAMREMYRSYVEMLVSTALDPDMIQALEDTHDELYLPPMRKIDGLLNEHKKKVLKRLSLSPALQDALHTFPQLQVEQSGEGSPEEGAVRLRPAGEPYNRKTLSKLKRSVVRAQEFKVELEKSGYYTLYHSLHHYKYHTFLRCRDQTLAIEGGAEDLGQEEVVQQCMRNQPWLEQLFDSFSDLLAQAQAHSRCGDPAPACEGGASSMNRELGQNRVLKELTPGLHRRGKGVMGQGVSVLPPPGQEFKVRLPAPAKKPLSAGPQPPRLRHSFSLWLVSQTVSLSPCPDPPSTATAPAPSTLYIMYEEKSMYGWGGWGGFRELGDPFPPSPPCRPRSLLKAIPSAGHLASGGRGKRILLIIFNLIYCTYLGQGLGEVEGGEGSPLSAPPTPFLRRFVCVWPPPTAHPPLLSGCGSIFYRSPFPSSPFSPPPHPLLPLPFVSCSFLGFCTTQLVYTVYTQPAKRKPNGKH

SEQ ID NO: 908361 - protein, 353 aa, Homo sapiens; identical to SEQ ID NO: 908355

SEQ ID NO: 908362 - protein, 353 aa, Homo sapiens; identical to SEQ ID NO: 908355

SEQ ID NO: 908363 - protein, 178 aa, Homo sapiens
ISGHQLMSLSTADAKKDPSCKTCNISGALYAYSPAADVIRILKSNNPAITTAECLKALEQVFGSVESSRDAQIKFLNTYQNPGEKLSAYVIRLEPLLQKVVEKGAIDKDNVNQARLEQVIAGANHSGAIRRQLWLTGAGEGPAPNLFQLLVQIREEEAKEEEEEAEATLLQLGLEGHF

SEQ ID NO: 908364 - protein, 848 aa, Homo sapiens
PGGAVSPRVSRSFLHCLCLYNRGRRWTELIRTMESRVLLRTFCLIFGLGAVWGLGVDPSLQIDVLTELELGESTTGVRQVPGLHNGTKAFLFQDTPRSIKASTATAEQFFQKLRNKHEFTILVTLKQTHLNSGVILSIHHLDHRYLELESSGHRNEVRLHYRSGSHRPHTEVFPYILADDKWHKLSLAISASHLILHIDCNKIYERVVEKPSTDLPLGTTFWLGQRNNAHGYFKGIMQDVQLLVMPQGFIAQCPDLNRTCPTCNDFHGLVQKIMELQDILAKTSAKLSRAEQRMNRLDQCYCERTCTMKGTTYREFESWIDGCKNCTCLNGTIQCETLICPNPDCPLKSALAYVDGKCCKECKSICQFQGRTYFEGERNTVYSSSGVCVLYECKDQTMKLVESSGCPALDCPESHQITLSHSCCKVCKGYDFCSERHNCMENSICRNLNDRAVCSCRDGFRALREDNAYCEDIDECAEGRHYCRENTMCVNTPGSFMCICKTGYIRIDDYSCTEHDECITNQHNCDENALCFNTVGGHNCVCKPGYTGNGTTCKAFCKDGCRNGGACIAANVCACPQGFTGPSCETDIDECSDGFVQCDSRANCINLPGWYHCECRDGYHDNGMFSPSGESCEDIDECGTGRHSCANDTICFNLDGGYDCRCPHGKNCTGDCIHDGKVKHNGQIWVLENDRCSVCSCQNGFVMCRRMVCDCENPTVDLFCCPECDPRLSSQCLHQNGETLYNSGDTWVQNCQQCRCLQGEVDCWPLPCPDVECEFSILPENECCPRCVTDPCQADTIRNDITKTCLDEMNVVRFTGSSWIKHGTECTLCQCKNGHICCSVDPQCLQEL

SEQ ID NO: 908365 - protein, 815 aa, Homo sapiens
METGLGAPLFKAWLLISVWGLGVDPSLQIDVLTELELGESTTGVRQVPGLHNGTKAFLFQDTPRSIKASTATAEQFFQKLRNKHEFTILVTLKQTHLNSGVILSIHHLDHRYLELESSGHRNEVRLHYRSGSHRPHTEVFPYILADDKWHKLSLAISASHLILHIDCNKIYERVVEKPSTDLPLGTTFWLGQRNNAHGYFKGIMQDVQLLVMPQGFIAQCPDLNRTCPTCNDFHGLVQKIMELQDILAKTSAKLSRAEQRMNRLDQCYCERTCTMKGTTYREFESWIDGCKNCTCLNGTIQCETLICPNPDCPLKSALAYVDGKCCKECKSICQFQGRTYFEGERNTVYSSSGVCVLYECKDQTMKLVESSGCPALDCPESHQITLSHSCCKVCKGYDFCSERHNCMENSICRNLNDRAVCSCRDGFRALREDNAYCEDIDECAEGRHYCRENTMCVNTPGSFMCICKTGYIRIDDYSCTEHDECITNQHNCDENALCFNTVGGHNCVCKPGYTGNGTTCKAFCKDGCRNGGACIAANVCACPQGFTGPSCETDIDECSDGFVQCDSRANCINLPGWYHCECRDGYHDNGMFSPSGESCEDIDECGTGRHSCANDTICFNLDGGYDCRCPHGKNCTGDCIHDGKVKHNGQIWVLENDRCSVCSCQNGFVMCRRMVCDCENPTVDLFCCPECDPRLSSQCLHQNGETLYNSGDTWVQNCQQCRCLQGEVDCWPLPCPDVECEFSILPENECCPRCVTDPCQADTIRNDITKTCLDEMNVVRFTGSSWIKHGTECTLCQCKNGHICCSVDPQCLQEL

SEQ ID NO: 908366 - protein, 761 aa, Homo sapiens
LTLEDPDTPRSIKASTATAEQFFQKLRNKHEFTILVTLKQTHLNSGVILSIHHLDHRYLELESSGHRNEVRLHYRSGSHRPHTEVFPYILADDKWHKLSLAISASHLILHIDCNKIYERVVEKPSTDLPLGTTFWLGQRNNAHGYFKGIMQDVQLLVMPQGFIAQCPDLNRTCPTCNDFHGLVQKIMELQDILAKTSAKLSRAEQRMNRLDQCYCERTCTMKGTTYREFESWIDGCKNCTCLNGTIQCETLICPNPDCPLKSALAYVDGKCCKECKSICQFQGRTYFEGERNTVYSSSGVCVLYECKDQTMKLVESSGCPALDCPESHQITLSHSCCKVCKGYDFCSERHNCMENSICRNLNDRAVCSCRDGFRALREDNAYCEDIDECAEGRHYCRENTMCVNTPGSFMCICKTGYIRIDDYSCTEHDECITNQHNCDENALCFNTVGGHNCVCKPGYTGNGTTCKAFCKDGCRNGGACIAANVCACPQGFTGPSCETDIDECSDGFVQCDSRANCINLPGWYHCECRDGYHDNGMFSPSGESCEDIDECGTGRHSCANDTICFNLDGGYDCRCPHGKNCTGDCIHDGKVKHNGQIWVLENDRCSVCSCQNGFVMCRRMVCDCENPTVDLFCCPECDPRLSSQCLHQNGETLYNSGDTWVQNCQQCRCLQGEVDCWPLPCPDVECEFSILPENECCPRCVTDPCQADTIRNDITKTCLDEMNVVRFTGSSWIKHGTECTLCQCKNGHICCSVDPQCLQEL

SEQ ID NO: 908367 - protein, 222 aa, Homo sapiens
CCFFLSIDIDECGTGRHSCANDTICFNLDGGYDCRCPHGKNCTGDCIHDGKVKHNGQIWVLENDRCSVCSCQNGFVMCRRMVCDCENPTVDLFCCPECDPRLSSQCLHQNGETLYNSGDTWVQNCQQCRCLQGEVDCWPLPCPDVECEFSILPENECCPRCVTDPCQADTIRNDITKTCLDEMNVVRFTGSSWIKHGTECTLCQCKNGHICCSVDPQCLQEL

SEQ ID NO: 908368 - protein, 673 aa, Homo sapiens
MESRVLLRTFCLIFGLGAVWGLGVDPSLQIDVLTELELGESTTGVRQVPGLHNGTKAFLFQDTPRSIKASTATAEQFFQKLRNKHEFTILVTLKQTHLNSGVILSIHHLDHRYLELESSGHRNEVRLHYRSGSHRPHTEVFPYILADDKWHKLSLAISASHLILHIDCNKIYERVVEKPSTDLPLGTTFWLGQRNNAHGYFKGIMQDVQLLVMPQGFIAQCPDLNRTCPTCNDFHGLVQKIMELQDILAKTSAKLSRAEQRMNRLDQCYCERTCTMKGTTYREFESWIDGCKNCTCLNGTIQCETLICPNPDCPLKSALAYVDGKCCKECKSICQFQGRTYFEGERNTVYSSSGVCVLYECKDQTMKLVESSGCPALDCPESHQITLSHSCCKVCKGYDFCSERHNCMENSICRNLNDRAVCSCRDGFRALREDNAYCEDIDECAEGRHYCRENTMCVNTPGSFMCICKTGYIRIDDYSCTEHDECITNQHNCDENALCFNTVGGHNCVCKPGYTGNGTTCKAFCKDGCRNGGACIAANVCACPQGFTGPSCETDIDECSDGFVQCDSRANCINLPGWYHCECRDGYHDNGMFSPSGESCEDIDECGTGRHSCANDTICFNLDGGYDCRCPHGKNCTGDCIHDGKVKHNGQIWVLENDRCSVCSCQVGINEKL

SEQ ID NO: 908369 - protein, 367 aa, Homo sapiens
MESRVLLRTFCLIFGLGAVWGLGVDPSLQIDVLTELELGESTTGVRQVPGLHNGTKAFLFQDTPRSIKASTATAEQFFQKLRNKHEFTILVTLKQTHLNSGVILSIHHLDHRYLELESSGHRNEVRLHYRSGSHRPHTEVFPYILADDKWHKLSLAISASHLILHIDCNKIYERVVEKPSTDLPLGTTFWLGQRNNAHGYFKGIMQDVQLLVMPQGFIAQCPDLNRTCPTCNDFHGLVQKIMELQDILAKTSAKLSRAEQRMNRLDQCYCERTCTMKGTTYREFESWIDGCKNCTCLNGTIQCETLICPNPDCPLKSALAYVDGKCCKECKCEHNFYDEYFLWKNKARCGRNKQHNHKSIHRLICQP

SEQ ID NO: 908370 - protein, 177 aa, Homo sapiens
  misc_feature (177)..(177): Xaa can be any naturally occurring amino acid
MESRVLLRTFCLIFGLGAVWGLGVDPSLQIDVLTELELGESTTGVRQVPGLHNGTKAFLFQDTPRSIKASTATAEQFFQKLRNKHEFTILVTLKQTHLNSGVILSIHHLDHRYLELESSGHRNEVRLHYRSGSHRPHTEVFPYILADDKWHKLSLAISASHLILHIDCNNVSSRVGX

SEQ ID NO: 908371 - protein, 193 aa, Homo sapiens
MTNRVSDSDPPIQNFKLQELFFIYPPVQGIMQDVQLLVMPQGFIAQCPDLNRTCPTCNDFHGLVQKIMELQDILAKTSAKLSRAEQRMNRLDQCYCERTCTMKGTTYREFESWIDGCKNCTCLNGTIQCETLICPNPDCPLKSALAYVDGKCCKECKCEHNFYDEYFLWKNKARCGRNKQHNHKSIHRLICQP

SEQ ID NO: 908372 - protein, 816 aa, Homo sapiens
MESRVLLRTFCLIFGLGAVWGLGVDPSLQIDVLTELELGESTTGVRQVPGLHNGTKAFLFQDTPRSIKASTATAEQFFQKLRNKHEFTILVTLKQTHLNSGVILSIHHLDHRYLELESSGHRNEVRLHYRSGSHRPHTEVFPYILADDKWHKLSLAISASHLILHIDCNKIYERVVEKPSTDLPLGTTFWLGQRNNAHGYFKGIMQDVQLLVMPQGFIAQCPDLNRTCPTCNDFHGLVQKIMELQDILAKTSAKLSRAEQRMNRLDQCYCERTCTMKGTTYREFESWIDGCKNCTCLNGTIQCETLICPNPDCPLKSALAYVDGKCCKECKSICQFQGRTYFEGERNTVYSSSGVCVLYECKDQTMKLVESSGCPALDCPESHQITLSHSCCKVCKGYDFCSERHNCMENSICRNLNDRAVCSCRDGFRALREDNAYCEDIDECAEGRHYCRENTMCVNTPGSFMCICKTGYIRIDDYSCTEHDECITNQHNCDENALCFNTVGGHNCVCKPGYTGNGTTCKAFCKDGCRNGGACIAANVCACPQGFTGPSCETDIDECSDGFVQCDSRANCINLPGWYHCECRDGYHDNGMFSPSGESCEDIDECGTGRHSCANDTICFNLDGGYDCRCPHGKNCTGDCIHDGKVKHNGQIWVLENDRCSVCSCQNGFVMCRRMVCDCENPTVDLFCCPECDPRLSSQCLHQNGETLYNSGDTWVQNCQQCRCLQGEVDCWPLPCPDVECEFSILPENECCPRCVTDPCQADTIRNDITKTCLDEMNVVRFTGSSWIKHGTECTLCQCKNGHICCSVDPQCLQEL

SEQ ID NO: 908373 - protein, 285 aa, Homo sapiens
DIAVLEDPSRPCPQGFTGPSCETDIDECSDGFVQCDSRANCINLPGWYHCECRDGYHDNGMFSPSGESCEDIDECGTGRHSCANDTICFNLDGGYDCRCPHGKNCTGDCIHDGKVKHNGQIWVLENDRCSVCSCQNGFVMCRRMVCDCENPTVDLFCCPECDPRLSSQCLHQNGETLYNSGDTWVQNCQQCRCLQGEVDCWPLPCPDVECEFSILPENECCPRCVTDPCQADTIRNDITKTCLDEMNVVRFTGSSWIKHGTECTLCQCKNGHICCSVDPQCLQEL

SEQ ID NO: 908374 - protein, 349 aa, Homo sapiens
MESRVLLRTFCLIFGLGAVWGLGVDPSLQIDVLTELELGESTTGVRQVPGLHNGTKAFLFQDTPRSIKASTATAEQFFQKLRNKHEFTILVTLKQTHLNSGVILSIHHLDHRYLELESSGHRNEVRLHYRSGSHRPHTEVFPYILADDKWHKLSLAISASHLILHIDCNKIYERVVEKPSTDLPLGTTFWLGQRNNAHGYFKGIMQDVQLLVMPQGFIAQCPDLNRTCPTCNDFHGLVQKIMELQDILAKTSAKLSRAEQRMNRLDQCYCERTCTMKGTTYREFESWIDGCKNCTCLNGTIQCETLICPNPDCPLKSALAYVDGKCCKECKCEHNFYDEYFLWKNKALY

SEQ ID NO: 908375 - protein, 230 aa, Homo sapiens
MESRVLLRTFCLIFGLGAVWGLGVDPSLQIDVLTELELGESTTGVRQVPGLHNGTKAFLFQDTPRSIKASTATAEQFFQKLRNKHEFTILVTLKQTHLNSGVILSIHHLDHRYLELESSGHRNEVRLHYRSGSHRPHTEVFPYILADDKWHKLSLAISASHLILHIDCNKIYERVVEKPSTDLPLGTTFWLGQRNNAHGYFKGIMQDVQLLVMPQGFIAQCPDLNRTSSN

SEQ ID NO: 908376 - protein, 151 aa, Homo sapiens
PGGAVSPRVSRSFLHCLCLYNRFGRRGRRGGAGPPQPGLSWGRPPSTGCASLWLLLFGSGANSPTEPRRGESDPSLRAPSGPRCRLGPACGNDVRIGGSKFFTRLGRPPFSFLGNQSVLILLISKSEAAAGETNVIFPLDSKNLFDFYFYF

SEQ ID NO: 908377 - protein, 122 aa, Homo sapiens
GGGTEKLKRKWRTACAGGVMERQQQQQQQLRNLRDFLLVYNRMTELCFQRCVPSLHHRALDAEEEACLHSCAGKLIHSNHRLMAAYVQLMPALVQRRIADYEAASAVPGVAAEQPGVSPSGS

SEQ ID NO: 908378 - protein, 90 aa, Homo sapiens
GGGTEKLKRKWRTACAGGVMERQQQQQQQLRNEACLHSCAGKLIHSNHRLMAAYVQLMPALVQRRIADYEAASAVPGVAAEQPGVSPSGS

SEQ ID NO: 908379 - protein, 122 aa, Homo sapiens; identical to SEQ ID NO: 908377

SEQ ID NO: 908380 - protein, 122 aa, Homo sapiens; identical to SEQ ID NO: 908377

SEQ ID NO: 908381 - protein, 99 aa, Homo sapiens
QQQQQQLRNLRDFLLVYNRMTELCFQRCVPSLHHRALDAEEEACLHSCAGKLIHSNHRLMAAYVQLMPALVQRRIADYEAASAVPGVAAEQPGVSPSGS

SEQ ID NO: 908382 - protein, 122 aa, Homo sapiens; identical to SEQ ID NO: 908377

SEQ ID NO: 908383 - protein, 122 aa, Homo sapiens; identical to SEQ ID NO: 908377

SEQ ID NO: 908384 - protein, 337 aa, Homo sapiens [sequence omitted]

SEQ ID NO: 908385 - protein, 337 aa, Homo sapiens [sequence omitted]

SEQ ID NO: 908386 - protein, 200 aa, Homo sapiens
MRSKSRSDWPKKTAILGSNSIVTQLKLASPPCLPFHASVLTQTWGRLPHCGLVLGPALLSFLKHAQLPFRQFLSWAYVKMAASVLNTVLRRLPMLSLFRGSHRVQVPLQTLCTKAPSEEDSLSSVPISPYKDEPWKYLESEEYQERYGSRPVWADYRRNHKGGVPPQRTRKTCIRRNKVVGNPCPICRDHKLHVDFRESV

SEQ ID NO: 908387 - protein, 148 aa, Homo sapiens
FLDHLSVIWVEYPIIVLAFDLVRGLKYSSYQSHHRCESQVLQAIQKAWDHGLLIYHIPQVEPRDLDFSTSHGAVSATPPAPTLVSGDPWYPWYNWKQPPERELSRLRRLYQGHLQEESGPPPESMPKMPPRTPAEASSTGQTGPQSAL

SEQ ID NO: 908388 - protein, 135 aa, Homo sapiens
  misc_feature (34)..(34): Xaa can be any naturally occurring amino acid
DRAAVTPLGSGLNLLGFTRALIASARALMAWIVXCIFFRPFLLCFLAKRMFLRNLGSTPLRDSYSLSSVPISPYKDEPWKYLESEEYQERYGSRPVWADYRRNHKGGVPPQRTRKTCIEAEVAVSCSHTPALQPG

SEQ ID NO: 908389 - protein, 211 aa, Homo sapiens
MRSKSRSDWPKKTAILGSNSIVTQLKLASPPCLPFHASVLTQTWGRLPHCGLVLGPALLSFLKHAQLPFRQFLSWAYVKMAASVLNTVLRRLPMLSLFRGSHRVQVPLQTLCTKAPSEEDSLSSVPISPYKDEPWKYLESEEYQERYGSRPVWADYRRNHKGGVPPQRTRKTCIRRNKVVGNPCPICRRLGRELEGLGDNVYVGLCDGISP

SEQ ID NO: 908390 - protein, 154 aa, Homo sapiens
MRSKSRSDWPKKTAILGSNSIVTQLKLASPPCLPFHASVLTQTWGRLPHCGLVLGPALLSFLKHAQLPFRQFLSWAYVKMAASVLNTVLRRLPMLSLFRGSHRVQVPLQTLCTKAPSEEDSLSSVPISPYKDEPWKYLESEGTSKGGKGGSDRI

SEQ ID NO: 908391 - protein, 125 aa, Homo sapiens
QDIFLPTGVCVKQHKRLTQAIQKARDHGLLIYHIPQVEPRDLDFSTSHGAVSATPPAPTLVSGDPWYPWYNWKQPPERELSRLRRLYQGHLQEESGPPPESMPKMPPRTPAEASSTGQTGPQSAL

SEQ ID NO: 908392 - protein, 191 aa, Homo sapiens
MRSKSRSDWPKKTAILGSNSIVTQLKLASPPCLPFHASVLTQTWGRLPHCGLVLGPALLSFLKHAQLPFRQFLSWAYVKMAASVLNTVLRRLPMLSLFRGSHRVQVPLQTLCTKAPSEEDSLSSVPISPYKDEPWKYLESEEYQERYGSRPVWADYRRNHKGGVPPQRTRKTCIEAEVAVSCSHTPALQPG

SEQ ID NO: 908393 - protein, 439 aa, Homo sapiens
SYERGACAEDPHQGAGCSCGSRAMAEEQGRERDSVPKPSVLFLHPDLGVGGAERLVLDAALALQARGCSVKIWTAHYDPGHCFAESRELPVRCAGDWLPRGLGWGGRGAAVCAYVRMVFLALYVLFLADEEFDVVVCDQVSACIPVFRLARRRKKILFYCHFPDLLLTKRDSFLKRLYRAPIDWIEEYTTGMADCILVNSQFTAAVFKETFKSLSHIDPDVLYPSLNVTSFDSVVPEKLDDLVPKGKKFLLLSINRYERKKNLTLALEALVQLRGRLTSQDWERVHLIVAGGYDERVLENVEHYQELKKMVQQSDLGQYVTFLRSFSDKQKISLLHSCTCVLYTPSNEHFGIVPLEAMYMQCPVIAVNSGGPLESIDHSVTGFLCEPDPVHFSEAIEKFIREPSLKATMGLAGRARVKEKFSPEAFTEQLYRYVTKLLV

SEQ ID NO: 908394 - protein, 439 aa, Homo sapiens; identical to SEQ ID NO: 908393

SEQ ID NO: 908395 - protein, 492 aa, Homo sapiens
SYERGACAEDPHQGAGCSCGSRAMAEEQGRERDSVPKPSVLFLHPDLGVGGAERLVLDAALALQARGCSVKIWTAHYDPGHCFAESRELPVRCAGDWLPRGLGWGGRGAAVCAYVRMVFLALYVLFLADEEFDVVVCDQAICIPLSLCSEPGHTVLSSVMCEKRQAEYIMPLLKLVHGSPLVFGEKFKLFTLVSACIPVFRLARRRKKILFYCHFPDLLLTKRDSFLKRLYRAPIDWIEEYTTGMADCILVNSQFTAAVFKETFKSLSHIDPDVLYPSLNVTSFDSVVPEKLDDLVPKGKKFLLLSINRYERKKNLTLALEALVQLRGRLTSQDWERVHLIVAGGYDERVLENVEHYQELKKMVQQSDLGQYVTFLRSFSDKQKISLLHSCTCVLYTPSNEHFGIVPLEAMYMQCPVIAVNSGGPLESIDHSVTGFLCEPDPVHFSEAIEKFIREPSLKATMGLAGRARVKEKFSPEAFTEQLYRYVTKLLV

SEQ ID NO: 908396 - protein, 480 aa, Homo sapiens
SYERGACAEDPHQGAGCSCGSRAMAEEQGRERDSVPKPSVLFLHPDLGVGGAERLVLDAALALQARGCSVKIWTAHYDPGHCFAESRELPVRCAGDWLPRGLGWGGRGAAVCAYVRMVFLALYVLFLADEEFDVVVCDQATPSSAVSCVKNAKLNISCPYYKLVHGSPLVFGEKFKLFTLVSACIPVFRLARRRKKILFYCHFPDLLLTKRDSFLKRLYRAPIDWIEEYTTGMADCILVNSQFTAAVFKETFKSLSHIDPDVLYPSLNVTSFDSVVPEKLDDLVPKGKKFLLLSINRYERKKNLTLALEALVQLRGRLTSQDWERVHLIVAGGYDERVLENVEHYQELKKMVQQSDLGQYVTFLRSFSDKQKISLLHSCTCVLYTPSNEHFGIVPLEAMYMQCPVIAVNSGGPLESIDHSVTGFLCEPDPVHFSEAIEKFIREPSLKATMGLAGRARVKEKFSPEAFTEQLYRYVTKLLV

SEQ ID NO: 908397 - protein, 439 aa, Homo sapiens; identical to SEQ ID NO: 908393

SEQ ID NO: 908398 - protein, 323 aa, Homo sapiens
MPLLKLVHGSPLVFGEKFKLFTLVSACIPVFRLARRRKKILFYCHFPDLLLTKRDSFLKRLYRAPIDWIEEYTTGMADCILVNSQFTAAVFKETFKSLSHIDPDVLYPSLNVTSFDSVVPEKLDDLVPKGKKFLLLSINRYERKKNLTLALEALVQLRGRLTSQDWERVHLIVAGGYDERVLENVEHYQELKKMVQQSDLGQYVTFLRSFSDKQKISLLHSCTCVLYTPSNEHFGIVPLEAMYMQCPVIAVNSGGPLESIDHSVTGFLCEPDPVHFSEAIEKFIREPSLKATMGLAGRARVKEKFSPEAFTEQLYRYVTKLLV

SEQ ID NO: 908399 - protein, 323 aa, Homo sapiens; identical to SEQ ID NO: 908398

SEQ ID NO: 908400 - protein, 761 aa, Homo sapiens
MDSGGGSLGLHTPDSRMAHTMIMQDFVAGMAGTAHIDGDHIVVSVPEAVLVSDVVTDDGITLDHGLAAEVVHGPDIITETDVVTEGVIVPEAVLEADVAIEEDLEEDDGDHILTSELITETVRVPEQVFVADLVTGPNGHLEHVVQDCVSGVDSPTMVSEEVLVTNSDTETVIQAAGGVPGSTVTIKTEDDDDDDVKSTSEDYLMISLDDVGEKLEHMGNTPLKIGSDGSQEDAKEDGFGSEVIKVYIFKAEAEDDVEIGGTEIVTESEYTSGHSVAGVLDQSRMQREKMVYMAVKDSSQEEDDIRDERRVSRRYEDCQASGNTLDSALESRSSTAAQYLQICDGINTNKVLKQKAKKRRRGETRQWQTAVIIGPDGQPLTVYPCHICTKKFKSRGFLKRHMKNHPDHLMRKKYQCTDCDFTTNKKVSFHNHLESHKLINKVDKTHEFTEYTRRYREASPLSSNKLILRDKEPKMHKCKYCDYETAEQGLLNRHLLAVHSKNFPHVCVECGKGFRHPSELKKHMRTHTGEKPYQCQYCIFRCADQSNLKTHIKSKHGNNLPYKCEHCPQAFGDERELQRHLDLFQGHKTHQCPHCDHKSTNSSDLKRHIISVHTKDFPHKCEVCDKGFHRPSELKKHSDIHKGRKIHQCRHCDFKTSDPFILSGHILSVHTKDQPLKCKRCKRGFRQQNELKKHMKTHTGRKIYQCEYCEYSTTDASGFKRHVISIHTKDYPHRCEFCKKGFRRPSEKNQHIMRHHKEALM

SEQ ID NO: 908401 - protein, 807 aa, Homo sapiens
MDSGGGSLGLHTPDSRMAHTMIMQDFVAGMAGTAHIDGDHIVVSVPEAVLVSDVVTDDGITLDHGLAAEVVHGPDIITETDVVTEGVIVPEAVLEADVAIEEDLEEDDGDHILTSELITETVRVPEQVFVADLVTGPNGHLEHVVQDCVSGVDSPTMVSEEVLVTNSDTETVIQAAGGVPGSTVTIKTEDDDDDDVKSTSEDYLMISLDDVGEKLEHMGNTPLKIGSDGSQEDAKEDGFGSEVIKVYIFKAEAEDDVEIGGTEIVTESEYTSGHSVAGVLDQSRMQREKMVYMAVKDSSQEEDDISCAEIADEVYMEVIVGEEEGTSLPEIQLEDSDVNKTVVPVVWAAAYGDERRVSRRYEDCQASGNTLDSALESRSSTAAQYLQICDGINTNKVLKQKAKKRRRGETRQWQTAVIIGPDGQPLTVYPCHICTKKFKSRGFLKRHMKNHPDHLMRKKYQCTDCDFTTNKKVSFHNHLESHKLINKVDKTHEFTEYTRRYREASPLSSNKLILRDKEPKMHKCKYCDYETAEQGLLNRHLLAVHSKNFPHVCVECGKGFRHPSELKKHMRTHTGEKPYQCQYCIFRCADQSNLKTHIKSKHGNNLPYKCEHCPQAFGDERELQRHLDLFQGHKTHQCPHCDHKSTNSSDLKRHIISVHTKDFPHKCEVCDKGFHRPSELKKHSDIHKGRKIHQCRHCDFKTSDPFILSGHILSVHTKDQPLKCKRCKRGFRQQNELKKHMKTHTGRKIYQCEYCEYSTTDASGFKRHVISIHTKDYPHRCEFCKKGFRRPSEKNQHIMRHHKEALM

SEQ ID NO: 908402 - protein, 761 aa, Homo sapiens; identical to SEQ ID NO: 908400

SEQ ID NO: 908403 - protein, 791 aa, Homo sapiens
MDSGGGSLGLHTPDSRMAHTMIMQDFVAGMAGTAHIDGDHIVVSVPEAVLVSDVVTDDGITLDHGLAAEVVHGPDIITETDVVTEGVIVPEAVLEADVAIEEDLEEDDGDHILTSELITETVRVPEQVFVADLVTGPNGHLEHVVQDCVSGVDSPTMVSEEVLVTNSDTETVIQAAGGVPGSTVTIKTEDDDDDDVKSTSEDYLMISLDDVGEKLEHMGNTPLKIGSDGSQEDAKEDGFGSEVIKVYIFKAEAEDDVEIGGTEIVTESEYTSGHSVAGVLDQSRMQREKMVYMAVKDSSQEEDDISCAEIADEVYMEVIVGEEEGTSLPEIQLEDSDVNKTVVPVVWAAAYGNTLDSALESRSSTAAQYLQICDGINTNKVLKQKAKKRRRGETRQWQTAVIIGPDGQPLTVYPCHICTKKFKSRGFLKRHMKNHPDHLMRKKYQCTDCDFTTNKKVSFHNHLESHKLINKVDKTHEFTEYTRRYREASPLSSNKLILRDKEPKMHKCKYCDYETAEQGLLNRHLLAVHSKNFPHVCVECGKGFRHPSELKKHMRTHTGEKPYQCQYCIFRCADQSNLKTHIKSKHGNNLPYKCEHCPQAFGDERELQRHLDLFQGHKTHQCPHCDHKSTNSSDLKRHIISVHTKDFPHKCEVCDKGFHRPSELKKHSDIHKGRKIHQCRHCDFKTSDPFILSGHILSVHTKDQPLKCKRCKRGFRQQNELKKHMKTHTGRKIYQCEYCEYSTTDASGFKRHVISIHTKDYPHRCEFCKKGFRRPSEKNQHIMRHHKEALM

SEQ ID NO: 908404 - protein, 140 aa, Homo sapiens
CVCQLRFRLRLSTAVKKLPCQITSYLVAHTLGRRMLYPGSVYLLQKALMPVLLQGQARLVEECNGRRAKLLACDGNEIDTMFVDRRGTAEPQGQKLVRGSREPRGGVSVRKAVEVWGPQCYSTSLKEPLLGIISCPSSTL

SEQ ID NO: 908405 - protein, 739 aa, Homo sapiens
MSQLARRRSRYGLTSRAHNTSEAGRAGPAGGPAAGRAAARAGAMAKLLSCVLGPRLYKIYRERDSERAPASVPETPTAVTAPHSSSWDTYYQPRALEKHADSILALASVFWSISYYSSPFAFFYLYRKGYLSLSKVVPFSHYAGTLLLLLAGVACLRGIGRWTNPQYRQFITILEATHRNQSSENKRQLANYNFDFRSWPVDFHWEEPSSRKESRGGPSRRGVALLRPEPLHRGTADTLLNRVKKLPCQITSYLVAHTLGRRMLYPGSVYLLQKALMPVLLQGQARLVEECNGRRAKLLACDGNEIDTMFVDRRGTAEPQGQKLVICCEGNAGFYEVGCVSTPLEGRTVTQPPYLRPLKGNVPASHTDLTSPGLCFLWVRFLSLSALGKSPLAICFDNLTSLPWPVSLAIMLFILFHSPTTHPTQITCCSLCCLRTSGVISYFWEGLELFASKLGGTSALPSPRDGERAVGHKVSVLPPPVLQLDIQSWAGIIQALLEARGCHSRRMRLMPWMWWSSLPSTALGFQPQDIIIYAWSIGGFTATWAAMSYPDVSAMILDASFDDLVPLALKVMPDSWRGLVTRTVRQHLNLNNAEQLCRYQGPVLLIRRTKDEIITTTVPEDIMSNRGNDLLLKLLQHRYPRVMAEEGLRVVRQWLEASSQLEEASIYSRWEVEEDWCLSVLRSYQAEHGPDFPWSVGEDMSADGRRQLALFLARKHLHNFEATHCTPLPAQNFQMPWHL

SEQ ID NO: 908406 - protein, 414 aa, Homo sapiens
MSQLARRRSRYGLTSRAHNTSEAGRAGPAGGPAAGRAAARAGAMAKLLSCVLGPRLYKIYRERDSERAPASVPETPTAVTAPHSSSWDTYYQPRALEKHADSILALASVFWSISYYSSPFAFFYLYRKGYLSLSKVVPFSHYAGTLLLLLAGVACLRGIGRWTNPQYRQFITILEATHRNQSSENKRQLANYNFDFRSWPVDFHWEEPSSRKESRGGPSRRGVALLRPEPLHRGTADTLLNRVKKLPCQITSYLVAHTLGRRMLYPGSVYLLQKALMPVLLQGQARLVEECNGRRAKLLACDGNEIDTMFVDRRGTAEPQGQKLVICCEGNAGFYEVGCVSTPLEAGYSVLGWNHPGFAGSTGVPFPQNEANAMDVVVQFAIHRPGLPAPGHHHLRLVHRRLHCHVGSHVLPRC

SEQ ID NO: 908407 - protein, 414 aa, Homo sapiens; identical to SEQ ID NO: 908406

SEQ ID NO: 908408 - protein, 414 aa, Homo sapiens; identical to SEQ ID NO: 908406

SEQ ID NO: 908409 - protein, 267 aa, Homo sapiens
MRWAASPRPWKLDIQSWAGIIQALLEARGCHSRRMRLMPWMWWSSLPSTALGFQPQDIIIYAWSIGGFTATWAAMSYPDVSAMILDASFDDLVPLALKVMPDSWRGLVTRTVRQHLNLNNAEQLCRYQGPVLLIRRTKDEIITTTVPEDIMSNRGNDLLLKLLQHRYPRVMAEEGLRVVRQWLEASSQLEEASIYSRWEVEEDWCLSVLRSYQAEHGPDFPWSVGEDMSADGRRQLALFLARKHLHNFEATHCTPLPAQNFQMPWHL

SEQ ID NO: 908410 - protein, 267 aa, Homo sapiens; identical to SEQ ID NO: 908409

SEQ ID NO: 908411 - protein, 414 aa, Homo sapiens; identical to SEQ ID NO: 908406

SEQ ID NO: 908412 - protein, 193 aa, Homo sapiens [sequence omitted]

SEQ ID NO: 908413 - protein, 414 aa, Homo sapiens; identical to SEQ ID NO: 908406

SEQ ID NO: 908414 - protein, 143 aa, Homo sapiens
PGDGRGYRCCRSFSRRSLPRLDMMSSGTVVVMISSLVLLQHRYPRVMAEEGLRVVRQWLEASSQLEEASIYSRWEVEEDWCLSVLRSYQAEHGPDFPWSVGEDMSADGRRQLALFLARKHLHNFEATHCTPLPAQNFQMPWHL

SEQ ID NO: 908415 - protein, 414 aa, Homo sapiens; identical to SEQ ID NO: 908406

SEQ ID NO: 908416 - protein, 413 aa, Homo sapiens
MSQLARRRSRYGLTSRAHNTSEAGRAGPAGGPAAGRAAARAGAMAKLLSCVLGPRLYKIYRERDSERAPASVPETPTAVTAPHSSSWDTYYQPRALEKHADSILALASVFWSISYYSSPFAFFYLYRKGYLSLSKVVPFSHYAGTLLLLLAGVACLRGIGRWTNPQYRQFITILEATHRNQSSENKRQLANYNFDFRSWPVDFHWEEPSSRKESRGGPSRRGVALLRPEPLHRGTADTLLNRVKKLPCQITSYLVAHTLGRRMLYPGSVYLLQKALMPVLLQGQARLVEECNGRRAKLLACDGNEIDTMFVDRRGTAEPQGQKLVICCEGNAGFYEVGCVSTPLEAGYSVLGWNHPGFAGSTGVPFPQNEANAMDVVVQFAIHRPGLPAPGHHHLRLVHRRLHWYQPPSHPPL

SEQ ID NO: 908417 - protein, 414 aa, Homo sapiens; identical to SEQ ID NO: 908406

SEQ ID NO: 908418 - protein, 414 aa, Homo sapiens; identical to SEQ ID NO: 908406

SEQ ID NO: 908419 - protein, 267 aa, Homo sapiens; identical to SEQ ID NO: 908409

SEQ ID NO: 908420 - protein, 414 aa, Homo sapiens; identical to SEQ ID NO: 908406

SEQ ID NO: 908421 - protein, 414 aa, Homo sapiens; identical to SEQ ID NO: 908406

SEQ ID NO: 908422 - protein, 141 aa, Homo sapiens
MSQLARRRSRYGLTSRAHNTSEAGRAGPAGGPAAGRAAARAGAMAKLLSCVLGPRLYKIYRERDSERAPASVPETPTAVTAPHSSSWDTYYQPRALEKHADSILALVCLPWHLGLCISRDQLGLIMEEWGERRHEERPSYL

SEQ ID NO: 908423 - protein, 238 aa, Homo sapiens
MSEDLAKQLASYKAQLQQVEAALSGNGENEDLLKLKKDLQEVIELTKDLLSTQPSETLASSDSFASTQPTHSWKVGDKCMAVWSEDGQCYEAEIEEIDEENGTAAITFAGYGNAEVTPLLNLKPVEEGRKAKEDSGNKPMSKKEMIAQQREYKKKKALKKAQRIKELEQEREDQKVKWQQFNNRAYSKNKKGQVKRSIFASPESVTGKVGVGTCGIADKPMTQYQDTSKYNVRHLMPQ

SEQ ID NO: 908424 - protein, 238 aa, Homo sapiens; identical to SEQ ID NO: 908423

SEQ ID NO: 908425 - protein, 238 aa, Homo sapiens; identical to SEQ ID NO: 908423

SEQ ID NO: 908426 - protein, 308 aa, Homo sapiens
MSEDLAKQLASYKAQLQQVEAALSGNGENEDLLKLKKDLQWLSASPKRLPSVSRVLECTPFDLLICRSQHLMLPGIADYCNCCPSVDEGAVSELRLEGGKVINVFVFLFYEVIELTKDLLSTQPSETLASSDSFASTQPTHSWKVGDKCMAVWSEDGQCYEAEIEEIDEENGTAAITFAGYGNAEVTPLLNLKPVEEGRKAKEDSGNKPMSKKEMIAQQREYKKKKALKKAQRIKELEQEREDQKVKWQQFNNRAYSKNKKGQVKRSIFASPESVTGKVGVGTCGIADKPMTQYQDTSKYNVRHLMPQ

SEQ ID NO: 908427 - protein, 238 aa, Homo sapiens; identical to SEQ ID NO: 908423

SEQ ID NO: 908428 - protein, 238 aa, Homo sapiens; identical to SEQ ID NO: 908423

SEQ ID NO: 908429 - protein, 238 aa, Homo sapiens; identical to SEQ ID NO: 908423

SEQ ID NO: 908430 - protein, 238 aa, Homo sapiens; identical to SEQ ID NO: 908423

SEQ ID NO: 908431 - protein, 96 aa, Homo sapiens
SWYFSRDFTVSVFSSFQCPAFLPSPSPPTEFFLFRPGRLAVVAVIFLLLLLLLLPPPLPLGSFAPTPSRRPAPSPTQDVRGFSKAAGKLQSSAPAS

SEQ ID NO: 908432 - protein, 403 aa, Homo sapiens
CLGGAWEPQEMPKARQSPGARGRQAGVALPWAGLHPHTQVSGLLTPQLQEPDVWSPSRGQPVSLHLPGKGAPEVKEMAWWKSWIEQEGVTVKSSSHFNPDPDAETLYKAMKGIGTNEQAIIDVLTKRSNTQRQQIAKSFKAQFGKDLTETLKSELSGKFERLIVALMYPPYRYEAKELHDAMKGLGTKEGVIIEILASRTKNQLREIMKAYEEDYGSSLEEDIQADTSGYLERILVCLLQGSRDDVSSFVDPGLALQDAQDLYAAGEKIRGTDEMKFITILCTRSATHLLRVFEEYEKIANKSIEDSIKSETHGSLEEAMLTVVKCTQNLHSYFAERLYYAMKGAGTRDGTLIRNIVSRSEIDLNLIKCHFKKMYGKTLSSMIMEDTSGDYKNALLSLVGSDP

SEQ ID NO: 908433 - protein, 86 aa, Homo sapiens
CLGGAWEPQEMPKARQSPGARGRQAGVALPWAGLHPHTQVSGLLTPQLQEPDVWSPSRGQPVSLHLPGKGAPEVKEMAWWKSWENE

SEQ ID NO: 908434 - protein, 294 aa, Homo sapiens [sequence omitted]

SEQ ID NO: 908435 - protein, 337 aa, Homo sapiens
MQLQEAFASVFFPLLTWIEQEGVTVKSSSHFNPDPDAETLYKAMKGIGTNEQAIIDVLTKRSNTQRQQIAKSFKAQFGKDLTETLKSELSGKFERLIVALMYPPYRYEAKELHDAMKGLGTKEGVIIEILASRTKNQLREIMKAYEEDYGSSLEEDIQADTSGYLERILVCLLQGSRDDVSSFVDPGLALQDAQDLYAAGEKIRGTDEMKFITILCTRSATHLLRVFEEYEKIANKSIEDSIKSETHGSLEEAMLTVVKCTQNLHSYFAERLYYAMKGAGTRDGTLIRNIVSRSEIDLNLIKCHFKKMYGKTLSSMIMEDTSGDYKNALLSLVGSDP

SEQ ID NO: 908436 - protein, 424 aa, Homo sapiens
CLGGAWEPQEMPKARQSPGARGRQAGVALPWAGLHPHTQVSGLLTPQLQEPDVWSPSRGQPVSLHLPGKGAPEVKEMAWWKSWIEQEGVTVKSSSHFNPDPDAETLYKAMKGIGTNEQAIIDVLTKRSNTQRQQIAKSFKAQFGKDLTETLKSELSGKFERLIVALMYPPYRYEAKELHDAMKGLGTKEGVIIEILASRTKNQLREIMKAYEEDYGSSLEEDIQADTSGYLERILVCLLQGSRDDVSSFVDPGLALQDAQDLYAAGEKIRGTDEMKFITILCTRSATHLLRVFEEYEKIANKSIEDSIKSETHGSLEEAMLTVVKCTQNLHSYFAERLYYAMKEQGRVTGTWITTHRLPGPEDDLSLQHMVTSQHDVRTDPQQHEHATNNRGAYRTPARPGGPDPDGRQKADTQPRRRAPDPPA

SEQ ID NO: 908437 - protein, 134 aa, Homo sapiens
  misc_feature (19)..(19): Xaa can be any naturally occurring amino acid
ARAQDGDEFHLISPTNLLXLLRVFEEYEKIANKSIEDSIKSETHGSLEEAMLTVVKCTQNLHSYFAERLYYAMKGAGTRDGTLIRNIVSRSEIDLNLIKCHFKKMYGKTLSSMIMEDTSGDYKNALLSLVGSDP

SEQ ID NO: 908438 - protein, 313 aa, Homo sapiens
MAWWKSWIEQEGVTVKSSSHFNPDPDAETLYKAMKGIGTNEQAIIDVLTKRSNTQRQQIAKSFKAQFGKDLTETLKSELSGKFERLIVALMYPPYRYEAKELHDAMKGLGTKEGVIIEILASRTKNQLREIMKAYEEDYGSSLEEDIQADTSGYLERILVCLLQGSRDDVSSFVDPGLALQDAQDLYAAGEKIRGTDEMKFITILCTRSATHLLRVFEEYEKIANKSIEDSIKSETHGSLEEAMLTVAGVNDQTPGIGEGTLSRKGGPLPVEMSGGGILVYKLDPRSGRVNPWSPENAPPRGAARGPARLRTS

SEQ ID NO: 908439 - protein, 354 aa, Homo sapiens
CLGGAWEPQEMPKARQSPGARGRQAGVALPWAGLHPHTQVSGLLTPQLQEPDVWSPSRGQPVSLHLPGKGAPEVKEMAWWKSWIEQEGVTVKSSSHFNPDPDAETLYKAMKGIGTNEQAIIDVLTKRSNTQRQQIAKSFKAQFGKDLTETLKSELSGKFERLIVALMYPPYRYEAKELHDAMKGLGTKEGVIIEILASRTKNQLREIMKAYEEDYGSSLEEDIQADTSGYLERILVCLLQGSRDDVSSFVDPGLALQDAQDLYAAGEKIRGTDEMKFITILCTRSATHLLRVFEEYEKIANKSIEDSIKSETHGSLEEAMLTVAPSAKPRSSKPPRSSTRGSYLTQTCRGSERF

SEQ ID NO: 908440 - protein, 144 aa, Homo sapiens
NRLGTGLGCESADDEMKFITILCTRSATHLLRVFEEYEKIANKSIEDSIKSETHGSLEEAMLTVVKCTQNLHSYFAERLYYAMKGAGTRDGTLIRNIVSRSEIDLNLIKCHFKKMYGKTLSSMIMEDTSGDYKNALLSLVGSDP

SEQ ID NO: 908441 - protein, 389 aa, Homo sapiens
CLGGAWEPQEMPKARQSPGARGRQAGVALPWAGLHPHTQVSGLLTPQLQEPDVWSPSRGQPVSLHLPGKGAPEVKEMAWWKSWIEQEGVTVKSSSHFNPDPDAETLYKAMKGIGTNEQAIIDVLTKRSNTQRQQIAKSFKAQFGKDLTETLKSELSGKFERLIVALMYPPYRYEAKELHDAMKGLGTKEGVIIEILASRTKNQLREIMKAYEEDYGSSLEEDIQADTSGYLERILVCLLQGSRDDVSSFVDPGLALQDAQDLYAAGEKIRGTDEMKFITILCTRSATHLLRVFEEYEKIANKSIEDSIKSETHGSLEEAMLTVAGVNDQTPGIGEGTLSRKGGPLPVEMSGGGILVYKLDPRSGRVNPWSPENAPPRGAARGPARLRTS

SEQ ID NO: 908442 - protein, 111 aa, Homo sapiens
MTSHHCVGPGNHISWSGHEKEHRLDYCPEVTFPLTKGFPLGYTLLFNFASYPFLLPSACLLLIRRCNIEYSSTGLNFLNTFTVSLIVTVIPLLQNVPVPLGNNVGKMQVYE

SEQ ID NO: 908443 - protein, 128 aa, Homo sapiens
MTSHHCVGPGNHISWSGHEKEHRLDYCPEVTFPLTKGFPLGYTLLFNFASYPFLLPSKIKTLLRNKDSFLNILCPACLLLIRRCNIEYSSTGLNFLNTFTVSLIVTVIPLLQNVPVPLGNNVGGFFIF

SEQ ID NO: 908444 - protein, 129 aa, Homo sapiens
MTSHHCVGPGNHISWSGHEKEHRLDYCPEVTFPLTKGFPLGYTLLFNFASYPFLLPSKIKTLLRNKDSFLNILCPACLLLIRRCNIEYSSTGLNFLNTFTVSLIVTVIPLLQNVPVPLGNNVGKMQVYE

SEQ ID NO: 908445 - protein, 278 aa, Homo sapiens
SADCHKMASVAAARAVPVGSGLRGLQRTLPLVVILGATGTGKSTLALQLGQRLGGEIVSADSMQVYEGLDIITNKVSAQEQRICRHHMISFVDPLVTNYTVVDFRNRATALIEDIFARDKIPIVVGGTNYYIESLLWKVLVNTKPQEMGTEKVIDRKVELEKEDGLVLHKRLSQVDPEMAAKLHPHDKRKVARSLQVFEETGISHSEFLHRQHTEEGGGPLGGPLKFSNPCILWLHADQAVLDERLDKRVDDMLAAGLLEELRDFHRRYNQKNVSENR

SEQ ID NO: 908446 - protein, 473 aa, Homo sapiens
SADCHKMASVAAARAVPVGSGLRGLQRTLPLVVILGATGTGKSTLALQLGQRLGGEIVSADSMQVYEGLDIITNKVSAQEQRICRHHMISFVDPLVTNYTVVDFRNRATALIEDIFARDKIPIVVGGTNYYIESLLWKVLVNTKPQEMGTEKVIDRKVELEKEDGLVLHKRLSQVDPEMAAKLHPHDKRKVARSLQVFEETGISHSEFLHRQHTEEGGGPLGGPLKFSNPCILWLHADQAVLDERLDKRVDDMLAAGLLEELRDFHRRYNQKNVSENSQDYQHGIFQSIGFKEFHEYLITEGKCTLETSNQLLKKGIEALKQVTKRYARKQNRWVKNRFLSRPGPIVPPVYGLEVSDVSKWEESVLEPALEIVQSFIQGHKPTATPIKMPYNEAENKRSYHLCDLCDRIIIGDREWAAHIKSKSHLNQLKKRRRLDSDAVNTIESQSVSPDHNKEPKEKGSPGQNDQELKCSV

SEQ ID NO: 908447 - protein, 149 aa, Homo sapiens
SADCHKMASVAAARAVPVGSGLRGLQRTLPLVVILGATGTGKSTLALQLGQRLGGEIVSADSMQVYEGLDIITNKVSAQEQRICRHHMISFVDPLVTNYTVVDFRNRATALIEDIFARDKIPIVVGGTNYYIESLLWKVLVNTKELASF

SEQ ID NO: 908448 - protein, 436 aa, Homo sapiens
MASVAAARAVPVGSGLRGLQRTLPLVVILGATGTGKSTLALQLGQRLGGEIVSADSMQVYEGLDIITNKVSAQEQRICRHHMISFVDPLVTNYTVVDFRNRATALIEDIFARDKIPIVVGGTNYYIESLLWKVLVNTKPQEMGTEKVIDRKVELEKEDGLVLHKRLSQVDPEMAAKLHPHDKRKVARSLQVFEETGISHSEFLHRQHTEEGGGPLGGPLKFSNPCILWLHADQAVLDERLDKRVDDMLAAGLLEELRDFHRRYNQKNVSENSQDYQHGIFQSIGFKEFHEYLITEGKCTLETSNQLLKKGIEALKQVTKRYARKQNRWVKNRFLSRPGPIVPPVYGLEVSDVSKWEESVLEPALEIVQSFIQGHKPTATPIKMPYNEAENKRSYHLCDLCDRIIIGDREWAAHIKSKSHLNQLKKRRRLDSDAIFF

SEQ ID NO: 908449 - protein, 75 aa, Homo sapiens
SADCHKMASVAAARAVPVGSGLRGLQRTLPLVVILGATGTGKSTLALQLGQRLGGEIVSADSMQDLVPLSPLSMA

SEQ ID NO: 908450 - protein, 278 aa, Homo sapiens; identical to SEQ ID NO: 908445

SEQ ID NO: 908451 - protein, 123 aa, Homo sapiens
SADCHKMASVAAARAVPVGSGLRGLQRTLPLVVILGATGTGKSTLALQLGQRLGGEIVSADSMQVYEGLDIITNKVSAQEQRICRHHMISFVDPLVTNYTVVDFRNRATALISLGKAAAGFGG

SEQ ID NO: 908452 - protein, 71 aa, Homo sapiens
SGLRGLQRTLPLVVILGATGTGKSTLALQLGQRLGGEIVSADSMQVWQCGWPGRLGTPEAAWTPCGKGLKG

SEQ ID NO: 908453 - protein, 393 aa, Homo sapiens
SADCHKMASVAAARAVPVGSGLRGLQRTLPLVVILGATGTGKSTLALQLGQRLGGEIVSADSMQPQEMGTEKVIDRKVELEKEDGLVLHKRLSQVDPEMAAKLHPHDKRKVARSLQVFEETGISHSEFLHRQHTEEGGGPLGGPLKFSNPCILWLHADQAVLDERLDKRVDDMLAAGLLEELRDFHRRYNQKNVSENSQDYQHGIFQSIGFKEFHEYLITEGKCTLETSNQLLKKGIEALKQVTKRYARKQNRWVKNRFLSRPGPIVPPVYGLEVSDVSKWEESVLEPALEIVQSFIQGHKPTATPIKMPYNEAENKRSYHLCDLCDRIIIGDREWAAHIKSKSHLNQLKKRRRLDSDAVNTIESQSVSPDHNKEPKEKGSPGQNDQELKCSV

SEQ ID NO: 908454 - protein, 447 aa, Homo sapiens
SADCHKMASVAAARAVPVGSGLRGLQRTLPLVVILGATGTGKSTLALQLGQRLGGEIVSADSMQVYEGLDIITNKVSAQEQRICRHHMISFVDPLVTNYTVVDFRNRATALIEDIFARDKIPIVVGGTNYYIESLLWKVLVNTKPQEMGTEKVIDRKVELEKEDGLVLHKRLSQVDPEMAAKLHPHDKRKVARSLQVFEETGISHSEFLHRQHTEEGGGPLGGPLKFSNPCILWLHADQAVLDERLDKRVDDMLAAGLLEELRDFHRRYNQKNVSENSQDYQHGIFQSIGFKEFHEYLITEGKCTLETSNQLLKKGPGPIVPPVYGLEVSDVSKWEESVLEPALEIVQSFIQGHKPTATPIKMPYNEAENKRSYHLCDLCDRIIIGDREWAAHIKSKSHLNQLKKRRRLDSDAVNTIESQSVSPDHNKEPKEKGSPGQNDQELKCSV

SEQ ID NO: 908455 - protein, 221 aa, Homo sapiens
MLAAGLLEELRDFHRRYNQKNVSENSQDYQHGIFQSIGFKEFHEYLITEGKCTLETSNQLLKKGIEALKQVTKRYARKQNRWVKNRFLSRPGPIVPPVYGLEVSDVSKWEESVLEPALEIVQSFIQGHKPTATPIKMPYNEAENKRSYHLCDLCDRIIIGDREWAAHIKSKSHLNQLKKRRRLDSDAVNTIESQSVSPDHNKEPKEKGSPGQNDQELKCSV

SEQ ID NO: 908456 - protein, 281 aa, Homo sapiens
SADCHKMASVAAARAVPVGSGLRGLQRTLPLVVILGATGTGKSTLALQLGQRLGGEIVSADSMQVYEGLDIITNKVSAQEQRICRHHMISFVDPLVTNYTVVDFRNRATALIEDIFARDKIPIVVGGTNYYIESLLWKVLVNTKPQEMGTEKVIDRKVELEKEDGLVLHKRLSQVDPEMAAKLHPHDKRKVARSLQVFEETGISHSEFLHRQHTEEGGGPLGGPLKFSNPCILWLHADQAVLDERLDKRVDDMLAAGLLEELRDFHRRYNQKNVSENREMM

SEQ ID NO: 908457 - protein, 193 aa, Homo sapiens
SADCHKMASVAAARAVPVGSGLRGLQRTLPLVVILGATGTGKSTLALQLGQRLGGEIVSADSMQVYEGLDIITNKVSAQEQRICRHHMISFVDPLVTNYTVVDFRNRATALIEDIFARDKIPIVVGGTNYYIESLLWKVLVNTKPQEMGTEKVIDRKVELEKEDGLVLHKRLSQVDPEMAAKLHPHDKRKVAR

SEQ ID NO: 908458 - protein, 298 aa, Homo sapiens
MSTNGDDHQVKDSLEQLRCHFTWELSIDDDEMPDLENRVLDQIEFLDTKYSVGIHNLLAYVKHLKGQNEGKRLKEALHKKGYQKHSNWPRTRNPMTKTKPKLVDTDDPGSGTLGEPTHSMHLATLSSETPTLETHATLATAKYPKQTSPSANQSVRDREKHYSHTSEQAVEARHFPPFPRLIPTMQDDRSPQPTPRPMGETRPAASRSPHGMTNARANREHQQFSPNQSATHGHHDARDQRAEKTADPHRGPMRTHQAHHRTRQNDLRPPPQTRNRGPNNPKHPQKNQPSAPQSSLRH

SEQ ID NO: 908459 - protein, 447 aa, Homo sapiens
MPDLENRVLDQIEFLDTKYSVGIHNLLAYVKHLKGQNEEALKSLKEAENLMQEEHDNQANVRSLVTWGNFAWMYYHMGRLAEAQTYLDKVENICKKLSNPFRYRMECPEIDCEEGWALLKCGGKNYERAKACFEKVLEVDPENPESSAGYAISAYRLDGFKLATKNHKPFSLLPLRQAVRLNPDNGYIKVLLALKLQDEGQEAEGEKYIEEALANMSSQTYVFRYAAKFYRRKGSVDKALELLKKALQETPTSVLLHHQIGLCYKAQMIQIKEATKGQPRGQNREKLDKMIRSAIFHFESAVEKKPTFEVAHLDLARMYIEAGNHRKAEENFQKLLCMKPVVEETMQDIHFHYGRFQEFQKKSDVNAIIHYLKAIKIEQASLTRDKSINSLKKLVLRKLRRKALDLESLSLLGFVYKLEGNMNEALEYYERALRLAADFENSVRQGP

SEQ ID NO: 908460 - protein, 112 aa, Homo sapiens
GDSEDSGSSQMQDIHFHYGRFQEFQKKSDVNAIIHYLKAIKIEQASLTRDKSINSLKKLVLRKLRRKALDLESLSLLGFVYKLEGNMNEALEYYERALRLAADFENSVRQGP

SEQ ID NO: 908461 - protein, 478 aa, Homo sapiens
MSTNGDDHQVKDSLEQLRCHFTWELSIDDDEMPDLENRVLDQIEFLDTKYSVGIHNLLAYVKHLKGQNEEALKSLKEAENLMQEEHDNQANVRSLVTWGNFAWMYYHMGRLAEAQTYLDKVENICKKLSNPFRYRMECPEIDCEEGWALLKCGGKNYERAKACFEKVLEVDPENPESSAGYAISAYRLDGFKLATKNHKPFSLLPLRQAVRLNPDNGYIKVLLALKLQDEGQEAEGEKYIEEALANMSSQTYVFRYAAKFYRRKGSVDKALELLKKALQETPTSVLLHHQIGLCYKAQMIQIKEATKGQPRGQNREKLDKMIRSAIFHFESAVEKKPTFEVAHLDLARMYIEAGNHRKAEENFQKLLCMKPVVEETMQDIHFHYGRFQEFQKKSDVNAIIHYLKAIKIEQASLTRDKSINSLKKLVLRKLRRKALDLESLSLLGFVYKLEGNMNEALEYYERALRLAADFENSVRQGP

SEQ ID NO: 908462 - protein, 478 aa, Homo sapiens; identical to SEQ ID NO: 908461

SEQ ID NO: 908463 - protein, 478 aa, Homo sapiens; identical to SEQ ID NO: 908461

SEQ ID NO: 908464 - protein, 742 aa, Homo sapiens
MFEREYTGLPGVCWEGSIISARVRQVRSTQMETSVSVSLWMPPSQRVFTFCVCHHVFVLLGASVFVSGRVSVLDRGDFVPDGFCVRARASVHVGELGGCVSVSMAVVRYKSEHVCQGVFVPVCACLGGHSRFLPNVGQCRCAALCLETSSRAGAQGRQVAATEEPKAPGLAGKDTTSSFSPLGPARVAGKQWWPALQGAVGPRPGQPQEKEGEGRGGKGEECLAPSRLPACHWPKVPVRHGEGSSPKVLCTYRAERTAKRLLQSTGWNWQAPRAPSTRQAECAGRVPTTPTPQPLNEASRRPLAARRAPPWVRLLRRPQPVRLPARLRAMGQPGNGSAFLLAPNGSHAPDHDVTQQRDEVWVVGMGIVMSLIVLAIVFGNVLVITAIAKFERLQTVTNYFITSLACADLVMGLAVVPFGAAHILMKMWTFGNFWCEFWTSIDVLCVTASIETLCVIAVDRYFAITSPFKYQSLLTKNKARVIILMVWIVSGLTSFLPIQMHWYRATHQEAINCYANETCCDFFTNQAYAIASSIVSFYVPLVIMVFVYSRVFQEAKRQLQKIDKSEGRFHVQNLSQVEQDGRTGHGLRRSSKFCLKEHKALKTLGIIMGTFTLCWLPFFIVNIVHVIQDNLIRKEVYILLNWIGYVNSGFNPLIYCRSPDFRIAFQELLCLRRSSLKAYGNGYSSNGNTGEQSGYHVEQEKENKLLCEDLPGTEDFVGHQGTVPSDNIDSQGRNCSTNDSLL

SEQ ID NO: 908465 - protein, 259 aa, Homo sapiens
MLPSTSVNSLVQGNGVLNSRDAARHTAGAKRYKYLRRLFRFRQMDFEFAAWQMLYLFTSPQRVYRNFHYRKQTKDQWARDDPAFLVLLSIWLCVSTIGFGFVLDMGFFETIKLLLWVVLIDCVGVGLLIATLMWFISNKYLVKRQSRDYDVEWGYAFDVHLNAFYPLLVILHFIQLFFINHVILTDTFIGYLVGNTLWLVAVGYYIYVTFLGYSALPFLKNTVILLYPFAPLILLYGLSLALGWNFTHTLCSFYKYRVK

SEQ ID NO: 908466 - protein, 259 aa, Homo sapiens; identical to SEQ ID NO: 908465

SEQ ID NO: 908467 - protein, 259 aa, Homo sapiens; identical to SEQ ID NO: 908465

SEQ ID NO: 908468 - protein, 140 aa, Homo sapiens
ASLVSGVCSQIRHQGGSVKAFKSNTFLRTPQWLLTSPGIKAKDCQPCFFSGFISCSFSFRHWSFHHSSGLPGTITILGSLPCYFMTLICTIASQVCILHISLLLSLFPLPSDIGVSLSAFLPRWKAGIFVCFVYWYISRI

SEQ ID NO: 908469 - protein, 261 aa, Homo sapiens
MLPSTSVNSLVQGNGVLNSRDAARHTAGAKRYKYLRRLFRFRQMDFEFAAWQMLYLFTSPQRVYRNFHYRKQTKDQWARDDPAFLVLLSIWLCVSTIGFGFVLDMGFFETIKLLLWVVLIDCVGVGLLIATLMWFISNKYLVKRQSRDYDVEWGYAFDVHLNAFYPLLVILHFIQLFFINHVILTDTFIGYLVGNTLWLVAVGYYIYVTFLGYSVWIPFFSSIAIFEKYSNSSVSICTSDSALRAFPGTGMELHPYSLFFL

SEQ ID NO: 908470 - protein, 216 aa, Homo sapiens
MLPSTSVNSLVQGNGVLNSRDAARHTAGAKRYKYLRRLFRFRQMDFEFAAWQMLYLFTSPQRVYRNFHYRKQTKDQWARDDPAFLVLLSIWLCVSTIGFGFVLDMGFFETIKLLLWVVLIDCVGVGLLIATLMWFISNKYLVKRQSRDYDVEWGYAFDVHLNAFYPLLVILHFIQLFFINHVILTDTFIGYLVGNTLWLVAVGYYIYVTFLGYSGK

SEQ ID NO: 908471 - protein, 173 aa, Homo sapiens
MLPSTSVNSLVQGNGVLNSRDAARHTAGAKRYKYLRRLFRFRQMDFEFAAWQMLYLFTSPQRVYRNFHYRKQTKDQWARDDPAFLVLLSIWLCVSTIGFGFVLDMGFFETIKLLLWVVLIDCVGVGLLIATLMCIAIFEKYSNSSVSICTSDSALRAFPGTGMELHPYSLFFL

SEQ ID NO: 908472 - protein, 133 aa, Homo sapiens
MLPSTSVNSLVQGNGVLNSRDAARHTAGAKRYKYLRRLFRFRQMDFEFAAWQMLYLFTSPQRVYRNFHYRKQTKDQWARDDPAFLVLLSIWLCVSTIGFGFVLDMGFFETIKLLLWVVLIDCVGVGLLIATLM

SEQ ID NO: 908473 - protein, 259 aa, Homo sapiens; identical to SEQ ID NO: 908465

SEQ ID NO: 908474 - protein, 236 aa, Homo sapiens
MLPSTSVNSLVQGNGVLNSRDAARHTAGAKRYKYLRRLFRFRQMDFEFAAWQMLYLFTSPQRVYRNFHYRMSTIGFGFVLDMGFFETIKLLLWVVLIDCVGVGLLIATLMWFISNKYLVKRQSRDYDVEWGYAFDVHLNAFYPLLVILHFIQLFFINHVILTDTFIGYLVGNTLWLVAVGYYIYVTFLGYSALPFLKNTVILLYPFAPLILLYGLSLALGWNFTHTLCSFYKYRVK

SEQ ID NO: 908475 - protein, 140 aa, Homo sapiens; identical to SEQ ID NO: 908468

SEQ ID NO: 908476 - protein, 182 aa, Homo sapiens [sequence omitted]

SEQ ID NO: 908477 - protein, 73 aa, Homo sapiens
GAKRYKYLRRLFRFRQMDFEFAAWQMLYLFTSPQRVYRNFHYRKQTKDQWARDDPAFLVLLSIWLCGKCVYLR

SEQ ID NO: 908478 - protein, 400 aa, Homo sapiens [sequence omitted]

SEQ ID NO: 908479 - protein, 400 aa, Homo sapiens [sequence omitted]

SEQ ID NO: 908480 - protein, 400 aa, Homo sapiens [sequence omitted]

SEQ ID NO: 908481 - protein, 335 aa, Homo sapiens
MLARRKPVLPALTINPTIAEGPSPTSEGASEANLVDLQKKLEELELDEQQKKRLEAFLTQKAKVGELKDDDFERISELGAGNGGVVTKVQHRPSGLIMARKLIHLEIKPAIRNQIIRELQVLHECNSPYIVGFYGAFYSDGEISICMEHMDGGSLDQVLKEAKRIPEEILGKVSIAVLRGLAYLREKHQIMHRDVKPSNILVNSRGEIKLCDFGVSGQLIDSMANSFVGTRSYMAPERLQGTHYSVQSDIWSMGLSLVELAVGRYPIPPPDAKELEAIFGRPVVDGEEGEPHSMAGVPLGTGDAAVCGLRGSASLGYKTKQGEKKQKPKKKRKKK

SEQ ID NO: 908482 - protein, 529 aa, Homo sapiens
MLARRKPVLPALTINPTIAEGPSPTSEGASEANLVDLQKKLEELELDEQQKKRLEAFLTQKAKVGELKDDDFERISELGAGNGGVVTKVQHRPSGLIMARKLIHLEIKPAIRNQIIRELQVLHECNSPYIVGFYGAFYSDGEISICMEHMDGGSLDQVLKEAKRIPEEILGKVSIAVLRGLAYLREKHQIMHRDVKPSNILVNSRGEIKLCDFGVSGQLIDSMANSFVGTRSYMAPERLQGTHYSVQSDIWSMGLSLVELAVGRYPIPPPDAKELEAIFGRPVVDGEEGEPHSMLAPPPTLLPHPCGEHRGGATAHAGTGVSSPARPGRGASGDGRRCCVWSQRLCFLRLQNKTGREKAKAKKKKKKKIIINNKNKNTITKNKQHICCARARPVGPPRKRLSFNTPPLWVWGGARARAPMVCYVTHRVAHHVFPLERDTPRGSYTTTKSGVGEFFATIYKKKSAGGGENKTREIVVSRQTSLQEGRRRFAEENKYRGWCLSTKEESITTTERASVFISDILSDAGVGGG

SEQ ID NO: 908483 - protein, 420 aa, Homo sapiens
YREKPVRDLVAAPPLPLPLGLGLRRQPSSGLGSGSGSLASGPSPTSEGASEANLVDLQKKLEELELDEQQKKRLEAFLTQKAKVGELKDDDFERISELGAGNGGVVTKVQHRPSGLIMARKLIHLEIKPAIRNQIIRELQVLHECNSPYIVGFYGAFYSDGEISICMEHMDGGSLDQVLKEAKRIPEEILGKVSIAVLRGLAYLREKHQIMHRDVKPSNILVNSRGEIKLCDFGVSGQLIDSMANSFVGTRSYMAPERLQGTHYSVQSDIWSMGLSLVELAVGRYPIPPPDAKELEAIFGRPVVDGEEGEPHSISPRPRPPGRPVSGHGMDSRPAMAIFELLDYIVNEPPPKLPNGVFTPDFQEFVNKCLIKNPAERADLKMLTNHTFIKRSEVEEVDFAGWLCKTLRLNQPGTPTRTAV

SEQ ID NO: 908484 - protein, 210 aa, Homo sapiens
MHRDVKPSNILVNSRGEIKLCDFGVSGQLIDSMANSFVGTRSYMAPERLQGTHYSVQSDIWSMGLSLVELAVGRYPIPPPDAKELEAIFGRPVVDGEEGEPHSISPRPRPPGRPVSGHGMDSRPAMAIFELLDYIVNEPPPKLPNGVFTPDFQEFVNKCLIKNPAERADLKMLTNHTFIKRSEVEEVDFAGWLCKTLRLNQPGTPTRTAV

SEQ ID NO: 908485 - protein, 270 aa, Homo sapiens
MLAVEEEAPASWGPSSIPKSAEHCRLFKSCGQHQLQASGWKPLQQVPQGGPGWVSREVELRNSSLSIAAVISHGEGDGGCERGKPPGFQLPSSPLWALSSLALLQPERLQGTHYSVQSDIWSMGLSLVELAVGRYPIPPPDAKELEAIFGRPVVDGEEGEPHSISPRPRPPGRPVSGHGMDSRPAMAIFELLDYIVNEPPPKLPNGVFTPDFQEFVNKCLIKNPAERADLKMLTNHTFIKRSEVEEVDFAGWLCKTLRLNQPGTPTRTAV

SEQ ID NO: 908486 - protein, 153 aa, Homo sapiens
SPRKTGTPQDASSSLSKFTVAAPDAKELEAIFGRPVVDGEEGEPHSISPRPRPPGRPVSGHGMDSRPAMAIFELLDYIVNEPPPKLPNGVFTPDFQEFVNKCLIKNPAERADLKMLTNHTFIKRSEVEEVDFAGWLCKTLRLNQPGTPTRTAV

SEQ ID NO: 908487 - protein, 210 aa, Homo sapiens; identical to SEQ ID NO: 908484

SEQ ID NO: 908488 - protein, 64 aa, Homo sapiens
EEILGKVSIAVSPPQTHIAPPPHSARTSSTRPGFREPLTVWWGLGWPLQKESGQGCAHLLWSLN

SEQ ID NO: 908489 - protein, 400 aa, Homo sapiens [sequence omitted]

SEQ ID NO: 908490 - protein, 425 aa, Homo sapiens
MLARRKPVLPALTINPTIAEGPSPTSEGASEANLVDLQKKLEELELDEQQKKRLEAFLTQKAKVGELKDDDFERISELGAGNGGVVTKVQHRPSGLIMARKLIHLEIKPAIRNQIIRELQVLHECNSPYIVGFYGAFYSDGEISICMEHMDGGSLDQVLKEAKRIPEEILGKVSIAVLRGLAYLREKHQIMHRDVKPSNILVNSRGEIKLCDFGVSGQLIDSMANSFVGTRSYMAPERLQGTHYSVQSDIWSMGLSLVELAVGRYPIPPPDAKELEAIFGRPVVDGEEGEPHSISPRPRPPGRPVSGHGMDSRPAMAIFELLDYIVNEPTPKLPTACTPPDFQEYWPKCLIQNPGKEADPEEGSSNHTLIQAGPEGKKEIKPAETVDKHRERTTQEHKHPRETVPGNKGPKEKETDRVIHALTRK

SEQ ID NO: 908491 - protein, 254 aa, Homo sapiens
MLARRKPVLPALTINPTIAEGPSPTSEGASEANLVDLQKKLEELELDEQQKKRLEAFLTQKAKVGELKDDDFERISELGAGNGGVVTKVQHRPSGLIMARKLIHLEIKPAIRNQIIRELQVLHECNSPYIVGFYGAFYSDGEISICMEHMDGGSLDQVLKEAKRIPEEILGKVSIAVLRGLAYLREKHQIMHRDVKPSNILVNSRGEIKLCDFGVSGQLIDSMANSFVGTRSYMAVTGWIAGLPWPSLNSWTIL

SEQ ID NO: 908492 - protein, 340 aa, Homo sapiens
MLARRKPVLPALTINPTIAEGPSPTSEGASEANLVDLQKKLEELELDEQQKKRLEAFLTQKAKVGELKDDDFERISELGAGNGGVVTKVQHRPSGLIMARKLIHLEIKPAIRNQIIRELQVLHECNSPYIVGFYGAFYSDGEISICMEHMDGGSLDQVLKEAKRIPEEILGKVSIAVLRGLAYLREKHQIMHRDVKPSNILVNSRGEIKLCDFGVSGQLIDSMANSFVGTRSYMAPERLQGTHYSVQSDIWSMGLSLVELAVGRYPIPRPKAQLCFGLLSAESALGYGGRTGWGSGSRPSHSACQTYPPCASVHPVHTQGLQEHPESVGCLPAVPKQGDP

SEQ ID NO: 908493 - protein, 210 aa, Homo sapiens; identical to SEQ ID NO: 908484

SEQ ID NO: 908494 - protein, 217 aa, Homo sapiens
MLARRKPVLPALTINPTIAEGPSPTSEGASEANLVDLQKKLEELELDEQQKKRLEAFLTQKAKVGELKDDDFERISELGAGNGGVVTKVQHRPSGLIMARKLIHLEIKPAIRNQIIRELQVLHECNSPYIVGFYGAFYSDGEISICMEHMVSASGAGAGAGPPRNRACWGEGRPPHGPFPQRQQCAGFQGILLKAVDAIQVCICRCLWFCFVFFLFF

SEQ ID NO: 908495 - protein, 297 aa, Homo sapiens
MLARRKPVLPALTINPTIAEGPSPTSEGASEANLVDLQKKLEELELDEQQKKRLEAFLTQKAKVGELKDDDFERISELGAGNGGVVTKVQHRPSGGRGASGDGRRCCVWSQRLCFLRLQNKTGREKAKAKKKKKKKIIINNKNKNTITKNKQHICCARARPVGPPRKRLSFNTPPCGCGGARALRAPMVCYVTHRVAHHVFPLERDTPRGSYTTTKSGVGEFFATIYKKKSAGGGENKTREIVVSRQTSLQEGRRRFAEENKYRGWCLSTKEESITTTERASVFISDILSDAGVGGG

SEQ ID NO: 908496 - protein, 514 aa, Homo sapiens
GGPGGKSRQGGAVSGNQVATRVGFIFLWNFCFTDRTMAARVLIIGSGGREHTLAWKLAQSHHVKQVLVAPGNAGTACSEKISNTAISISDHTALAQFCKEKKIEFVVVGPEAPLAAGIVGNLRSAGVQCFGPTAEAAQLESSKRFAKEFMDRHGIPTAQWKAFTKPEEACSFILSADFPALVVKASGLAAGKGVIVAKSKEEACKAVQEIMQEKAFGAAGETIVIEELLDGEEVSCLCFTDGKTVAPMPPAQDHKRLLEGDGGPNTGGMGAYCPAPQVSNDLLLKIKDTVLQRTVDGMQQEGTPYTGILYAGIMLTKNGPKVLEFNCRFGDPECQVILPLLKSDLYEVIQSTLDGLLCTSLPVWLENHTALTVVMASKGYPGDYTKGVEITGFPEAQALGLEVFHAGTALKNGKVVTHGGRVLAVTAIRENLISALEEAKKGLAAIKFEGAIYRKDIGFRAIAFLQQPRSLTYKESGVDIAAGNMLVKKIQPLAKATSRSGCKVDLGGLLVFLI

SEQ ID NO: 908497 - protein, 478 aa, Homo sapiens
MAARVLIIGSGGREHTLAWKLAQSHHVKQVLVAPGNAGTACSEKISNTAISISDHTALAQFCKEKKIEFVVVGPEAPLAAGIVGNLRSAGVQCFGPTAEAAQLESSKRFAKEFMDRHGIPTAQWKAFTKPEEACSFILSADFPALVVKASGLAAGKGVIVAKSKEEACKAVQEIMQEKAFGAAGETIVIEELLDGEEVSCLCFTDGKTVAPMPPAQDHKRLLEGDGGPNTGGMGAYCPAPQVSNDLLLKIKDTVLQRTVDGMQQEGTPYTGILYAGIMLTKNGPKVLEFNCRFGDPECQVILPLLKSDLYEVIQSTLDGLLCTSLPVWLENHTALTVVMASKGYPGDYTKGVEITGFPEAQALGLEVFHAGTALKNGKVVTHGGRVLAVTAIRENLISALEEAKKGLAAIKFEGAIYRKDIGFRAIAFLQQPRSLTYKESGVDIAAGNMLVKKIQPLAKATSRSGCKVDLGGLLVFLI

SEQ ID NO: 908498 - protein, 478 aa, Homo sapiens; identical to SEQ ID NO: 908497

SEQ ID NO: 908499 - protein, 478 aa, Homo sapiens; identical to SEQ ID NO: 908497

SEQ ID NO: 908500 - protein, 478 aa, Homo sapiens; identical to SEQ ID NO: 908497

SEQ ID NO: 908501 - protein, 288 aa, Homo sapiens
MAARVLIIGSGGREHTLAWKLAQSHHVKQVLVAPGNAGTACSEKISNTAISISDHTALAQFCKEKKIEFVVVGPEAPLAAGIVGNLRSAGVQCFGPTAEAAQLESSKRFAKEFMDRHGIPTAQWKAFTKPEEACSFILSADFPALVVKASGLAAGKGVIVAKSKEEACKAVQEIMQEKAFGAAGETIVIEELLDGEEVSCLCFTDGKTVAPMPPAQDHKRLLEGDGGPNTGGMGAYCPAPQVSNDLLLKIKDTVLQRTVDGMQQEGTPYTGRPTHITMEATYRVTFYF

SEQ ID NO: 908502 - protein, 478 aa, Homo sapiens; identical to SEQ ID NO: 908497

SEQ ID NO: 908503 - protein, 478 aa, Homo sapiens; identical to SEQ ID NO: 908497

SEQ ID NO: 908504 - protein, 306 aa, Homo sapiens
RVCVRLLSGLMSRNRLYTNVGVHSVSHDQQRRVKALLLDTVGNKDQSGLDPAKGDKIKWAGVVARAEGSPRVKVKNLIESMQINGSVLKNGSLTNHFSFEKKKARVAVLISGTGSNLQALIDSTREPNSSAQIDIVISNKAAVAGLDKAERAGIPTRVINHKLYKNRVEFDSAIDLVLEEFSIDIVCLAGFMRILSGPFVQKWNGKMLNIHPSLLPSFKGSNAHEQALETGVTVTGCTVHFVAEDVDAGQIILQEAVPVKRGDTVATLSERVKLAEHKIFPAALQLVASGTVQLGENGKICWVKEE

SEQ ID NO: 908505 - protein, 94 aa, Homo sapiens
EILLLFEIICQICSLLGFPEAQALGLEVFHAGTALKNGKVVTHGGRVLAVTAIRENLISALEEAKKGLAAIKFEGAIYRKDIGFRAIAFLQQPR

SEQ ID NO: 908506 - protein, 181 aa, Homo sapiens [sequence omitted]

SEQ ID NO: 908507 - protein, 433 aa, Homo sapiens [sequence omitted]

SEQ ID NO: 908508 - protein, 478 aa, Homo sapiens; identical to SEQ ID NO: 908497

SEQ ID NO: 908509 - protein, 478 aa, Homo sapiens; identical to SEQ ID NO: 908497

SEQ ID NO: 908510 - protein, 478 aa, Homo sapiens; identical to SEQ ID NO: 908497

SEQ ID NO: 908511 - protein, 492 aa, Homo sapiens
MCVNDILAQGAEPLFFLDYFSCGKLDLSVTEAVVAGIAKACGKAGCALLGGETAEMPDMYPPGEYDLAGFAVGAMERDQKLPHLERITEGDVVVGIASSGLHSNGFSLVRKIVAKSSLQYSSPAPDGCGDQTLGDLLLTPTRIYSHSLLPVLRSGHVKAFAHITGGGLLENIPRVLPEKLGVDLDAQTWRIPRVFSWLQQEGHLSEEEMARTFNCGVGAVLVVSKEQTEQILRDIQQHKEEAWVIGSVVARAEGSPRVKVKNLIESMQINGSVLKNGSLTNHFSFEKKKARVAVLISGTGSNLQALIDSTREPNSSAQIDIVISNKAAVAGLDKAERAGIPTRVINHKLYKNRVEFDSAIDLVLEEFSIDIVCLAGFMRILSGPFVQKWNGKMLNIHPSLLPSFKGSNAHEQALETGVTVTGCTVHFVAEDVDAGQIILQEAVPVKRGDTVATLSERVKLAEHKIFPAALQLVASGTVQLGENGKICWVKEE

SEQ ID NO: 908512 - protein, 349 aa, Homo sapiens
RTRGSTHASRSGHVKAFAHITGGGLLENIPRVLPEKLGVDLDAQTWRIPRVFSWLQQEGHLSEEEMARTFNCGVGAVLVVSKEQTEQILRDIQQHKEEAWVIGSVVARAEGSPRVKVKNLIESMQINGSVLKNGSLTNHFSFEKKKARVAVLISGTGSNLQALIDSTREPNSSAQIDIVISNKAAVAGLDKAERAGIPTRVINHKLYKNRVEFDSAIDLVLEEFSIDIVCLAGFMRILSGPFVQKWNGKMLNIHPSLLPSFKGSNAHEQALETGVTVTGCTVHFVAEDVDAGQIILQEAVPVKRGDTVATLSERVKLAEHKIFPAALQLVASGTVQLGENGKICWVKEE

SEQ ID NO: 908513 - protein, 315 aa, Homo sapiens
MAARVLIIGSGGREHTLAWKLAQSHHVKQVLVAPGNAGTACSEKISNTAISISDHTALAQFCKEKKIEFVVVGPEAPLAAGIVGNLRSAGVQCFGPTAEAAQLESSKRFAKEFMDRHGIPTAQWKAFTKPEEACSFILSADFPALVVKASGLAAGKGVIVAKSKEEACKAVQEIMQEKAFGAAGETIVIEELLDGEEVSCLCFTDGKTVAPMPPAQDHKRLLEGDGGPNTGGMGAYCPAPQVSNDLLLKIKDTVLQRTVDGMQQEGTPYTGILYAGIMLTKNGPKVLEFNCRFGDPECQVGKNIKVLLGRRYVVF

SEQ ID NO: 908514 - protein, 251 aa, Homo sapiens [sequence omitted]

SEQ ID NO: 908515 - protein, 73 aa, Homo sapiens
ILIRITVTKEKRRANCDDSLNLHRYTLECSGMISAHCNLRLPGSSDSPASASQIAVITGHSVHVTNSWLRGYG

SEQ ID NO: 908516 - protein, 78 aa, Homo sapiens
HWYLLPFRGGYESGTGGQIQSPKGEMENLWVFLQPQPHWYLLPFRGGYESGTGGQIQSPEGEMEKPGLLRKATGVGVN

SEQ ID NO: 908517 - protein, 1894 aa, Homo sapiens
IRGRVDRRRQKGGCRRRGAGDPNMANLEESFPRGGTRKIHKPEKAFQQSVEQDNLFDISTEEGSTKRKKSQKGPAKTKKLKIEKRESSKSAREKFEILSVESLCEGMRILGCVKEVNELELVISLPNGLQGFVQVTEICDAYTKKLNEQVTQEQPLKDLLHLPELFSPGMLVRCVVSSLGITDRGKKSVKLSLNPKNVNRVLSAEALKPGMLLTGTVSSLEDHGYLVDIGVDGTRAFLPLLKAQEYIRQKNKGAKLKVGQYLNCIVEKVKGNGGVVSLSVGHSEVSTAIATEQQSWNLNNLLPGLVVKAQVQKVTPFGLTLNFLTFFTGVVDFMHLDPKKAGTYFSNQAVRACILCVHPRTRVVHLSLRPIFLQPGRPLTRLSCQNLGAVLDDVPVQGFFKKAGATFRLKDGVLAYARLSHLSDSKNVFNPEAFKPGNTHKCRIIDYSQMDELALLSLRTSIIEAQYLRYHDIEPGAVVKGTVLTIKSYGMLVKVGEQMRGLVPPMHLADILMKNPEKKYHIGDEVKCRVLLCDPEAKKLMMTLKKTLIESKLPVITCYADAKPGLQTHGFIIRVKDYGCIVKFYNNVQGLVPKHELSTEYIPDPERVFYTGQVVKVVVLNCEPSKERMLLSFKLSSDPEPKKEPAGHSQKKGKAINIGQLVDVKVLEKTKDGLEVAVLPHNIRAFLPTSHLSDHVANGPLLHHWLQAGDILHRVLCLSQSEGRVLLCRKPALVSTVEGGQDPKNFSEIHPGMLLIGFVKSIKDYGVFIQFPSGLSGLAPKAIMSDKFVTSTSDHFVEGQTVAAKVTNVDEEKQRMLLSLRLSDCGLGDLAITSLLLLNQCLEELQGVRSLMSNRDSVLIQTLAEMTPGMFLDLVVQEVLEDGSVVFSGGPVPDLVLKASRYHRAGQEVESGQKKKVVILNVDLLKLEVHVSLHQDLVNRKARKLRKGSEHQAIVQHLEKSFAIASLVETGHLAAFSLTSHLNDTFRFDSEKLQVGQGVSLTLKTTEPGVTGLLLAVEGPAAKRTMRPTQKDSETVDEDEEVDPALTVGTIKKHTLSIGDMVTGTVKSIKPTHVVVTLEDGIIGCIHASHILDDVPEGTSPTTKLKVGKTVTARVIGGRDMKTFKYLPISHPRFVRTIPELSVRPSELEDGHTALNTHSVSPMEKIKQYQAGQTVTCFLKKYNVVKKWLEVEIAPDIRGRIPLLLTSLSFKVLKHPDKKFRVGQALRATVVGPDSSKTFLCLSLTGPHKLEEGEVAMGRVVKVTPNEGLTVSFPFGKIGTVSIFHMSDSYSETPLEDFVPQKVVRCYILSTADNVLTLSLRSSRTNPETKSKVEDPEINSIQDIKEGQLLRGYVGSIQPHGVFFRLGPSVVGLARYSHVSQHSPSKKALYNKHLPEGKLLTARVLRLNHQKNLVELSFLPGDTGKPDVLSASLEGQLTKQEERKTEAEERDQKGEKKNQKRNEKKNQKGQEEVEMPSKEKQQPQKPQAQKRGGRECRESGSEQERVSKKPKKAGLSEEDDSLVDVYYREGKEEAEETNVLPKEKQTKPAEAPRLQLSSGFAWNVGLDSLTPALPPLAESSDSEEDEKPHQATIKKSKKERELEKQKAEKELSRIEEALMDPGRQPESADDFDRLVLSSPNSSILWLQYMAFHLQATEIEKARAVAERALKTISFREEQEKLNVWVALLNLENMYGSQESLTKVFERAVQYNEPLKVFLHLADIYAKSEKFQEAGELYNRMLKRFRQEKAVWIKYGAFLLRRSQAAASHRVLQRALECLPSKEHVDVIAKFAQLEFQLGDAERAKAIFENTLSTYPKRTDVWSVYIDMTIKHGSQKDVRDIFERVIHLSLAPKRMKFFFKRYLDYEKQHGTEKDVQAVKAKALEYVEAKSSVLEA

SEQ ID NO: 908518 - protein, 1289 aa, Homo sapiens
  misc_feature (4)..(4): Xaa can be any naturally occurring amino acid
SSSXPILPVVKVVVLNCEPSKERMLLSFKLSSDPEPKKEPAGHSQKKGKAINIGQLVDVKVLEKTKDGLEVAVLPHNIRAFLPTSHLSDHVANGPLLHHWLQAGDILHRVLCLSQSEGRVLLCRKPALVSTVEGGQDPKNFSEIHPGMLLIGFVKSIKDYGVFIQFPSGLSGLAPKAIMSDKFVTSTSDHFVEGQTVAAKVTNVDEEKQRMLLSLRLSDCGLGDLAITSLLLLNQCLEELQGVRSLMSNRDSVLIQTLAEMTPGMFLDLVVQEVLEDGSVVFSGGPVPDLVLKASRYHRAGQEVESGQKKKVVILNVDLLKLEVHVSLHQDLVNRKARKLRKGSEHQAIVQHLEKSFAIASLVETGHLAAFSLTSHLNDTFRFDSEKLQVGQGVSLTLKTTEPGVTGLLLAVEGPAAKRTMRPTQKDSETVDEDEEVDPALTVGTIKKHTLSIGDMVTGTVKSIKPTHVVVTLEDGIIGCIHASHILDDVPEGTSPTTKLKVGKTVTARVIGGRDMKTFKYLPISHPRFVRTIPELSVRPSELEDGHTALNTHSVSPMEKIKQYQAGQTVTCFLKKYNVVKKWLEVEIAPDIRGRIPLLLTSLSFKVLKHPDKKFRVGQALRATVVGPDSSKTLLCLSLTGPHKLEEGEVAMGRVVKVTPNEGLTVSFPFGKIGTVSIFHMSDSYSETPLEDFVPQKVVRCYILSTADNVLTLSLRSSRTNPETKSKVEDPEINSIQDIKEGQLLRGYVGSIQPHGVFFRLGPSVVGLARYSHVSQHSPSKKALYNKHLPEGKLLTARVLRLNHQKNLVELSFLPGDTGKPDVLSASLEGQLTKQEERKTEAEERDQKGEKKNQKRNEKKNQKGQEEVEMPSKEKQQPQKPQAQKRGGRECRESGSEQERVSKKPKKAGLSEEDDSLVDVYYREGKEEAEETNVLPKEKQTKPAEAPRLQLSSGFAWNVGLDSLTPALPPLAESSDSEEDEKPHQATIKKSKKERELEKQKAEKELSRIEEALMDPGRQPESADDFDRLVLSSPNSSILWLQYMAFHLQATEIEKARAVAERALKTISFREEQEKLNVWVALLNLENMYGSQESLTKVFERAVQYNEPLKVFLHLADIYAKSEKFQEAGELYNRMLKRFRQEKAVWIKYGAFLLRRSQAAASHRVLQRALECLPSKEHVDVIAKFAQLEFQLGDAERAKAIFENTLSTYPKRTDVWSVYIDMTIKHGSQKDVRDIFERVIHLSLAPKRMKFFFKRYLDYEKQHGTEKDVQAVKAKALEYVEAKSSVLEA

SEQ ID NO: 908519 - protein, 1051 aa, Homo sapiens
MVLIRVSFGSLADSVLIQTLAEMTPGMFLDLVVQEVLEDGSVVFSGGPVPDLVLKASRYHRAGQEVESGQKKKVVILNVDLLKLEVHVSLHQDLVNRKARKLRKGSEHQAIVQHLEKSFAIASLVETGHLAAFSLTSHLNDTFRFDSEKLQVGQGVSLTLKTTEPGVTGLLLAVEGPAAKRTMRPTQKDSETVDEDEEVDPALTVGTIKKHTLSIGDMVTGTVKSIKPTHVVVTLEDGIIGCIHASHILDDVPEGTSPTTKLKVGKTVTARVIGGRDMKTFKYLPISHPRFVRTIPELSVRPSELEDGHTALNTHSVSPMEKIKQYQAGQTVTCFLKKYNVVKKWLEVEIAPDIRGRIPLLLTSLSFKVLKHPDKKFRVGQALRATVVGPDSSKTFLCLSLTGPHKLEEGEVAMGRVVKVTPNEGLTVSFPFGKIGTVSIFHMSDSYSETPLEDFVPQKVVRCYILSTADNVLTLSLRSSRTNPETKSKVEDPEINSIQDIKEGQLLRGYVGSIQPHGVFFRLGPSVVGLARYSHVSQHSPSKKALYNKHLPEGKLLTARVLRLNHQKNLVELSFLPGDTGKPDVLSASLEGQLTKQEERKTEAEERDQKGEKKNQKRNEKKNQKGQEEVEMPSKEKQQPQKPQAQKRGGRECRESGSEQERVSKKPKKAGLSEEDDSLVDVYYREGKEEAEETNVLPKEKQTKPAEAPRLQLSSGFAWNVGLDSLTPALPPLAESSDSEEDEKPHQATIKKSKKERELEKQKAEKELSRIEEALMDPGRQPESADDFDRLVLSSPNSSILWLQYMAFHLQATEIEKARAVAERALKTISFREEQEKLNVWVALLNLENMYGSQESLTKVFERAVQYNEPLKVFLHLADIYAKSEKFQEAGELYNRMLKRFRQEKAVWIKYGAFLLRRSQAAASHRVLQRALECLPSKEHVDVIAKFAQLEFQLGDAERAKAIFENTLSTYPKRTDVWSVYIDMTIKHGSQKDVRDIFERVIHLSLAPKRMKFFFKRYLDYEKQHGTEKDVQAVKAKALEYVEAKSSVLEA

SEQ ID NO: 908520 - protein, 497 aa, Homo sapiens
  misc_feature (8)..(8): Xaa can be any naturally occurring amino acid
ALWSPRGXGISSYPRASSLSFLPGDTGKPDVLSASLEGQLTKQEERKTEAEERDQKGEKKNQKRNEKKNQKGQEEVEMPSKEKQQPQKPQAQKRGGRECRESGSEQERVSKKPKKAGLSEEDDSLVDVYYREGKEEAEETNVLPKEKQTKPAEAPRLQLSSGFAWNVGLDSLTPALPPLAESSDSEEDEKPHQATIKKSKKERELEKQKAEKELSRIEEALMDPGRQPESADDFDRLVLSSPNSSILWLQYMAFHLQATEIEKARAVAERALKTISFREEQEKLNVWVALLNLENMYGSQESLTKVFERAVQYNEPLKVFLHLADIYAKSEKFQEAGELYNRMLKRFRQEKAVWIKYGAFLLRRSQAAASHRVLQRALECLPSKEHVDVIAKFAQLEFQLGDAERAKAIFENTLSTYPKRTDVWSVYIDMTIKHGSQKDVRDIFERVIHLSLAPKRMKFFFKRYLDYEKQHGTEKDVQAVKAKALEYVEAKSSVLEA

SEQ ID NO: 908521 - protein, 1535 aa, Homo sapiens
RIALDCGYPGLRVCEYRGARLVVAGCRRRGAGDPNMANLEESFPRGGTRKIHKPEKAFQQSVEQDNLFDISTEEGSTKRKKSQKGPAKTKKLKIEKRESSKSAREKFEILSVESLCEGMRILGCVKEVNELELVISLPNGLQGFVQVTEICDAYTKKLNEQVTQEQPLKDLLHLPELFSPGMLVRCVVSSLGITDRGKKSVKLSLNPKNVNRVLSAEALKPGMLLTGTVSSLEDHGYLVDIGVDGTRAFLPLLKAQEYIRQKNKGAKLKVGQYLNCIVEKVKGNGGVVSLSVGHSEVSTAIATEQQSWNLNNLLPGLVVKAQVQKVTPFGLTLNFLTFFTGVVDFMHLDPKKAGTYFSNQAVRACILCVHPRTRVVHLSLRPIFLQPGRPLTRLSCQNLGAVLDDVPVQGFFKKAGATFRLKDGVLAYARLSHLSDSKNVFNPEAFKPGNTHKCRIIDYSQMDELALLSLRTSIIEAQYLRYHDIEPGAVVKGTVLTIKSYGMLVKVGEQMRGLVPPMHLADILMKNPEKKYHIGDEVKCRVLLCDPEAKKLMMTLKKTLIESKLPVITCYADAKPGLQTHGFIIRVKDYGCIVKFYNNVQGLVPKHELSTEYIPDPERVFYTGQVVKVVVLNCEPSKERMLLSFKLSSDPEPKKEPAGHSQKKGKAINIGQLVDVKVLEKTKDGLEVAVLPHNIRAFLPTSHLSDHVANGPLLHHWLQAGDILHRVLCLSQSEGRVLLCRKPALVSTVEGGQDPKNFSEIHPGMLLIGFVKSIKDYGVFIQFPSGLSGLAPKAIMSDKFVTSTSDHFVEGQTVAAKVTNVDEEKQRMLLSLRLSDCGLGDLAITSLLLLNQCLEELQGVRSLMSNRDSVLIQTLAEMTPGMFLDLVVQEVLEDGSVVFSGGPVPDLVLKASRYHRAGQEVESGQKKKVVILNVDLLKLEVHVSLHQDLVNRKARKLRKGSEHQAIVQHLEKSFAIASLVETGHLAAFSLTSHLNDTFRFDSEKLQVGQGVSLTLKTTEPGVTGLLLAVEGPAAKRTMRPTQKDSETVDEDEEVDPALTVGTIKKHTLSIGDMVTGTVKSIKPTHVVVTLEDGIIGCIHASHILDDVPEGTSPTTKLKVGKTVTARVIGGRDMKTFKYLPISHPRFVRTIPELSVRPSELEDGHTALNTHSVSPMEKIKQYQAGQTVTCFLKKYNVVKKWLEVEIAPDIRGRIPLLLTSLSFKVLKHPDKKFRVGQALRATVVGPDSSKTFLCLSLTGPHKLEEGEVAMGRVVKVTPNEGLTVSFPFGKIGTVSIFHMSDSYSETPLEDFVPQKVVRCYILSTADNVLTLSLRSSRTNPETKSKVEDPEINSIQDIKEGQLLRGYVGSIQPHGVFFRLGPSVVGLARYSHVSQHSPSKKALYNKHLPEGKLLTARVLRLNHQKNLVELSFLPGDTGKPDVLSASLEGQLTKQEERKTEAEERDQKGEKKNQKRNEKKNQKGQEEVEMPSKEKQQPQKPQAQKRGGRECRESGSEQERVSKKPKKAGAVSPAGGGQ

SEQ ID NO: 908522 - protein, 1337 aa, Homo sapiens
RIALDCGYPGLRVCEYRGARLVVAGCRRRGAGDPNMANLEESFPRGGTRKIHKPEKAFQQSVEQDNLFDISTEEGSTKRKKSQKGPAKTKKLKIEKRESSKSAREKFEILSVESLCEGMRILGCVKEVNELELVISLPNGLQGFVQVTEICDAYTKKLNEQVTQEQPLKDLLHLPELFSPGMLVRCVVSSLGITDRGKKSVKLSLNPKNVNRVLSAEALKPGMLLTGTVSSLEDHGYLVDIGVDGTRAFLPLLKAQEYIRQKNKGAKLKVGQYLNCIVEKVKGNGGVVSLSVGHSEVSTAIATEQQSWNLNNLLPGLVVKAQVQKVTPFGLTLNFLTFFTGVVDFMHLDPKKAGTYFSNQAVRACILCVHPRTRVVHLSLRPIFLQPGRPLTRLSCQNLGAVLDDVPVQGFFKKAGATFRLKDGVLAYARLSHLSDSKNVFNPEAFKPGNTHKCRIIDYSQMDELALLSLRTSIIEAQYLRYHDIEPGAVVKGTVLTIKSYGMLVKVGEQMRGLVPPMHLADILMKNPEKKYHIGDEVKCRVLLCDPEAKKLMMTLKKTLIESKLPVITCYADAKPGLQTHGFIIRVKDYGCIVKFYNNVQGLVPKHELSTEYIPDPERVFYTGQVVKVVVLNCEPSKERMLLSFKLSSDPEPKKEPAGHSQKKGKAINIGQLVDVKVLEKTKDGLEVAVLPHNIRAFLPTSHLSDHVANGPLLHHWLQAGDILHRVLCLSQSEGRVLLCRKPALVSTVEGGQDPKNFSEIHPGMLLIGFVKSIKDYGVFIQFPSGLSGLAPKAIMSDKFVTSTSDHFVEGQTVAAKVTNVDEEKQRMLLSLRLSDCGLGDLAITSLLLLNQCLEELQGVRSLMSNRDSVLIQTLAEMTPGMFLDLVVQEVLEDGSVVFSGGPVPDLVLKASRYHRAGQEVESGQKKKVVILNVDLLKLEVHVSLHQDLVNRKARKLRKGSEHQAIVQHLEKSFAIASLVETGHLAAFSLTSHLNDTFRFDSEKLQVGQGVSLTLKTTEPGVTGLLLAVEGPAAKRTMRPTQKDSETVDEDEEVDPALTVGTIKKHTLSIGDMVTGTVKSIKPTHVVVTLEDGIIGCIHASHILDDVPEGTSPTTKLKVGKTVTARVIGGRDMKTFKYLPISHPRFVRTIPELSVRPSELEDGHTALNTHSVSPMEKIKQYQAGQTVTCFLKKYNVVKKWLEVEIAPDIRGRIPLLLTSLSFKVLKHPDKKFRVGQALRATVVGPDSSKTFLCLSLTGPHKLEEGEVAMGRVVKVTPNEGLTVSFPFGKIGTVSIFHMSDSYSETPLEDFVPQKVVRCYILSTADNVLTLSLRSSSC

SEQ ID NO: 908523 - protein, 1217 aa, Homo sapiens
RIALDCGYPGLRVCEYRGARLVVAGCRRRGAGDPNMANLEESFPRGGTRKIHKPEKAFQQSVEQDNLFDISTEEGSTKRKKSQKGPAKTKKLKIEKRESSKSAREKFEILSVESLCEGMRILGCVKEVNELELVISLPNGLQGFVQVTEICDAYTKKLNEQVTQEQPLKDLLHLPELFSPGMLVRCVVSSLGITDRGKKSVKLSLNPKNVNRVLSAEALKPGMLLTGTVSSLEDHGYLVDIGVDGTRAFLPLLKAQEYIRQKNKGAKLKVGQYLNCIVEKVKGNGGVVSLSVGHSEVSTAIATEQQSWNLNNLLPGLVVKAQVQKVTPFGLTLNFLTFFTGVVDFMHLDPKKAGTYFSNQAVRACILCVHPRTRVVHLSLRPIFLQPGRPLTRLSCQNLGAVLDDVPVQGFFKKAGATFRLKDGVLAYARLSHLSDSKNVFNPEAFKPGNTHKCRIIDYSQMDELALLSLRTSIIEAQYLRYHDIEPGAVVKGTVLTIKSYGMLVKVGEQMRGLVPPMHLADILMKNPEKKYHIGDEVKCRVLLCDPEAKKLMMTLKKTLIESKLPVITCYADAKPGLQTHGFIIRVKDYGCIVKFYNNVQGLVPKHELSTEYIPDPERVFYTGQVVKVVVLNCEPSKERMLLSFKLSSDPEPKKEPAGHSQKKGKAINIGQLVDVKVLEKTKDGLEVAVLPHNIRAFLPTSHLSDHVANGPLLHHWLQAGDILHRVLCLSQSEGRVLLCRKPALVSTVEGGQDPKNFSEIHPGMLLIGFVKSIKDYGVFIQFPSGLSGLAPKAIMSDKFVTSTSDHFVEGQTVAAKVTNVDEEKQRMLLSLRLSDCGLGDLAITSLLLLNQCLEELQGVRSLMSNRDSVLIQTLAEMTPGMFLDLVVQEVLEDGSVVFSGGPVPDLVLKASRYHRAGQEVESGQKKKVVILNVDLLKLEVHVSLHQDLVNRKARKLRKGSEHQAIVQHLEKSFAIASLVETGHLAAFSLTSHLNDTFRFDSEKLQVGQGVSLTLKTTEPGVTGLLLAVEGPAAKRTMRPTQKDSETVDEDEEVDPALTVGTIKKHTLSIGDMVTGTVKSIKPTHVVVTLEDGIIGCIHASHILDDVPEGTSPTTKLKVGKTVTARVIGGRDMKTFKYLPISHPRFVRTIPELSVRPSELEDGHTALNTHSVSPMEKIKQYQAGQTVTCFLKKYNVVKKWLEVEIAPDIRGRIDTSH

SEQ ID NO: 908524 - protein, 226 aa, Homo sapiens
RIALDCGYPGLRVCEYRGARLVVAGCRRRGAGDPNMANLEESFPRGGTRKIHKPEKAFQQSVEQDNLFDISTEEGSTKRKKSQKGPAKTKKLKIEKRESSKSAREKFEILSVESLCEGMRILGCVKEVNELELVISLPNGLQGFVQVTEICDAYTKKLNEQVTQEQPLKDLLHLPELFSPGMLVRCVVSSLGITDRGKKSVKLSLNPKNVNRVLSAEALKPGMVGV

SEQ ID NO: 908525 - protein, 73 aa, Homo sapiens
ADAKPGLQTHGFIIRVKDYGCIVKFYNNVQGLVPKHELSTEYIPDPERVFYTGQVTLPLDRSPLPLVTPQTQI

SEQ ID NO: 908526 - protein, 1906 aa, Homo sapiens
RIALDCGYPGLRVCEYRGARLVVAGCRRRGAGDPNMANLEESFPRGGTRKIHKPEKAFQQSVEQDNLFDISTEEGSTKRKKSQKGPAKTKKLKIEKRESSKSAREKFEILSVESLCEGMRILGCVKEVNELELVISLPNGLQGFVQVTEICDAYTKKLNEQVTQEQPLKDLLHLPELFSPGMLVRCVVSSLGITDRGKKSVKLSLNPKNVNRVLSAEALKPGMLLTGTVSSLEDHGYLVDIGVDGTRAFLPLLKAQEYIRQKNKGAKLKVGQYLNCIVEKVKGNGGVVSLSVGHSEVSTAIATEQQSWNLNNLLPGLVVKAQVQKVTPFGLTLNFLTFFTGVVDFMHLDPKKAGTYFSNQAVRACILCVHPRTRVVHLSLRPIFLQPGRPLTRLSCQNLGAVLDDVPVQGFFKKAGATFRLKDGVLAYARLSHLSDSKNVFNPEAFKPGNTHKCRIIDYSQMDELALLSLRTSIIEAQYLRYHDIEPGAVVKGTVLTIKSYGMLVKVGEQMRGLVPPMHLADILMKNPEKKYHIGDEVKCRVLLCDPEAKKLMMTLKKTLIESKLPVITCYADAKPGLQTHGFIIRVKDYGCIVKFYNNVQGLVPKHELSTEYIPDPERVFYTGQVVKVVVLNCEPSKERMLLSFKLSSDPEPKKEPAGHSQKKGKAINIGQLVDVKVLEKTKDGLEVAVLPHNIRAFLPTSHLSDHVANGPLLHHWLQAGDILHRVLCLSQSEGRVLLCRKPALVSTVEGGQDPKNFSEIHPGMLLIGFVKSIKDYGVFIQFPSGLSGLAPKAIMSDKFVTSTSDHFVEGQTVAAKVTNVDEEKQRMLLSLRLSDCGLGDLAITSLLLLNQCLEELQGVRSLMSNRDSVLIQTLAEMTPGMFLDLVVQEVLEDGSVVFSGGPVPDLVLKASRYHRAGQEVESGQKKKVVILNVDLLKLEVHVSLHQDLVNRKARKLRKGSEHQAIVQHLEKSFAIASLVETGHLAAFSLTSHLNDTFRFDSEKLQVGQGVSLTLKTTEPGVTGLLLAVEGPAAKRTMRPTQKDSETVDEDEEVDPALTVGTIKKHTLSIGDMVTGTVKSIKPTHVVVTLEDGIIGCIHASHILDDVPEGTSPTTKLKVGKTVTARVIGGRDMKTFKYLPISHPRFVRTIPELSVRPSELEDGHTALNTHSVSPMEKIKQYQAGQTVTCFLKKYNVVKKWLEVEIAPDIRGRIPLLLTSLSFKVLKHPDKKFRVGQALRATVVGPDSSKTFLCLSLTGPHKLEEGEVAMGRVVKVTPNEGLTVSFPFGKIGTVSIFHMSDSYSETPLEDFVPQKVVRCYILSTADNVLTLSLRSSRTNPETKSKVEDPEINSIQDIKEGQLLRGYVGSIQPHGVFFRLGPSVVGLARYSHVSQHSPSKKALYNKHLPEGKLLTARVLRLNHQKNLVELSFLPGDTGKPDVLSASLEGQLTKQEERKTEAEERDQKGEKKNQKRNEKKNQKGQEEVEMPSKEKQQPQKPQAQKRGGRECRESGSEQERVSKKPKKAGLSEEDDSLVDVYYREGKEEAEETNVLPKEKQTKPAEAPRLQLSSGFAWNVGLDSLTPALPPLAESSDSEEDEKPHQATIKKSKKERELEKQKAEKELSRIEEALMDPGRQPESADDFDRLVLSSPNSSILWLQYMAFHLQATEIEKARAVAERALKTISFREEQEKLNVWVALLNLENMYGSQESLTKVFERAVQYNEPLKVFLHLADIYAKSEKFQEAGELYNRMLKRFRQEKAVWIKYGAFLLRRSQAAASHRVLQRALECLPSKEHVDVIAKFAQLEFQLGDAERAKAIFENTLSTYPKRTDVWSVYIDMTIKHGSQKDVRDIFERVIHLSLAPKRMKFFFKRYLDYEKQHGTEKDVQAVKAKALEYVEAKSSVLEA

SEQ ID NO: 908527 - protein, 1865 aa, Homo sapiens
RIALDCGYPGLRVCEYRGARLVVAGCRRRGAGDPNMANLEESFPRGGTRKIHKPEKAFQQSVEQDNLFDISTEEGSTKRKKSQKGPAKTKKLKIEKRESSKSAREKFEILSVESLCEGMRILGCVKEVNELELVISLPNGLQGFVQVTEICDAYTKKLNEQVTQEQPLKDLLHLPELFSPGMLVRCVVSSLGITDRGKKSVKLSLNPKNVNRVLSAEALKPGMLLTGTVSSLEDHGYLVDIGVDGTRAFLPLLKAQEYIRQKNKGAKLKVGQYLNCIVEKVKGNGGVVSLSVGHSEVSTAIATEQQSWNLNNLLPGLVVKAQVQKVTPFGLTLNFLTFFTGVVDFMHLDPKKAGTYFSNQAVRACILCVHPRTRVVHLSLRPIFLQPGRPLTRLSCQNLGAVLDDVPVQGFFKKAGATFRLKDGVLAYARLSHLSDSKNVFNPEAFKPGNTHKCRIIDYSQMDELALLSLRTSIIEAQYLRYHDIEPGAVVKGTVLTIKSYGMLVKVGEQMRGLVPPMHLADILMKNPEKKYHIGDEVKCRVLLCDPEAKKLMMTLKKTLIESKLPVITCYADAKPGLQTHGFIIRVKDYGCIVKFYNNVQGLVPKHELSTEYIPDPERVFYTGQVVKVVVLNCEPSKERMLLSFKLSSDPEPKKEPAGHSQKKGKAINIGQLVDVKVLEKTKDGLEVAVLPHNIRAFLPTSHLSDHVANGPLLHHWLQAGDILHRVLCLSQSEGRVLLCRKPALVSTVEGGQDPKNFSEIHPGMLLIGFVKSIKDYGVFIQFPSGLSGLAPKAIMSDKFVTSTSDHFVEGQTVAAKVTNVDEEKQRMLLSLRLSDCGLGDLAITSLLLLNQCLEELQGVRSLMSNRDSVLIQTLAEMTPGMFLDLVVQEVLEDGSVVFSGGPVPDLVLKASRYHRAGQEVESGQKKKVVILNVDLLKLEVHVSLHQDLVNRKARKLRKGSEHQAIVQHLEKSFAIASLVETGHLAAFSLTSHLNDTFRFDSEKLQVGQGVSLTLKTTEPGVTGLLLAVEGPAAKRTMRPTQKDSETVDEDEEVDPALTVGTIKKHTLSIGDMVTGTVKSIKPTHVVVTLEDGIIGCIHASHILDDVPEGTSPTTKLKVGKTVTARVIGGRDMKTFKYLPISHPRFVRTIPELSVRPSELEDGHTALNTHSVSPMEKIKQYQAGQTVTCFLKKYNVVKKWLEVEIAPDIRGRIPLLLTSLSFKVLKHPDKKFRVGQALRATVVGPDSSKTFLCLSLTGPHKLEEGEVAMGRVVKVTPNEGLTVSFPFGKIGTVSIFHMSDSYSETPLEDFVPQKVVRCYILSTADNVLTLSLRSSRTNPETKSKVEDPEINSIQDIKEGQLLRGYVGSIQPHGVFFRLNHQKNLVELSFLPGDTGKPDVLSASLEGQLTKQEERKTEAEERDQKGEKKNQKRNEKKNQKGQEEVEMPSKEKQQPQKPQAQKRGGRECRESGSEQERVSKKPKKAGLSEEDDSLVDVYYREGKEEAEETNVLPKEKQTKPAEAPRLQLSSGFAWNVGLDSLTPALPPLAESSDSEEDEKPHQATIKKSKKERELEKQKAEKELSRIEEALMDPGRQPESADDFDRLVLSSPNSSILWLQYMAFHLQATEIEKARAVAERALKTISFREEQEKLNVWVALLNLENMYGSQESLTKVFERAVQYNEPLKVFLHLADIYAKSEKFQEAGELYNRMLKRFRQEKAVWIKYGAFLLRRSQAAASHRVLQRALECLPSKEHVDVIAKFAQLEFQLGDAERAKAIFENTLSTYPKRTDVWSVYIDMTIKHGSQKDVRDIFERVIHLSLAPKRMKFFFKRYLDYEKQHGTEKDVQAVKAKALEYVEAKSSVLEA

SEQ ID NO: 908528 - protein, 1846 aa, Homo sapiens
RIALDCGYPGLRVCEYRGARLVVAGCRRRGAGDPNMANLEESFPRGGTRKIHKPEKAFQQSVEQDNLFDISTEEGSTKRKKSQKGPAKTKKLKIEKRESSKSAREKFEILSVESLCEGMRILGCVKEVNELELVISLPNGLQGFVQVTEICDAYTKKLNEQVTQEQPLKDLLHLPELFSPGMLVRCVVSSLGITDRGKKSVKLSLNPKNVNRVLSAEALKPGMLLTGTVSSLEDHGYLVDIGVDGTRAFLPLLKAQEYIRQKNKGAKLKVGQYLNCIVEKVKGNGGVVSLSVGHSEVSTAIATEQQSWNLNNLLPGLVVKAQVQKVTPFGLTLNFLTFFTGVVDFMHLDPKKAGTYFSNQAVRACILCVHPRTRVVHLSLRPIFLQPGRPLTRLSCQNLGAVLDDVPVQGFFKKAGATFRLKDGVLAYARLSHLSDSKNVFNPEAFKPGNTHKCRIIDYSQMDELALLSLRTSIIEAQYLRYHDIEPGAVVKGTVLTIKSYGMLVKVGEQMRGLVPPMHLADILMKNPEKKYHIGDEVKCRVLLCDPEAKKLMMTLKKTLIESKLPVITCYADAKPGLQTHGFIIRVKDYGCIVKFYNNVQGLVPKHELSTEYIPDPERVFYTGQVVKVVVLNCEPSKERMLLSFKLSSDPEPKKEPAGHSQKKGKAINIGQLVDVKVLEKTKDGLEVAVLPHNIRAFLPTSHLSDHVANGPLLHHWLQAGDILHRVLCLSQSEGRVLLCRKPALVSTVEGGQDPKNFSEIHPGMLLIGFVKSIKDYGVFIQFPSGLSGLAPKAIMSDKFVTSTSDHFVEGQTVAAKVTNVDEEKQRMLLSLRLSDCGLGDLAITSLLLLNQCLEELQGVRSLMSNRDSVLIQTLAEMTPGMFLDLVVQEVLEDGSVVFSGGPVPDLVLKASRYHRAGQEVESGQKKKVVILNVDLLKLEVHVSLHQDLVNRKARKLRKGSEHQAIVQHLEKSFAIASLVETGHLAAFSLTSHLNDTFRFDSEKLQVGQGVSLTLKTTEPGVTGLLLAVEGPAAKRTMRPTQKDSETVDEDEEVDPALTVGTIKKHTLSIGDMVTGTVKSIKPTHVVVTLEDGIIGCIHASHILDDVPEGTSPTTKLKVGKTVTARVIGGRDMKTFKYLPISHPRFVRTIPELSVRPSELEDGHTALNTHSVSPMEKIKQYQAGQTVTCFLKKYNVVKKWLEVEIAPDIRGRIPLLLTSLSFKVLKHPDKKFRVGQALRATVVGPDSSKTFLCLSLTGPHKLEEGEVAMGRVVKVTPNEGLTVSFPFGKIGTVSIFHMSDSYSETPLEDFVPQKVVSLGPSVVGLARYSHVSQHSPSKKALYNKHLPEGKLLTARVLRLNHQKNLVELSFLPGDTGKPDVLSASLEGQLTKQEERKTEAEERDQKGEKKNQKRNEKKNQKGQEEVEMPSKEKQQPQKPQAQKRGGRECRESGSEQERVSKKPKKAGLSEEDDSLVDVYYREGKEEAEETNVLPKEKQTKPAEAPRLQLSSGFAWNVGLDSLTPALPPLAESSDSEEDEKPHQATIKKSKKERELEKQKAEKELSRIEEALMDPGRQPESADDFDRLVLSSPNSSILWLQYMAFHLQATEIEKARAVAERALKTISFREEQEKLNVWVALLNLENMYGSQESLTKVFERAVQYNEPLKVFLHLADIYAKSEKFQEAGELYNRMLKRFRQEKAVWIKYGAFLLRRSQAAASHRVLQRALECLPSKEHVDVIAKFAQLEFQLGDAERAKAIFENTLSTYPKRTDVWSVYIDMTIKHGSQKDVRDIFERVIHLSLAPKRMKFFFKRYLDYEKQHGTEKDVQAVKAKALEYVEAKSSVLEA

SEQ ID NO: 908529 - protein, 1443 aa, Homo sapiens
RIALDCGYPGLRVCEYRGARLVVAGCRRRGAGDPNMANLEESFPRGGTRKIHKPEKAFQQSVEQDNLFDISTEEGSTKRKKSQKGPAKTKKLKIEKRESSKSAREKFEILSVESLCEGMRILGCVKEVNELELVISLPNGLQGFVQVTEICDAYTKKLNEQVTQEQPLKDLLHLPELFSPGMLVRCVVSSLGITDRGKKSVKLSLNPKNVNRVLSAEALKPGMLLTGTVSSLEDHGYLVDIGVDGTRAFLPLLKAQEYIRQKNKGAKLKVGQYLNCIVEKVKGNGGVVSLSVGHSEVSTAIATEQQSWNLNNLLPGLVVKAQVQKVTPFGLTLNFLTFFTGVVDFMHLDPKKAGTYFSNQAVRACILCVHPRTRVVHLSLRPIFLQPGRPLTRLSCQNLGAVLDDVPVQGFFKKAGATFRLKDGVLAYARLSHLSDSKNVFNPEAFKPGNTHKCRIIDYSQMDELALLSLRTSIIEAQYLRYHDIEPGAVVKGTVLTIKSYGMLVKVGEQMRGLVPPMHLADILMKNPEKKYHIGDEVKCRVLLCDPEAKKLMMTLKKTLIESKLPVITCYADAKPGLQTHGFIIRVKDYGCIVKFYNNVQGLVPKHELSTEYIPDPERVFYTGQVVKVVVLNCEPSKERMLLSFKLSSDPEPKKEPAGHSQKKGKAINIGQLVDVKVLEKTKDGLEVAVLPHNIRAFLPTSHLSDHVANGPLLHHWLQAGDILHRVLCLSQSEGRVLLCRKPALVSTVEGGQDPKNFSEIHPGMLLIGFVKSIKDYGVFIQFPSGLSGLAPKAIMSDKFVTSTSDHFVEGQTVAAKVTNVDEEKQRMLLSLRLSDCGLGDLAITSLLLLNQCLEELQGVRSLMSNRDSVLIQTLAEMTPGMFLDLVVQEVLEDGSVVFSGGPVPDLVLKASRYHRAGQEVESGQKKKVVILNVDLLKLEVHVSLHQDLVNRKARKLRKGSEHQAIVQHLEKSFAIASLVETGHLAAFSLTSHLNDTFRFDSEKLQVGQGVSLTLKTTEPGVTGLLLAVEGPAAKRTMRPTQKDSETVDEDEEVDPALTVGTIKKHTLSIGDMVTGTVKSIKPTHVVVTLEDGIIGCIHASHILDDVPEGTSPTTKLKVGKTVTARVIGGRDMKTFKYLPISHPRFVRTIPELSVRPSELEDGHTALNTHSVSPMEKIKQYQAGQTVTCFLKKYNVVKKWLEVEIAPDIRGRIPLLLTSLSFKVLKHPDKKFRVGQALRATVVGPDSSKTFLCLSLTGPHKLEEGEVAMGRVVKVTPNEGLTVSFPFGKIGTVSIFHMSDSYSETPLEDFVPQKVVRCYILSTADNVLTLSLRSSRTNPETKSKVEDPEINSIQDIKEGQLLRGYVGSIQPHGVFFRLGPSVVGLARYSHVSQHSPSKKALYNKHLPEGKLLTGTFCPLGEAMSLGQEDKFRAQRGKWRNLGC

SEQ ID NO: 908530 - protein, 1377 aa, Homo sapiens
RIALDCGYPGLRVCEYRGARLVVAGCRRRGAGDPNMANLEESFPRGGTRKIHKPEKAFQQSVEQDNLFDISTEEGSTKRKKSQKGPAKTKKLKIEKRESSKSAREKFEILSVESLCEGMRILGCVKEVNELELVISLPNGLQGFVQVTEICDAYTKKLNEQVTQEQPLKDLLHLPELFSPGMLVRCVVSSLGITDRGKKSVKLSLNPKNVNRVLSAEALKPGMLLTGTVSSLEDHGYLVDIGVDGTRAFLPLLKAQEYIRQKNKGAKLKVGQYLNCIVEKVKGNGGVVSLSVGHSEVSTAIATEQQSWNLNNLLPGLVVKAQVQKVTPFGLTLNFLTFFTGVVDFMHLDPKKAGTYFSNQAVRACILCVHPRTRVVHLSLRPIFLQPGRPLTRLSCQNLGAVLDDVPVQGFFKKAGATFRLKDGVLAYARLSHLSDSKNVFNPEAFKPGNTHKCRIIDYSQMDELALLSLRTSIIEAQYLRYHDIEPGAVVKGTVLTIKSYGMLVKVGEQMRGLVPPMHLADILMKNPEKKYHIGDEVKCRVLLCDPEAKKLMMTLKKTLIESKLPVITCYADAKPGLQTHGFIIRVKDYGCIVKFYNNVQGLVPKHELSTEYIPDPERVFYTGQVVKVVVLNCEPSKERMLLSFKLSSDPEPKKEPAGHSQKKGKAINIGQLVDVKVLEKTKDGLEVAVLPHNIRAFLPTSHLSDHVANGPLLHHWLQAGDILHRVLCLSQSEGRVLLCRKPALVSTVEGGQDPKNFSEIHPGMLLIGFVKSIKDYGVFIQFPSGLSGLAPKAIMSDKFVTSTSDHFVEGQTVAAKVTNVDEEKQRMLLSLRLSDCGLGDLAITSLLLLNQCLEELQGVRSLMSNRDSVLIQTLAEMTPGMFLDLVVQEVLEDGSVVFSGGPVPDLVLKASRYHRAGQEVESGQKKKVVILNVDLLKLEVHVSLHQDLVNRKARKLRKGSEHQAIVQHLEKSFAIASLVETGHLAAFSLTSHLNDTFRFDSEKLQVGQGVSLTLKTTEPGVTGLLLAVEGPAAKRTMRPTQKDSETVDEDEEVDPALTVGTIKKHTLSIGDMVTGTVKSIKPTHVVVTLEDGIIGCIHASHILDDVPEGTSPTTKLKVGKTVTARVIGGRDMKTFKYLPISHPRFVRTIPELSVRPSELEDGHTALNTHSVSPMEKIKQYQAGQTVTCFLKKYNVVKKWLEVEIAPDIRGRIPLLLTSLSFKVLKHPDKKFRVGQALRATVVGPDSSKTFLCLSLTGVGMKQCLVGEGERQEGVGWVFSYCLSWRTPSVLESSESLVWDLLGTVFLLGFALAQLLHCSLSYLYLYRLPLPTQVFFSSPWERVVHHLALRSLATWQGDLSLDGSGSLSPDTPSLGSL

SEQ ID NO: 908531 - protein, 1023 aa, Homo sapiens
RIALDCGYPGLRVCEYRGARLVVAGCRRRGAGDPNMANLEESFPRGGTRKIHKPEKAFQQSVEQDNLFDISTEEGSTKRKKSQKGPAKTKKLKIEKRESSKSAREKFEILSVESLCEGMRILGCVKEVNELELVISLPNGLQGFVQVTEICDAYTKKLNEQVTQEQPLKDLLHLPELFSPGMLVRCVVSSLGITDRGKKSVKLSLNPKNVNRVLSAEALKPGMLLTGTVSSLEDHGYLVDIGVDGTRAFLPLLKAQEYIRQKNKGAKLKVGQYLNCIVEKVKGNGGVVSLSVGHSEVSTAIATEQQSWNLNNLLPGLVVKAQVQKVTPFGLTLNFLTFFTGVVDFMHLDPKKAGTYFSNQAVRACILCVHPRTRVVHLSLRPIFLQPGRPLTRLSCQNLGAVLDDVPVQGFFKKAGATFRLKDGVLAYARLSHLSDSKNVFNPEAFKPGNTHKCRIIDYSQMDELALLSLRTSIIEAQYLRYHDIEPGAVVKGTVLTIKSYGMLVKVGEQMRGLVPPMHLADILMKNPEKKYHIGDEVKCRVLLCDPEAKKLMMTLKKTLIESKLPVITCYADAKPGLQTHGFIIRVKDYGCIVKFYNNVQGLVPKHELSTEYIPDPERVFYTGQVVKVVVLNCEPSKERMLLSFKLSSDPEPKKEPAGHSQKKGKAINIGQLVDVKVLEKTKDGLEVAVLPHNIRAFLPTSHLSDHVANGPLLHHWLQAGDILHRVLCLSQSEGRVLLCRKPALVSTVEGGQDPKNFSEIHPGMLLIGFVKSIKDYGVFIQFPSGLSGLAPKAIMSDKFVTSTSDHFVEGQTVAAKVTNVDEEKQRMLLSLRLSDCGLGDLAITSLLLLNQCLEELQGVRSLMSNRDSVLIQTLAEMTPGMFLDLVVQEVLEDGSVVFSGGPVPDLVLKASRYHRAGQEVESGQKKKVVILNVDLLKLEVHVSLHQDLVNRKARKLRKGSEHQAIVQHLEKSFAIASLVETGHLAAFSLTSHLNDTFRFDSEKLQVGQGVSLTLKTTDPASC

SEQ ID NO: 908532 - protein, 715 aa, Homo sapiens
PTHPTPAPEHPCWAAWGLAGGAGPGERVGRASGGDEVKVIDAAQPGSGRGRGCVSVALELAEVMSGGDTRAAIARPRMAAAHGPVAPSSPEQNGAVPSEATKRDQNLKRGNWGNQIEFVLTSVGYAVGLGNVWRFPYLCYRNGGGAFMFPYFIMLIFCGIPLFFMELSFGQFASQGCLGVWRISPMFKGVGYGMMVVSTYIGIYYNVVICIAFYYFFSSMTHVLPWAYCNNPWNTHDCAGVLDASNLTNGSRPAALPSNLSHLLNHSLQRTSPSEEYWRLYVLKLSDDIGNFGEVRLPLLGCLGVSWLVVFLCLIRGVKSSGKVVYFTATFPYVVLTILFVRGVTLEGAFDGIMYYLTPQWDKILEAKVWGDAASQIFYSLACAWGGLITMASYNKFHNNCYRDSVIISITNCATSVYAGFVIFSILGFMANHLGVDVSRVADHGPGLAFVAYPEALTLLPISPLWSLLFFFMLILLGLGTQFCLLETLVTAIVDEVGNEWILQKKTYVTLGVAVAGFLLGIPLTSQAGIYWLLLMDNYAASFSLVVISCIMCVAIMYIYGHRNYFQDIQMMLGFPPPLFFQICWRFVSPAIIFFILVFTVIQYQPITYNHYQYPGWAVAIGFLMALSSVLCIPLYAMFRLCRTDGDTLLQRLKNATKPSRDWGPALLEHRTGRYAPTIAPSPEDGFEVQSLHPDKAQIPIVGSNGSSRLQDSRI

SEQ ID NO: 908533 - protein, 252 aa, Homo sapiens
EALVTDALLTEALVTVRNERPSGEGCLGVWRISPMFKGVGYGMMVVSTYIGIYYNVVICIAFYYFFSSMTHVLPWAYCNNPWNTHDCAGVLDASNLTNGSRPAALPSNLSHLLNHSLQRTSPSEEYWRLYVLKLSDDIGNFGEVRLPLLGCLGVSWLVVFLCLIRGVKSSGKVVYFTATFPYVVLTILFVRGVTLEGAFDGIMYYLTPQWDKILEAKVWGDAASQIFYSLACAWGGLITMASYNKFHNNCYR

SEQ ID NO: 908534 - protein, 769 aa, Homo sapiens
PTHPTPAPEHPCWAAWGLAGGAGPGERVGRASGGDEVKVIDAAQPGSGRGRGCVSVALELAEVMSGGDTRAAIARPRMAAAHGPVAPSSPEQVTLLPVQRSFFLPPFSGATPSTSLAESVLKVWHGAYNSGLLPQLMAQHSLAMAQNGAVPSEATKRDQNLKRGNWGNQIEFVLTSVGYAVGLGNVWRFPYLCYRNGGGAFMFPYFIMLIFCGIPLFFMELSFGQFASQGCLGVWRISPMFKGVGYGMMVVSTYIGIYYNVVICIAFYYFFSSMTHVLPWAYCNNPWNTHDCAGVLDASNLTNGSRPAALPSNLSHLLNHSLQRTSPSEEYWRLYVLKLSDDIGNFGEVRLPLLGCLGVSWLVVFLCLIRGVKSSGKVVYFTATFPYVVLTILFVRGVTLEGAFDGIMYYLTPQWDKILEAKVWGDAASQIFYSLACAWGGLITMASYNKFHNNCYRDSVIISITNCATSVYAGFVIFSILGFMANHLGVDVSRVADHGPGLAFVAYPEALTLLPISPLWSLLFFFMLILLGLGTQFCLLETLVTAIVDEVGNEWILQKKTYVTLGVAVAGFLLGIPLTSQAGIYWLLLMDNYAASFSLVVISCIMCVAIMYIYGHRNYFQDIQMMLGFPPPLFFQICWRFVSPAIIFFILVFTVIQYQPITYNHYQYPGWAVAIGFLMALSSVLCIPLYAMFRLCRTDGDTLLQRLKNATKPSRDWGPALLEHRTGRYAPTIAPSPEDGFEVQSLHPDKAQIPIVGSNGSSRLQDSRI

SEQ ID NO: 908535 - protein, 233 aa, Homo sapiens
EALVTDALLTEALVTVRNERPSGEGCLGVWRISPMFKGVGYGMMVVSTYIGIYYNVVICIAFYYFFSSMTHVLPWAYCNNPWNTHDCAGVLDASNLTNGSRPAALPSNLSHLLNHSLQRTSPSEEYWRLYVLKLSDDIGNFGEVRLPLLGCLGVSWLVVFLCLIRGVKSSGKVVYFTATFPYVVLTILFVRGVTLEGAFDGIMYYLTPQWDKILEAKVWGDAASQIFYSLACA

SEQ ID NO: 908536 - protein, 173 aa, Homo sapiens
MARMNRPAPVEVTYKNMRFLITHNPTNATLNKFIEELKKYGVTTIVRVCEATYDTTLVEKEGIHVLDWPFDDGAPPSNQIVDDWLSLVKIKFREEPGCCIAVHCVAGLGRAPVLVALALIEGGMKYEDAVQFIRQKRRGAFNSKQLLYLEKYRPKMRLRFKDSNGHRNNCCIQ

SEQ ID NO: 908537 - protein, 173 aa, Homo sapiens; identical to SEQ ID NO: 908536

SEQ ID NO: 908538 - protein, 173 aa, Homo sapiens; identical to SEQ ID NO: 908536

SEQ ID NO: 908539 - protein, 173 aa, Homo sapiens; identical to SEQ ID NO: 908536

SEQ ID NO: 908540 - protein, 173 aa, Homo sapiens; identical to SEQ ID NO: 908536

SEQ ID NO: 908541 - protein, 173 aa, Homo sapiens; identical to SEQ ID NO: 908536

SEQ ID NO: 908542 - protein, 173 aa, Homo sapiens; identical to SEQ ID NO: 908536

SEQ ID NO: 908543 - protein, 170 aa, Homo sapiens
MNRPAPVEVTYKNMRFLITHNPTNATLNKFIEELKKYGVTTIVRVCEATYDTTLVEKEGIHVLDWPFDDGAPPSNQIVDDWLSLVKIKFREEPGCCIAVHCVAGLGRAPVLVALALIEGGMKYEDAVQFIRQKRRGAFNSKQLLYLEKYRPKMRLRFKDSNGHRNNCCIQ

SEQ ID NO: 908544 - protein, 173 aa, Homo sapiens; identical to SEQ ID NO: 908536

SEQ ID NO: 908545 - protein, 173 aa, Homo sapiens; identical to SEQ ID NO: 908536

SEQ ID NO: 908546 - protein, 187 aa, Homo sapiens
MCALLDRFNYEKRGLQHDSFQSINRNLSRSHPFLTSGFLHPGALPAAPSLPRPGDAPTRRLAIHQPVHTGGGRRGVTSGGGGPPPPPVGSWPAVPGRDWWLEGCTSRRLERGGLVTQGRLGACIGSFGCGPARLRALLRAAHCMVESGAPAAACIAATAAPPRPPPPPALQPPPPPVSPPPRDRLYD

SEQ ID NO: 908547 - protein, 173 aa, Homo sapiens; identical to SEQ ID NO: 908536

SEQ ID NO: 908548 - protein, 173 aa, Homo sapiens; identical to SEQ ID NO: 908536

SEQ ID NO: 908549 - protein, 173 aa, Homo sapiens; identical to SEQ ID NO: 908536

SEQ ID NO: 908550 - protein, 173 aa, Homo sapiens; identical to SEQ ID NO: 908536

SEQ ID NO: 908551 - protein, 173 aa, Homo sapiens; identical to SEQ ID NO: 908536

SEQ ID NO: 908552 - protein, 173 aa, Homo sapiens; identical to SEQ ID NO: 908536

SEQ ID NO: 908553 - protein, 173 aa, Homo sapiens; identical to SEQ ID NO: 908536

SEQ ID NO: 908554 - protein, 173 aa, Homo sapiens; identical to SEQ ID NO: 908536

SEQ ID NO: 908555 - protein, 173 aa, Homo sapiens; identical to SEQ ID NO: 908536

SEQ ID NO: 908556 - protein, 343 aa, Homo sapiens
RAVSCLFRRHASSSSLYSSPLLAPSRALLRRCPAPSRRRACCCPAVSPSPPPPLCRASCACLPCRPPLRLLFLASLASSPSDRSPLSRLRAPRRPGRRPLVALVVSCFVLLFLPVFRSLVSCSLRIFGPPLSALFRVFALCRVVLCRALFPCSVLRLLSSFPVLPLAVVFPSPLLAPRSSPSPSLSLSRVLWCPSSRSRSSSFCAAARPLSLRRVAVVLCSFSLLFCVAAPPQSLLLSSPVRPPPWSLRLSASPALLAVLWLVLSLYPPCVLFCASAPPAGGLRAAPPLPLFFFLLVSFFLSSLSLSLLFFFFFFFFFFFFSLFFFFFFFFFFFFFLFLFLFW

SEQ ID NO: 908557 - protein, 366 aa, Homo sapiens
MAAARHSTLDFMLGAKADGETILKGLQSIFQEQGMAESVHTWQDHGYLATYTNKNGSFANLRIYPHGLVLLDLQSYDGDAQGKEEIDSILNKVEERMKELSQDSTGRVKRLPPIVRGGAIDRYWPTADGRLVEYDIDEVVYDEDSPYQNIKILHSKQFGNILILSGDVNLAESDLAYTRAIMGSGKEDYTGKDVLILGGGDGGILCEIVKLKPKMVTMVEIDQMVIDGCKKYMRKTCGDVLDNLKGDCYQVLIEDCIPVLKRYAKEGREFDYVINDLTAVPISTSPEEDSTWEFLRLILDLSMKVLKQDGKYFTQGNCVNLTEALSLYEEQLGRLYCPVEFSKEIVCVPSYLELWVFYTVWKKAKP

SEQ ID NO: 908558 - protein, 366 aa, Homo sapiens; identical to SEQ ID NO: 908557

SEQ ID NO: 908559 - protein, 332 aa, Homo sapiens
MAESVHTWQDHGYLATYTNKNGSFANLRIYPHGLVLLDLQSYDGDAQGKEEIDSILNKVEERMKELSQDSTGRVKRLPPIVRGGAIDRYWPTADGRLVEYDIDEVVYDEDSPYQNIKILHSKQFGNILILSGDVNLAESDLAYTRAIMGSGKEDYTGKDVLILGGGDGGILCEIVKLKPKMVTMVEIDQMVIDGCKKYMRKTCGDVLDNLKGDCYQVLIEDCIPVLKRYAKEGREFDYVINDLTAVPISTSPEEDSTWEFLRLILDLSMKVLKQDGKYFTQGNCVNLTEALSLYEEQLGRLYCPVEFSKEIVCVPSYLELWVFYTVWKKAKP

SEQ ID NO: 908560 - protein, 270 aa, Homo sapiens
MKELSQDSTGRVKRLPPIVRGGAIDRYWPTADGRLVEYDIDEVVYDEDSPYQNIKILHSKQFGNILILSGDVNLAESDLAYTRAIMGSGKEDYTGKDVLILGGGDGGILCEIVKLKPKMVTMVEIDQMVIDGCKKYMRKTCGDVLDNLKGDCYQVLIEDCIPVLKRYAKEGREFDYVINDLTAVPISTSPEEDSTWEFLRLILDLSMKVLKQDGKYFTQGNCVNLTEALSLYEEQLGRLYCPVEFSKEIVCVPSYLELWVFYTVWKKAKP

SEQ ID NO: 908561 - protein, 366 aa, Homo sapiens; identical to SEQ ID NO: 908557

SEQ ID NO: 908562 - protein, 190 aa, Homo sapiens
MAAARHSTLDFMLGAKADGETILKGLQSIFQEQGMAESVHTWQDHGYLATYTNKNGSFANLRIYPHGLVLLDLQSYDGDAQGKEEIDSILNKVEERMKELSQDSTGRVKRLPPIVRGGAIDRYWPTADGRLVEYDIDEVVYDEDSPYQNIKIWQRVIWHIPGPSWAVAKKITLAKMYSFWEVETEAYCVK

SEQ ID NO: 908563 - protein, 360 aa, Homo sapiens
MAAARHSTLDFMLGAKADGETILKGLQSIFQEQGMAESVHTWQDHGYLATYTNKNGSFANLRIYPHGLVLLDLQSYDGDAQGKEEIDSILNKVEERMKELSQDSTGRVKRLPPIVRGGAIDRYWPTADGRLVEYDIDEVVYDEDSPYQNIKILHSKQFGNILILSGDVNLAESDLAYTRAIMGSGKEDYTGKDVLILGGGDGGILCEIVKLKPKMVTMVEIDQMVIDGCKKYMRKTCGDVLDNLKGDCYQVLIEDCIPVLKRYAKEGREFDYVINDLTAVPISTSPEEDSTWEFLRLILDLSMKVLKQDGKYFTQGNCVNLTEALSLYEEQLGRLYCPVEFRPVPRLCHACQARLVEDRL

SEQ ID NO: 908564 - protein, 177 aa, Homo sapiens
MAAARHSTLDFMLGAKADGETILKGLQSIFQEQGMAESVHTWQDHGYLATYTNKNGRLPPIVRGGAIDRYWPTADGRLVEYDIDEVVYDEDSPYQNIKILHSKQFGNILILSGDVNLAESDLAYTRAIMGSGKEDYTGKDVLILGGGDGGILCEIVKLKPKMVTMVEVGILHCLEES

SEQ ID NO: 908565 - protein, 235 aa, Homo sapiens
MAAARHSTLDFMLGAKADGETILKGLQSIFQEQGMAESVHTWQDHGYLATYTNKNGSFANLRIYPHGLVLLDLQSYDGDAQGKEEIDSILNKVEERMKELSQDSTGRVKRLPPIVRGGAIDRYWPTADGRLVEYDIDEVVYDEDSPYQNIKILHSKQFGNILILSGDVNLAESDLAYTRAIMGSGKEDYTGKDVLILGGGDGGILCEIELYGSVKKISITVPKLSFDNVSSVSLR

SEQ ID NO: 908566 - protein, 286 aa, Homo sapiens
MAAARHSTLDFMLGAKADGETILKGLQSIFQEQGMAESVHTWQDHGYLATYTNKNGSFANLRIYPHGLVLLDLQSYDGDAQGKEEIDSILNKVEERMKELSQDSTGRVKRLPPIVRGGAIDRYWPTADGRLVEYDIDEVVYDEDSPYQNIKILHSKQFGNILILSGDVNLGRRVILALYPGPIIGQGQEDPLGKMSHLAVHGALVNVNYPDALVIARCWVTICNRGFTLDVASPTAPGIVTGPAGSPEDGSSESFSDPTHSHKPPPPHHPPTTPPSTSPQPAKLTD

SEQ ID NO: 908567 - protein, 366 aa, Homo sapiens; identical to SEQ ID NO: 908557

SEQ ID NO: 908568 - protein, 366 aa, Homo sapiens; identical to SEQ ID NO: 908557

SEQ ID NO: 908569 - protein, 454 aa, Homo sapiens
AEAALLLAPRSVPAAARGLQGQSRVPAGRAALPGPGRPPALPRGLAAFALPLGESPGCRARADPPWDEGCRDCGGARRDPRGEPGLGACAERGCPRDLFLFLQAADGETILKGLQSIFQEQGMAESVHTWQDHGYLATYTNKNGSFANLRIYPHGLVLLDLQSYDGDAQGKEEIDSILNKVEERMKELSQDSTGRVKRLPPIVRGGAIDRYWPTADGRLVEYDIDEVVYDEDSPYQNIKILHSKQFGNILILSGDVNLAESDLAYTRAIMGSGKEDYTGKDVLILGGGDGGILCEIVKLKPKMVTMVEIDQMVIDGCKKYMRKTCGDVLDNLKGDCYQVLIEDCIPVLKRYAKEGREFDYVINDLTAVPISTSPEEDSTWEFLRLILDLSMKVLKQDGKYFTQGNCVNLTEALSLYEEQLGRLYCPVEFSKEIVCVPSYLELWVFYTVWKKAKP

SEQ ID NO: 908570 - protein, 366 aa, Homo sapiens; identical to SEQ ID NO: 908557

SEQ ID NO: 908571 - protein, 372 aa, Homo sapiens
MAAARHSTLDFMLGAKADGETILKGLQSIFQEQGMAESVHTWQDHGYLATYTNKNGSFANLRIYPHGLVLLDLQSYDGDAQGKEEIDSILNKVEERMKELSQDSTGRVKRLPPIVRGGAIDRYWPTADGRLVEYDIDEVVYDEDSPYQNIKILHSKQFGNILILSGDVNLAESDLAYTRAIMGSGKEDYTGKDVLILGGGDGGILCEIVKLKPKMVTMVEIDQMVIDGCKKYMRKTCGDVLDNLKGDCYQVLIEDCIPVLKRYAKEGREFDYVINDLTAVPISTSPEEDSTWEFLRLILDLSMKVLKQDGKYFTQGNCVNLTEALSLYEEQLGRLYCPVEFSKEIVCVPSYLEFSLTFWRVSSSNAPVVANK

SEQ ID NO: 908572 - protein, 280 aa, Homo sapiens
MAAARHSTLDFMLGAKADGETILKGLQSIFQEQGMAESVHTWQDHGYLATYTNKNGSFANLRIYPHGLVLLDLQSYDGDAQGKEEIDSILNKVEERMKELSQDSTGRVKRLPPIVRGGAIDRYWPTADGRLVEYDIDEVVYDEDSPYQNIKILHSKQFGNILILSGDVNLAESDLAYTRAIMGSGKEDYTGKDVLILGGGDGGILCEIVKLKPKMVTMVEIDQMVIDGCKKYMRKTCGDVLDNLKGDCYQVLIEDCIPVLKRYAKEGREFDYVINDLTAV

SEQ ID NO: 908573 - protein, 224 aa, Homo sapiens
MAAARHSTLDFMLGAKADGETILKGLQSIFQEQGMAESVHTWQDHGYLATYTNKNGSFANLRIYPHGLVLLDLQSYDGDAQGKEEIDSILNKVEERMKELSQDSTGRVKRLPPIVRGGAIDRYWPTADGRLVEYDIDEVVYDEDSPYQNIKILHSKQFGNILILSGDVNLAESDLAYTRAIMGSGKEDYTGKDVLILGGGDGGILCEIELQFLHKESKRTISFT

SEQ ID NO: 908574 - protein, 196 aa, Homo sapiens
MADGQMPFSCHYPSRLRRDPFRDSPLSSRLLDDGFGMDPFPDDLTASWPDWALPRLSSAWPGTLRSGMVPRGPTATARFGVPAEGRTPPPFPGEPWKVCVNVHSFKPEELMVKTKDGYVEVSGKHEEKQQEGGIVSKNFTKKIQLPAEVDPVTVFASLSPEGLLIIEAPQVPPYSTFGESSFNNELPQDSQEVTCT

SEQ ID NO: 908575 - protein, 180 aa, Homo sapiens
  misc_feature (78)..(78): Xaa can be any naturally occurring amino acid
  misc_feature (81)..(81): Xaa can be any naturally occurring amino acid
  misc_feature (84)..(84): Xaa can be any naturally occurring amino acid
  misc_feature (86)..(86): Xaa can be any naturally occurring amino acid
  misc_feature (90)..(92): Xaa can be any naturally occurring amino acid
  misc_feature (99)..(100): Xaa can be any naturally occurring amino acid
  misc_feature (102)..(102): Xaa can be any naturally occurring amino acid
  misc_feature (107)..(107): Xaa can be any naturally occurring amino acid
  misc_feature (125)..(126): Xaa can be any naturally occurring amino acid
  misc_feature (129)..(130): Xaa can be any naturally occurring amino acid
  misc_feature (132)..(132): Xaa can be any naturally occurring amino acid
  misc_feature (135)..(136): Xaa can be any naturally occurring amino acid
  misc_feature (138)..(138): Xaa can be any naturally occurring amino acid
  misc_feature (144)..(144): Xaa can be any naturally occurring amino acid
  misc_feature (146)..(146): Xaa can be any naturally occurring amino acid
  misc_feature (149)..(150): Xaa can be any naturally occurring amino acid
  misc_feature (152)..(153): Xaa can be any naturally occurring amino acid
  misc_feature (155)..(156): Xaa can be any naturally occurring amino acid
  misc_feature (158)..(158): Xaa can be any naturally occurring amino acid
  misc_feature (160)..(161): Xaa can be any naturally occurring amino acid
  misc_feature (179)..(179): Xaa can be any naturally occurring amino acid
MADGQMPFSCHYPSRLRRDPFRDSPLSSRLLDDGFGMDPFPDDLTASWPDWALPRLSSAWPGTLRSGMVPPGGPPHCXPAXVFXGXLCLXXXGTPPPPXXLXGEPLXKSCGVEMVPQLSKPSREXXWVXXPXDGXXWXGGLAQXMXEEXXQXXWXXVXLXXSQKKKPNIPCRKVGSLCXV

SEQ ID NO: 908576 - protein, 214 aa, Homo sapiens
MADGQMPFSCHYPSRLRRDPFRDSPLSSRLLDDGFGMDPFPDDLTASWPDWALPRLSSAWPGTLRSGMVPRGPTATARFGVPAEGRTPPPFPGEPWKVCVNVHSFKPEELMVKTKDGYVEVSGKHEEKQQEGGIVSKNFTKKIQLPAEVDPVTVFASLSPEGLLIIEAPQVPPCFVPNPRASLIPGYITLAELRFSASKMLEGAGVRTDHRFPG

SEQ ID NO: 908577 - protein, 137 aa, Homo sapiens [sequence omitted]

SEQ ID NO: 908578 - protein, 116 aa, Homo sapiens
KGYFSLGTSPITQVPWKVCVNVHSFKPEELMVKTKDGYVEVSGKHEEKQQEGGIVSKNFTKKIQLPAEVDPVTVFASLSPEGLLIIEAPQVPPYSTFGESSFNNELPQDSQEVTCT

SEQ ID NO: 908579 - protein, 105 aa, Homo sapiens
IDLEDSPLEDVHSFKPEELMVKTKDGYVEVSGKHEEKQQEGGIVSKNFTKKIQLPAEVDPVTVFASLSPEGLLIIEAPQVPPYSTFGESSFNNELPQDSQEVTCT

SEQ ID NO: 908580 - protein, 196 aa, Homo sapiens; identical to SEQ ID NO: 908574

SEQ ID NO: 908581 - protein, 102 aa, Homo sapiens
MADGQMPFSCHYPSRLRRDPFRDSPLSSRLLDDGFGMDPFPDDLTASWPDWALPRLSSACRGQDPPTLPWGALESVCECAQLQARGVDGEDQRWIRGGVWQT

SEQ ID NO: 908582 - protein, 86 aa, Homo sapiens
  misc_feature (8)..(8): Xaa can be any naturally occurring amino acid
LAALTLLXTTANRKHEEKQQEGGIVSKNFTKKIQLPAEVDPVTVFASLSPEGLLIIEAPQVPPYSTFGESSFNNELPQDSQEVTCT

SEQ ID NO: 908583 - protein, 84 aa, Homo sapiens
CRYYYLAGVSGKHEEKQQEGGIVSKNFTKKIQLPAEVDPVTVFASLSPEGLLIIEAPQVPPYSTFGESSFNNELPQDSQEVTCT

SEQ ID NO: 908584 - protein, 243 aa, Homo sapiens
RGRGGAWSAAAAGPGAGAAAAATGGGGGALEAAMAKQYDSVECPFCDEVSKYEKLAKIGQGTFGEVFKARHRKTGQKVALKKVLMENEKEGFPITALREIKILQLLKHENVVNLIEICRTKASPYNRCKGSIYLVFDFCEHDLAGLLSNVLVKFTLSEIKRVMQMLLNGLYYIHRNKILHRDMKAANVLITRDGVLKLADFGLARAFSLAKNSQPNRYTNRVVTLWYRPPELLLGEDSRAGQG

SEQ ID NO: 908585 - protein, 372 aa, Homo sapiens
MAKQYDSVECPFCDEVSKYEKLAKIGQGTFGEVFKARHRKTGQKVALKKVLMENEKEGFPITALREIKILQLLKHENVVNLIEICRTKASPYNRCKGSIYLVFDFCEHDLAGLLSNVLVKFTLSEIKRVMQMLLNGLYYIHRNKILHRDMKAANVLITRDGVLKLADFGLARAFSLAKNSQPNRYTNRVVTLWYRPPELLLGERDYGPPIDLWGAGCIMAEMWTRSPIMQGNTEQHQLALISQLCGSITPEVWPNVDNYELYEKLELVKGQKRKVKDRLKAYVRDPYALDLIDKLLVLDPAQRIDSDDALNHDFFWSDPMPSDLKGMLSTHLTSMFEYLAPPRRKGSQITQQSTNQSRNPATTNQTEFERVF

SEQ ID NO: 908586 - protein, 367 aa, Homo sapiens
MAKQYDSVECPFCDEVSKYEKLAKIGQGTFGEVFKARHRKTGQKVALKKVLMENEKEGFPITALREIKILQLLKHENVVNLIEICRTKASPYNRCKGSIYLVFDFCEHDLAGLLSNVLVKFTLSEIKRVMQMLLNGLYYIHRNKILHRDMKAANVLITRDGVLKLADFGLARAFSLAKNSQPNRYTNRVVTLWYRPPELLLGERDYGPPIDLWGAGCIMAEMWTRSPIMQGNTEQHQLALISQLCGSITPEVWPNVDNYELYEKLELVKGQKRKVKDRLKAYVRDPYALDLIDKLLVLDPAQRIDSDDALNHDFFWSDLKGMLSTHLTSMFEYLAPPRRKGSQITQQSTNQSRNPATTNQTEFERVF

SEQ ID NO: 908587 - protein, 372 aa, Homo sapiens; identical to SEQ ID NO: 908585

SEQ ID NO: 908588 - protein, 347 aa, Homo sapiens
MLALSPNLAVSTDPRAGLCTALTLDHFPLFLTQFPITALREIKILQLLKHENVVNLIEICRTKASPYNRCKGSIYLVFDFCEHDLAGLLSNVLVKFTLSEIKRVMQMLLNGLYYIHRNKILHRDMKAANVLITRDGVLKLADFGLARAFSLAKNSQPNRYTNRVVTLWYRPPELLLGERDYGPPIDLWGAGCIMAEMWTRSPIMQGNTEQHQLALISQLCGSITPEVWPNVDNYELYEKLELVKGQKRKVKDRLKAYVRDPYALDLIDKLLVLDPAQRIDSDDALNHDFFWSDPMPSDLKGMLSTHLTSMFEYLAPPRRKGSQITQQSTNQSRNPATTNQTEFERVF

SEQ ID NO: 908589 - protein, 437 aa, Homo sapiens
RGRGGAWSAAAAGPGAGAAAAATGGGGGALEAAMAKQYDSVECPFCDEVSKYEKLAKIGQGTFGEVFKARHRKTGQKVALKKVLMENEKEGFPITALREIKILQLLKHENVVNLIEICRTKDGDCFFWSSFIVAGASSGPALAQKRHSENILTASPYNRCKGSIYLVFDFCEHDLAGLLSNVLVKFTLSEIKRVMQMLLNGLYYIHRNKILHRDMKAANVLITRDGVLKLADFGLARAFSLAKNSQPNRYTNRVVTLWYRPPELLLGERDYGPPIDLWGAGCIMAEMWTRSPIMQGNTEQHQLALISQLCGSITPEVWPNVDNYELYEKLELVKGQKRKVKDRLKAYVRDPYALDLIDKLLVLDPAQRIDSDDALNHDFFWSDPMPSDLKGMLSTHLTSMFEYLAPPRRKGSQITQQSTNQSRNPATTNQTEFERVF

SEQ ID NO: 908590 - protein, 195 aa, Homo sapiens
RGRGGAWSAAAAGPGAGAAAAATGGGGGALEAAMAKQYDSVECPFCDEVSKYEKLAKIGQGTFGEVFKARHRKTGQKVALKKVLMENEKEGFPITALREIKILQLLKHENVVNLIEICRTKASPYNRCKGSIYLVFDFCEHDLAGLLSNVLVKFTLSEIKRVMQMLLNGLYYIHRNKILHRDMKAANVLITRDGV

SEQ ID NO: 908591 - protein, 238 aa, Homo sapiens
RGRGGAWSAAAAGPGAGAAAAATGGGGGALEAAMAKQYDSVECPFCDEVSKYEKLAKIGQGTFGEVFKARHRKTGQKVALKKVLMENEKEGFPITALREIKILQLLKHENVVNLIEICRTKASPYNRCKGSIYLVFDFCEHDLAGLLSNVLVKFTLSEIKRVMQMLLNGLYYIHRNKHDFFWSDPMPSDLKGMLSTHLTSMFEYLAPPRRKGSQITQQSTNQSRNPATTNQTEFERVF

SEQ ID NO: 908592 - protein, 322 aa, Homo sapiens
MAKQYDSVECPFCDEVSKYEKLAKIGQGTFGEVFKARHRKTGQKVALKKVLMENEKEGFPITALREIKILQLLKHENVVNLIEICRTKASPYNRCKGSIYLVFDFCEHDLAGLLSNVLVKFTLSEIKRVMQMLLNGLYYIHRNKILHRDMKAANVLITRDGVLKLADFGLARAFSLAKNSQPNRYTNRVVTLWYRPPELLLGERDYGPPIDLWGAGCIMAEMWTRSPIMQGNTEQHQLALISQLCGSITPEVWPNVDNYELYEKLELVKGQKRKVKDRLKAYVRDPYALDLIDKLLVLDPAQRIDSDDALNHDFFWSDPMPL

SEQ ID NO: 908593 - protein, 129 aa, Homo sapiens
LSTPPPSQVWPNVDNYELYEKLELVKGQKRKVKDRLKAYVRDPYALDLIDKLLVLDPAQRIDSDDALNHDFFWSDPMPSDLKGMLSTHLTSMFEYLAPPRRKGSQITQQSTNQSRNPATTNQTEFERVF

SEQ ID NO: 908594 - protein, 372 aa, Homo sapiens; identical to SEQ ID NO: 908585

SEQ ID NO: 908595 - protein, 372 aa, Homo sapiens; identical to SEQ ID NO: 908585

SEQ ID NO: 908596 - protein, 372 aa, Homo sapiens; identical to SEQ ID NO: 908585

SEQ ID NO: 908597 - protein, 372 aa, Homo sapiens; identical to SEQ ID NO: 908585

SEQ ID NO: 908598 - protein, 374 aa, Homo sapiens
PIWTSRHRITLGTRCSNFTFRAGNTFVYSSDPSEVFKARHRKTGQKVALKKVLMENEKEGFPITALREIKILQLLKHENVVNLIEICRTKASPYNRCKGSIYLVFDFCEHDLAGLLSNVLVKFTLSEIKRVMQMLLNGLYYIHRNKILHRDMKAANVLITRDGVLKLADFGLARAFSLAKNSQPNRYTNRVVTLWYRPPELLLGERDYGPPIDLWGAGCIMAEMWTRSPIMQGNTEQHQLALISQLCGSITPEVWPNVDNYELYEKLELVKGQKRKVKDRLKAYVRDPYALDLIDKLLVLDPAQRIDSDDALNHDFFWSDPMPSDLKGMLSTHLTSMFEYLAPPRRKGSQITQQSTNQSRNPATTNQTEFERVF

SEQ ID NO: 908599 - protein, 212 aa, Homo sapiens
GQASTWPLPPNCQGFLSCRPWGIEPQEALGLKGPSWCALLPRERDYGPPIDLWGAGCIMAEMWTRSPIMQGNTEQHQLALISQLCGSITPEVWPNVDNYELYEKLELVKGQKRKVKDRLKAYVRDPYALDLIDKLLVLDPAQRIDSDDALNHDFFWSDPMPSDLKGMLSTHLTSMFEYLAPPRRKGSQITQQSTNQSRNPATTNQTEFERVF

SEQ ID NO: 908600 - protein, 372 aa, Homo sapiens; identical to SEQ ID NO: 908585

SEQ ID NO: 908601 - protein, 675 aa, Homo sapiens
MPRAQPSSASYQPVPADPFAIVSRAQQMVEILSDENRNLRQELEGCYEKVARLQKVETEIQRVSEAYENLVKSSSKREALEKAMRNKLEGEIRRMHDFNRDLRERLETANKQLAEKEYEGSEDTRKTISQLFAKNKESQREKEKLEAELATARSTNEDQRRHIEIRDQALSNAQAKVVKLEEELKKKQVYVDKVEKMQQALVQLQAACEKREQLEHRLRTRLERELESLRIQQRQGNCQPTNVSEYNAAALMELLREKEERILALEADMTKWEQKYLEENVMRHFALDAAATVAAQRDTTVISHSPNTSYDTALEARIQKEEEEILMANKRCLDMEGRIKTLHAQIIEKDAMIKVLQQRSRKEPSKTEQLSCMRPAKSLMSISNAGSGLLSHSSTLTGSPIMEEKRDDKSWKGSLGILLGGDYRAEYVPSTPSPVPPSTPLLSAHSKTGSRDCSTQTERGTESNKTAAVAPISVPAPVAAAATAAAITATAATITTTMVAAAPVAVAAAAAPAAAAAPSPATAAATAAAVSPAAAGQIPAAASVASAAAVAPSAAAAAAVQVAPAAPAPVPAPALVPVPAPAAAQASAPAQTQAPTSAPAVAPTPAPTPTPAVAQAEVPASPATGPGPHRLSIPSLTCNPDKTDGPVFHSNTLERKTPIQILGQEPDAEMVEYLI

SEQ ID NO: 908602 - protein, 675 aa, Homo sapiens; identical to SEQ ID NO: 908601

SEQ ID NO: 908603 - protein, 675 aa, Homo sapiens; identical to SEQ ID NO: 908601

SEQ ID NO: 908604 - protein, 675 aa, Homo sapiens; identical to SEQ ID NO: 908601

SEQ ID NO: 908605 - protein, 675 aa, Homo sapiens; identical to SEQ ID NO: 908601

SEQ ID NO: 908606 - protein, 406 aa, Homo sapiens
MQLFLLLCLVLLSPQGASLHRHHPREMKKRVEDLHVGATVAPSSRRDFTFDLYRALASAAPSQNIFFSPVSISMSLAMLSLGAGSSTKMQILEGLGLNLQKSSEKELHRGFQQLLQELNQPRDGFQLSLGNALFTDLVVDLQDTFVSAMKTLYLADTFPTNFRDSAGAMKQINDYVAKQTKGKIVDLLKNLDSNAVVIMVNYIFFKAKWETSFNHKGTQEQDFYVTSETVVRVPMMSREDQYHYLLDRNLSCRVVGVPYQGNATALFILPSEGKMQQVENGLSEKTLRKWLKMFKKRQLELYLPKFSIEGSYQLEKVLPSLGISNVFTSHADLSGISNHSNIQVSEMVHKAVVEVDESGTRAAAATGTIFTFRSARLNSQRLVFNRPFLMFIVDNNILFLGKVNRP

SEQ ID NO: 908607 - protein, 442 aa, Homo sapiens
KCWLQSSQPSALSEPEGLPPPLCAHSATGHKQRTATMQLFLLLCLVLLSPQGASLHRHHPREMKKRVEDLHVGATVAPSSRRDFTFDLYRALASAAPSQNIFFSPVSISMSLAMLSLGAGSSTKMQILEGLGLNLQKSSEKELHRGFQQLLQELNQPRDGFQLSLGNALFTDLVVDLQDTFVSAMKTLYLADTFPTNFRDSAGAMKQINDYVAKQTKGKIVDLLKNLDSNAVVIMVNYIFFKAKWETSFNHKGTQEQDFYVTSETVVRVPMMSREDQYHYLLDRNLSCRVVGVPYQGNATALFILPSEGKMQQVENGLSEKTLRKWLKMFKKRQLELYLPKFSIEGSYQLEKVLPSLGISNVFTSHADLSGISNHSNIQVSEMVHKAVVEVDESGTRAAAATGTIFTFRSARLNSQRLVFNRPFLMFIVDNNILFLGKVNRP

SEQ ID NO: 908608 - protein, 363 aa, Homo sapiens
KCWLQSSQPSALSEPEGLPPPLCAHSATGHKQRTATMQLFLLLCLVLLSPQGASLHRHHPREMKKRVEDLHVGATVAPSSRRDFTFDLYRALASAAPSQNIFFSPVSISMSLAMLSLGAGSSTKMQILEGLGLNLQKSSEKELHRGFQQLLQELNQPRDGFQLSLGNALFTDLVVDLQDTFVSAMKTLYLADTFPTNFRDSAGAMKQINDYVAKQTKGKIVDLLKNLDSNAVVIMVNYIFFKAKWETSFNHKGTQEQDFYVTSETVVRVPMMSREDQYHYLLDRNLSCRVVGVPYQGNATALFILPSEGKMQQVENGLSEKTLRKWLKMFKKRWCTKLWWRWTSREPEQRQPRGQYSLSGRPA

SEQ ID NO: 908609 - protein, 426 aa, Homo sapiens
KCWLQSSQPSALSEPEGLPPPLCAHSATGHKQRTATMQLFLLLCLVLLSPQGASLHRHHPREMKKRVEDLHVGATVAPSSRRDFTFDLYRALASAAPSQNIFFSPVSISMSLAMLSLGAGSSTKMQILEGLGLNLQKSSEKELHRGFQQLLQELNQPRDGFQLSLGNALFTDLVVDLQDTFVSAMKTLYLADTFPTNFRDSAGAMKQINDYVAKQTKGKIVDLLKNLDSNAVVIMVNYIFFKAKWETSFNHKGTQEQDFYVTSETVVRVPMMSREDQYHYLLDRNLSCRVVGVPYQGNATALFILPSEGKMQQVENGLSEKTLRKWLKMFKKRQLELYLPKFSIEGSYQLEKVLPSLGISNVFTSHADLSGISNHSNIQVSEMVHKAVVEVDESGTRAAAATGTIFTFRCLGEMWRTFNLAVTIHQ

SEQ ID NO: 908610 - protein, 406 aa, Homo sapiens; identical to SEQ ID NO: 908606

SEQ ID NO: 908611 - protein, 388 aa, Homo sapiens
MQLFLLLCLVLLSPQGASLHRHHPREMKKRVEDLHVGATVAPSSRRDFTFDLYRALASAAPSQNIFFSPVSISMSLAMLSLGAGSSTKMQILEGLGLNLQKKPRDGFQLSLGNALFTDLVVDLQDTFVSAMKTLYLADTFPTNFRDSAGAMKQINDYVAKQTKGKIVDLLKNLDSNAVVIMVNYIFFKAKWETSFNHKGTQEQDFYVTSETVVRVPMMSREDQYHYLLDRNLSCRVVGVPYQGNATALFILPSEGKMQQVENGLSEKTLRKWLKMFKKRQLELYLPKFSIEGSYQLEKVLPSLGISNVFTSHADLSGISNHSNIQVSEMVHKAVVEVDESGTRAAAATGTIFTFRSARLNSQRLVFNRPFLMFIVDNNILFLGKVNRP

SEQ ID NO: 908612 - protein, 283 aa, Homo sapiens
PTRGNSSNLVPNSARVDLQDTFVSAMKTLYLADTFPTNFRDSAGAMKQINDYVAKQTKGKIVDLLKNLDSNAVVIMVNYIFFKAKWETSFNHKGTQEQDFYVTSETVVRVPMMSREDQYHYLLDRNLSCRVVGVPYQGNATALFILPSEGKMQQVENGLSEKTLRKWLKMFKKRQLELYLPKFSIEGSYQLEKVLPSLGISNVFTSHADLSGISNHSNIQVSEMVHKAVVEVDESGTRAAAATGTIFTFRSARLNSQRLVFNRPFLMFIVDNNILFLGKVNRP

SEQ ID NO: 908613 - protein, 270 aa, Homo sapiens
KCWLQSSQPSALSEPEGLPPPLCAHSATGHRAMKQINDYVAKQTKGKIVDLLKNLDSNAVVIMVNYIFFKAKWETSFNHKGTQEQDFYVTSETVVRVPMMSREDQYHYLLDRNLSCRVVGVPYQGNATALFILPSEGKMQQVENGLSEKTLRKWLKMFKKRQLELYLPKFSIEGSYQLEKVLPSLGISNVFTSHADLSGISNHSNIQVSEMVHKAVVEVDESGTRAAAATGTIFTFRSARLNSQRLVFNRPFLMFIVDNNILFLGKVNRP

SEQ ID NO: 908614 - protein, 406 aa, Homo sapiens; identical to SEQ ID NO: 908606

SEQ ID NO: 908615 - protein, 386 aa, Homo sapiens
KCWLQSSQPSALSEPEGLPPPLCAHSATGHKQRTATMQLFLLLCLVLLSPQGASLHRHHPREMKKRVEDLHVGATVAPSSRRDFTFDLYRALASAAPSQNIFFSPVSISMSLAMLSLGAGSSTKMQILEGLGLNLQKSSEKELHRGFQQLLQELNQPRDGFQLSLGNALFTDLVVDLQDTFVSAMKTLYLADTFPTNFRDSAGAMKQINDYVAKQTKGKIVDLLKNLDSNAVVIMVNYIFFKAKWETSFNHKGTQEQDFYVTSETVVRVPMMSREDQYHYLLDRNLSCRVVGVPYQGNATALFILPSEGKMQQVENGLSEKTLRKWLKMFKKRVLSDYPRASLNPHSPRETHTPYQGHTALVGRTHPAKELPPGPEASCDIQVLGA

SEQ ID NO: 908616 - protein, 406 aa, Homo sapiens; identical to SEQ ID NO: 908606

SEQ ID NO: 908617 - protein, 396 aa, Homo sapiens
KCWLQSSQPSALSEPEGLPPPLCAHSATGHKQRTATMQLFLLLCLVLLSPQGASLHRHHPREMKKRVEDLHVGATVAPSSRRDFTFDLYRALASAAPSQNIFFSPVSISMSLAMLSLGAGSSTKMQILEGLGLNLQKSSEKELHRGFQQLLQELNQPRDGFQLSLGNALFTDLVVDLQDTFVSAMKTLYLADTFPTNFRDSAGAMKQINDYVAKQTKGKIVDLLKNLDSNAVVIMVNYIFFKAKWETSFNHKGTQEQDFYVTSETVVRVPMMSREDQYHYLLDRNLSCRVVGVPYQGNATALFILPSEGKMQQVENGLSEKTLRKWLKMFKKSWRKSSPVWGSVTSSPPMLICPASATTQISRCLRWCTKLWWRWTSREPEQRQPRGQYSLSGRPA

SEQ ID NO: 908618 - protein, 406 aa, Homo sapiens; identical to SEQ ID NO: 908606

SEQ ID NO: 908619 - protein, 351 aa, Homo sapiens
KAMGTKCRLDRRCSNKEQPPCSSSSSCAGSSTKMQILEGLGLNLQKSSEKELHRGFQQLLQELNQPRDGFQLSLGNALFTDLVVDLQDTFVSAMKTLYLADTFPTNFRDSAGAMKQINDYVAKQTKGKIVDLLKNLDSNAVVIMVNYIFFKAKWETSFNHKGTQEQDFYVTSETVVRVPMMSREDQYHYLLDRNLSCRVVGVPYQGNATALFILPSEGKMQQVENGLSEKTLRKWLKMFKKRQLELYLPKFSIEGSYQLEKVLPSLGISNVFTSHADLSGISNHSNIQVSEMVHKAVVEVDESGTRAAAATGTIFTFRSARLNSQRLVFNRPFLMFIVDNNILFLGKVNRP

SEQ ID NO: 908620 - protein, 406 aa, Homo sapiens; identical to SEQ ID NO: 908606

SEQ ID NO: 908621 - protein, 249 aa, Homo sapiens
VIPPRPEDCRAMKQINDYVAKQTKGKIVDLLKNLDSNAVVIMVNYIFFKAKWETSFNHKGTQEQDFYVTSETVVRVPMMSREDQYHYLLDRNLSCRVVGVPYQGNATALFILPSEGKMQQVENGLSEKTLRKWLKMFKKRQLELYLPKFSIEGSYQLEKVLPSLGISNVFTSHADLSGISNHSNIQVSEMVHKAVVEVDESGTRAAAATGTIFTFRSARLNSQRLVFNRPFLMFIVDNNILFLGKVNRP

SEQ ID NO: 908622 - protein, 383 aa, Homo sapiens
KCWLQSSQPSALSEPEGLPPPLCAHSATGHKQRTATMQLFLLLCLVLLSPQGASLHRHHPREMKKRVEDLHVGATVAPSSRRDFTFDLYRALASAAPSQNIFFSPVSISMSLAMLSLGAGSSTKMQILEGLGLNLQKSSEKELHRGFQQLLQELNQPRDGFQLSLGNALFTDLVVDLQDTFVSAMKTLYLADTFPTNFRDSAGAMKQINDYVAKQTKGKIVDLLKNLDSNAVVIMVNYIFFKAKWETSFNHKGTQEQDFYVTSETVVRVPMMSREDQYHYLLDRNLSCRVVGVPYQGNATALFILPSEGKMQQVENGLSEKTLRKWLKMFKKRQLELYLPKFSIEGSYQLEKVLPSLGISNVCNLHPIYPATGSTLYTQVYLD

SEQ ID NO: 908623 - protein, 218 aa, Homo sapiens
MQLFLLLCLVLLSPQGASLHRHHPREMKKRVEDLHVGATVAPSSRRDFTFDLYRALASAAPSQNIFFSPVSISMSLAMLSLGAGSSTKMQILEGLGLNLQKSSEKELHRGFQQLLQELNQPRDGFQLSLGNALFTDLVVDLQDTFVSAMKTLYLADTFPTNFRDSAGAMKQINDYVAKQTKGKIVDLLKNLDSNAVVIMVNYIFFKGKALGPKPAISL

SEQ ID NO: 908624 - protein, 755 aa, Homo sapiens
DHPAPTVNGTRPARKKFQKKGASQSFSKAARLKWQSLERRIIDIVMQRMTIVNLEADMERLIKKREELFLLQEALRRKRERLQAESPEEEKGLQELAEEIEVLAANIDYINDGITDCQATIVQLEETKEELDSTDTSVVISSCSLAEARLLLDNFLKASIDKGLQVAQKEAQIRLLEGRLRQTDMAGSSQNHLLLDALREKAEAHPELQALIYNVQQENGYASTDEEISEFSEGSFSQSFTMKGSTSHDDFKFKSEPKLSAQMKAVSAECLGPPLDISTKNITKSLASLVEIKEDGVGFSVRDPYYRDRVSRTVSLPTRGSTFPRQSRATETSPLTRRKSYDRGQPIRSTDVGFTPPSSPPTRPRNDRNVFSRLTSNQSQGSALDKSDDSDSSLSEVLRGIISPVGGAKGARTAPLQCVSMAEGHTKPILCLDATDELLFTGSKDRSCKMWNLVTGQEIAALKGHPNNVVSIKYCSHSGLVFSVSTSYIKVWDIRDSAKCIRTLTSSGQVISGDACAATSTRAITSAQGEHQINQIALSPSGTMLYAASGNAVRIWELSRFQPVGKLTGHIGPVMCLTVTQTASQHDLVVTGSKDHYVKMFELGECVTGTIGPTHNFEPPHYDGIECLAIQGDILFSGSRDNGIKKWDLDQQELIQQIPNAHKDWVCALAFIPGRPMLLSACRAGVIKVWNVDNFTPIGEIKGHDSPINAICTNAKHIFTASSDCRVKLWNYVPGLTPCLPRRVLAIKGRATTLP

SEQ ID NO: 908625 - protein, 728 aa, Homo sapiens
DHPAPTVNGTRPARKKFQKKGASQSFSKAARLKWQSLERRIIDIVMQRMTIVNLEADMERLIKKREELFLLQEALRRKRERLQAESPEEEKGLQELAEEIEVLAANIDYINDGITDCQATIVQLEETKEELDSTDTSVVISSCSLAEARLLLDNFLKASIDKGLQVAQKEAQIRLLEGRLRQTDMAGSSQNHLLLDALREKAEAHPELQALIYNVQQENGYASTDEEISEFSEGSFSQSFTMKGSTSHDDFKFKSEPKLSAQMKAVSAECLGPPLDISTKNITKSLASLVEIKEDGVGFSVRDPYYRDRVSRTVSLPTRGSTFPRQSRATETSPLTRRKSYDRGQPIRSTDVGFTPPSSPPTRPRNDRNVFSRLTSNQSQGSALDKGIISPVGGAKGARTAPLQCVSMAEGHTKPILCLDATDELLFTGSKDRSCKMWNLVTGQEIAALKGHPNNVVSIKYCSHSGLVFSVSTSYIKVWDIRDSAKCIRTLTSSGQVISGDACAATSTRAITSAQGEHQINQIALSPSGTMLYAASGNAVRIWELSRFQPVGKLTGHIGPVMCLTVTQTASQHDLVVTGSKDHYVKMFELGECVTGTIGPTHNFEPPHYDGIECLAIQGDILFSGSRDNGIKKWDLDQQELIQQIPNAHKDWVCALAFIPGRPMLLSACRAGVIKVWNVDNFTPIGEIKGHDSPINAICTNAKHIFTASSDLTVKFWSVRRLPHSGPP

SEQ ID NO: 908626 - protein, 616 aa, Homo sapiens
IKEHIMQMLQNPDWKYRHAGLMAFIWLDNFLKASIDKGLQVAQKEAQIRLLEGRLRQTDMAGSSQNHLLLDALREKAEAHPELQALIYNVQQENGYASTDEEISEFSEGSFSQSFTMKGSTSHDDFKFKSEPKLSAQMKAVSAECLGPPLDISTKNITKSLASLVEIKEDGVGFSVRDPYYRDRVSRTVSLPTRGSTFPRQSRATETSPLTRRKSYDRGQPIRSTDVGFTPPSSPPTRPRNDRNVFSRLTSNQSQGSALDKSDDSDSSLSEVLRGIISPVGGAKGARTAPLQCVSMAEGHTKPILCLDATDELLFTGSKDRSCKMWNLVTGQEIAALKGHPNNVVSIKYCSHSGLVFSVSTSYIKVWDIRDSAKCIRTLTSSGQVISGDACAATSTRAITSAQGEHQINQIALSPSGTMLYAASGNAVRIWELSRFQPVGKLTGHIGPVMCLTVTQTASQHDLVVTGSKDHYVKMFELGECVTGTIGPTHNFEPPHYDGIECLAIQGDILFSGSRDNGIKKWDLDQQELIQQIPNAHKDWVCALAFIPGRPMLLSACRAGVIKVWNVDNFTPIGEIKGHDSPINAICTNAKHIFTASSDLTVKFWSVRRLPHSGPP

SEQ ID NO: 908627 - protein, 757 aa, Homo sapiens
DHPAPTVNGTRPARKKFQKKGASQSFSKAARLKWQSLERRIIDIVMQRMTIVNLEADMERLIKKREELFLLQEALRRKRERLQAESPEEEKGLQELAEEIEVLAANIDYINDGITDCQATIVQLEETKEELDSTDTSVVISSCSLAEARLLLDNFLKASIDKGLQVAQKEAQIRLLEGRLRQTDMAGSSQNHLLLDALREKAEAHPELQALIYNVQQENGYASTDEEISEFSEGSFSQSFTMKGSTSHDDFKFKSEPKLSAQMKAVSAECLGPPLDISTKNITKSLASLVEIKEDGVGFSVRDPYYRDRVSRTVSLPTRGSTFPRQSRATETSPLTRRKSYDRGQPIRSTDVGFTPPSSPPTRPRNDRNVFSRLTSNQSQGSALDKSDDSDSSLSEVLRGIISPVGGAKGARTAPLQCVSMAEGHTKPILCLDATDELLFTGSKDRSCKMWNLVTGQEIAALKGHPNNVVSIKYCSHSGLVFSVSTSYIKVWDIRDSAKCIRTLTSSGQVISGDACAATSTRAITSAQGEHQINQIALSPSGTMLYAASGNAVRIWELSRFQPVGKLTGHIGPVMCLTVTQTASQHDLVVTGSKDHYVKMFELGECVTGTIGPTHNFEPPHYDGIECLAIQGDILFSGSRDNGIKKWDLDQQELIQQIPNAHKDWVCALAFIPGRPMLLSACRAGVIKVWNVDNFTPIGEIKGHDSPINAICTKFVGRPPKRGQLYIFRNPKGGPPLTVDLTVKFWSVRRLPHSGPP

SEQ ID NO: 908628 - protein, 253 aa, Homo sapiens
MERRPSLAENYQGRGSWQSFSAPGLGTRSSGEIVKSVFWRPLLGELWNYRSGPWGGLSSIPLPRPTPTQSCPPCFSVASLVLCFPLQSGSQEPAPPPFRGRSDFWTFQRWFCVSALGSSPSWAGALGALSMWRPVLGGGRLQWRLSEAWSLPRALLGAATEAKTAVLLVLALLDVVLKSGAADSRKETPLDAGLLGPEQSVSNGWKSFFLWPPRGCRATPLALRCGHKSLPTPPRQPEQKVLTLQPVRKNPSA

SEQ ID NO: 908629 - protein, 741 aa, Homo sapiens
DHPAPTVNGTRPARKKFQKKGASQSFSKAARLKWQSLERRIIDIVMQRMTIVNLEADMERLIKKREELFLLQEALRRKRERLQAESPEEEKGLQELAEEIEVLAANIDYINDGITDCQATIVQLEETKEELDSTDTSVVISSCSLAEARLLLDNFLKASIDKGLQVAQKEAQIRLLEGRLRQTDMAGSSQNHLLLDALREKAEAHPELQALIYNVQQENGYASTDEEISEFSEGSFSQSFTMKGSTSHDDFKFKSEPKLSAQMKAVSAECLGPPLDISTKNITKSLASLVEIKEDGVGFSVRDPYYRDRVSRTVSLPTRGSTFPRQSRATETSPLTRRKSYDRGQPIRSTDVGFTPPSSPPTRPRNDRNVFSRLTSNQSQGSALDKSDDSDSSLSEVLRGIISPVGGAKGARTAPLQCVSMAEGHTKPILCLDATDELLFTGSKDRSCKMWNLVTGQEIAALKGHPNNVVSIKYCSHSGLVFSVSTSYIKVWDIRDSAKCIRTLTSSGQVISGDACAATSTRAITSAQGEHQINQIALSPSGTMLYAASGNAVRIWELSRFQPVGKLTGHIGPVMCLTVTQTASQHDLVVTGSKDHYVKMFELGECVTGTIGPTHNFEPPHYDGIECLAIQGDILFSGSRDNGIKKWDLDQQELIQQIPNAHKDWVCALAFIPGRPMLLSACRAGVIKVWNVDNFTPIGEIKGHDSPINAICTNAKHIFTASSDLTVKFWSVRRLPHSGPP

SEQ ID NO: 908630 - protein, 741 aa, Homo sapiens; identical to SEQ ID NO: 908629

SEQ ID NO: 908631 - protein, 741 aa, Homo sapiens; identical to SEQ ID NO: 908629

SEQ ID NO: 908632 - protein, 755 aa, Homo sapiens; identical to SEQ ID NO: 908624

SEQ ID NO: 908633 - protein, 427 aa, Homo sapiens
PDQPDSGDFPRQSRATETSPLTRRKSYDRGQPIRSTDVGFTPPSSPPTRPRNDRNVFSRLTSNQSQGSALDKSDDSDSSLSEVLRGIISPVGGAKGARTAPLQCVSMAEGHTKPILCLDATDELLFTGSKDRSCKMWNLVTGQEIAALKGHPNNVVSIKYCSHSGLVFSVSTSYIKVWDIRDSAKCIRTLTSSGQVISGDACAATSTRAITSAQGEHQINQIALSPSGTMLYAASGNAVRIWELSRFQPVGKLTGHIGPVMCLTVTQTASQHDLVVTGSKDHYVKMFELGECVTGTIGPTHNFEPPHYDGIECLAIQGDILFSGSRDNGIKKWDLDQQELIQQIPNAHKDWVCALAFIPGRPMLLSACRAGVIKVWNVDNFTPIGEIKGHDSPINAICTNAKHIFTASSDLTVKFWSVRRLPHSGPP

SEQ ID NO: 908634 - protein, 253 aa, Homo sapiens; identical to SEQ ID NO: 908628

SEQ ID NO: 908635 - protein, 100 aa, Homo sapiens
  misc_feature (4)..(4): Xaa can be any naturally occurring amino acid
KARXASATGDARAHAVRRRGLRPGEVPHSPSAYEGAPTGAAAPGTASSLNLKSFRSPEPNIHETPRVVLHESWILCPLFQGCPRSMLGGRPPAPLTAQAP

SEQ ID NO: 908636 - protein, 781 aa, Homo sapiens
MCEFTQCQTGSGRKHQHLFPPVSSSPELAAVTCLGNNVPDIFCAVVSVPNFCSLIFIRNTYPLNKFKGQVSSLVAAWDLTVELSWVWWQRLRWEDCLSPGVSGCSELGLHHCAPPGDRVRLSRLNNSNNSKLQFAKHCPIVGPFDCLQVCGVDTILHFCPAVTVDISRQTVQSLGLLVMLMDIAKSHGNILEMDGGMVSTVSAVSVFRAGAGRDWVLVTAVLSPVPATFHVCLDVWSRVVSHLLGGFSLGKHAGQLTMEECPILPHTSLGREHVPPSEHVIPLLLGDHEAMRASGPQAERHSSWGCALQSSPLVPKCEMGMRPTYRVARMPQRVNVSLSIMFSMEMINGEELLRNSRHPMTPPPLFPIFPINSKNLLFLNQLSRLKSRRSLNTINKSKYVLNAFIFTSAFEQTADVVSHYREGRGGTERSENRPEVTQQVGQPVLNAALGSRVCKTHSAPHLIDGLCAPTLYPQQVPCHTVPSTSQKEYGVPFQMVNLSLLCAAVIEYPENWVIYNELSVRFGGDKHSNHNKWGVWVVSLGMLELGLRGPCDSDCLGHVVLVELGTNSGVARAIETRPDPLGVAAGPPEWALGIEVGTGLKGKIWFSRYTHGICLLKEGSRGPMTRGTALSAFQEGVCSGSCIRVGCVSQQPLPHLGVPTDLEHLSARGPAPSRGSAGFCVFSWLIGTFLFLLHNLVLAAEPCGRPGANHTPRCSVLGIQCWQAAWRLVMSCTWGSQHLGAVLGVSVFHTLARASAVLAHLSVQFHSPDPFQAAGISPHDI

SEQ ID NO: 908637 - protein, 179 aa, Homo sapiens
MAARTLGRGVGRLLGSLRGLSGQPARPPCGVSAPRRAASGPSGSAPAVAAAAAQPGSYPALSAQAAREPAAFWGPLARDTLVWDTPYHTVWDCDFSTGKIGWFLGGQLNVSVNCLDQHVRKSPESVALIWERDEPGTEVRITYRISECDRKQSAPQCYRCSVPGDSLSAVSGGPIRDSF

SEQ ID NO: 908638 - protein, 397 aa, Homo sapiens
MHAYFLVTWCEHGGVGGQAPDAPFLSLQLVFDHQPGDIFGCVADIGWITGHSYVVYGPLCNGATSVLFESTPVYPNAGRYWETVERLKINQFYGAPTAVRLLLKYGDAWVKKYDRSSLRTLGSVGEPINCEAWEWLHRVVGDSRCTLVDTWWQTETGGICIAPRPSEEGAEILPAMAMRPFFGIVPVLMDEKGSVVEGSNVSGALCISQAWPGMARTIYGDHQRFVDAYFKAYPGYYFTGDGAYRTEGGYYQITGRMDDVINISGHRLGTAEIEDAIADHPAVPESAVIGYPHDIKGEAAFAFIVVKDSAGDSDVVVQELKSMVATKIAKYAVPDEILVVKRLPKTRSGKVMRRLLRKIITSEAQELGDTTTLEDPSIIAEILSVYQKCKDKQAAAK

SEQ ID NO: 908639 - protein, 689 aa, Homo sapiens [sequence omitted]

SEQ ID NO: 908640 - protein, 689 aa, Homo sapiens [sequence omitted]

SEQ ID NO: 908641 - protein, 724 aa, Homo sapiens
MCEFTQCQTGSGRKHQHLFPPVSSSPELAAVTCLGNNVPDIFCAVVSVPNFCSLIFIRNTYPLNKFKGQVSSLVAAWDLTVELSWVWWQRLRWEDCLSPGVSGCSELGLHHCAPPGDRVRLSRLNNSNNSKLQFAKHCPIVGPFDCLQVCGVDTILHFCPAVTVDISRQTVQSLGLLVMLMDIAKSHGNILEMDGGMVSTVSAVSVFRAGAGRDWVLVTAVLSPVPATFHVCLDVWSRVVSHLLGGFSLGKHAGQLTMEECPILPHTSLGREHVPPSEHVIPLLLGDHEAMRASGPQAERHSSWGCALQSSPLVPKCEMGMRPTYRVARMPQRVNVSLSIMFSMEMINGEELLRNSRHPMTPPPLFPIFPINSKNLLFLNQLSRLKSRRSLNTINKSKYVLNAFIFTSAFEQTADVVSHYREGRGGTERSENRPEVTQQVGQPVLNAALGSRVCKTHSAPHLIDGLCAPTLYPQQVPCHTVPSTSQKEYGVPFQMVNLSLLCAAVIEYPETGGFIMNRNLLVHISGGWEVHIKVLASGEGLLAASSHGGRAKRRQERARGGGTHPFIMAPIPLMRVETSWHNHLIKVPPLNTVTMAITFQREIVEGTNIQTIISGEFVVVSLGMLELGLRGPCDSDCLGHVVLVDWEQTAGWPGPRNSPRSSRCCQQGHLSGPWALGGDRAEGQDLVFQIHSWDLSPEGRFTGSNDKGYRPKCISGRGVLWQLH

SEQ ID NO: 908642 - protein, 689 aa, Homo sapiens [sequence omitted]

SEQ ID NO: 908643 - protein, 689 aa, Homo sapiens [sequence omitted]

SEQ ID NO: 908644 - protein, 689 aa, Homo sapiens [sequence omitted]

SEQ ID NO: 908645 - protein, 327 aa, Homo sapiens
MLFLLLPLLAVLPGDGNADGLKEPLSFHVTWIASFYNHSWKQNLVSGWLSDLQTHTWDSNSSTIVFLCPWSRGNFSNEEWKELETLFRIRTIRSFEGIRRYAHELQFEYPFEIQVTGGCELHSGKVSGSFLQLAYQGSDFVSFQNNSWLPYPVAGNMAKHFCKVLNQNQHENDITHNLLSDTCPRFILGLLDAGKAHLQRQVKPEAWLSHGPSPGPGHLQLVCHVSGFYPKPVWVMWMRGEQEQQGTQRGDILPSADGTWYLRATLEVAAGEAADLSCRVKHSSLEGQDIVLYWEHHSSVGFIILAVIVPLLLLIGLALWFRKRCFC

SEQ ID NO: 908646 - protein, 364 aa, Homo sapiens
QDLHCSSEDSGEGLALCSGVILAHFSLNLPSSWDYRCDLLLLAFCHDFEASSAMWNWLKEPLSFHVTWIASFYNHSWKQNLVSGWLSDLQTHTWDSNSSTIVFLCPWSRGNFSNEEWKELETLFRIRTIRSFEGIRRYAHELQFEYPFEIQVTGGCELHSGKVSGSFLQLAYQGSDFVSFQNNSWLPYPVAGNMAKHFCKVLNQNQHENDITHNLLSDTCPRFILGLLDAGKAHLQRQVKPEAWLSHGPSPGPGHLQLVCHVSGFYPKPVWVMWMRGEQEQQGTQRGDILPSADGTWYLRATLEVAAGEAADLSCRVKHSSLEGQDIVLYWEHHSSVGFIILAVIVPLLLLIGLALWFRKRCFC

SEQ ID NO: 908647 - protein, 309 aa, Homo sapiens
MLFLLLPLLAVLPGDGNADGLKEPLSFHVTWIASFYNHSWKHSSTIVFLCPWSRGNFSNEEWKELETLFRIRTIRSFEGIRRYAHELQFEYPFEIQVTGGCELHSGKVSGSFLQLAYQGSDFVSFQNNSWLPYPVAGNMAKHFCKVLNQNQHENDITHNLLSDTCPRFILGLLDAGKAHLQRQVKPEAWLSHGPSPGPGHLQLVCHVSGFYPKPVWVMWMRGEQEQQGTQRGDILPSADGTWYLRATLEVAAGEAADLSCRVKHSSLEGQDIVLYWEHHSSVGFIILAVIVPLLLLIGLALWFRKRCFC

SEQ ID NO: 908648 - protein, 294 aa, Homo sapiens
MLFLLLPLLAVLPGDGNADGLKEPLSFHVTWIASFYNHSWKHSSTIVFLCPWSRGNFSNEEWKELETLFRIRTIRSFEGIRRYAHELQFEYPFEIQVTGGCELHSGKVSGSFLQLAYQGSDFVSFQNNSWLPYPVAGNMAKHFCKVLNQNQHENDITHNLLSDTCPRFILGLLDAGKAHLQRQVKPEAWLSHGPSPGPGHLQLVCHVSGFYPKPVWVMWMRGEQEQQGTQRGDILPSADGTWYLRATLEVAAGEAADLSCRVKHSSLEGQDIVLYWGEKKLRPRLEMPGSGPQA

SEQ ID NO: 908649 - protein, 326 aa, Homo sapiens
LQWGRKNLGAMFAFGGATGLKEPLSFHVTWIASFYNHSWKQNLVSGWLSDLQTHTWDSNSSTIVFLCPWSRGNFSNEEWKELETLFRIRTIRSFEGIRRYAHELQFEYPFEIQVTGGCELHSGKVSGSFLQLAYQGSDFVSFQNNSWLPYPVAGNMAKHFCKVLNQNQHENDITHNLLSDTCPRFILGLLDAGKAHLQRQVKPEAWLSHGPSPGPGHLQLVCHVSGFYPKPVWVMWMRGEQEQQGTQRGDILPSADGTWYLRATLEVAAGEAADLSCRVKHSSLEGQDIVLYWEHHSSVGFIILAVIVPLLLLIGLALWFRKRCFC

SEQ ID NO: 908650 - protein, 326 aa, Homo sapiens; identical to SEQ ID NO: 908649

SEQ ID NO: 908651 - protein, 397 aa, Homo sapiens
LEELLLGRPGDPVGREEGGKMVLESTMVCVDNSEYMRNGDFLPTRLQAQQDAVNIVCHSKTRSNPENNVGLITLANDCEVLTTLTPDTGRILSKLHTVQPKGKITFCTGIRVAHLALKHRQGKNHKMRIIAFVGSPVEDNEKDLVKLAKRLKKEKVNVDIINFGEEEVNTEKLTAFVNTLNGKDGTGSHLVTVPPGPSLADALISSPILAGEGGAMLGLGASDFEFGVDPSADPELALALRVSMEEQRQRQEEEARRAAAASAAEAGIATTGTEDSDDALLKMTISQQEFGRTGLPDLSSMTEEEQIAYAMQMSLQGAEFGQAESADIDASSAMDTSEPAKEEDDYDVMQDPEFLQSVLENLPGVDPNNEAIRNAMGSLASQATKDGKKDKKEEDKK

SEQ ID NO: 908652 - protein, 104 aa, Homo sapiens
MEEQEGGGGGRGSEFWCEAGLLQSGTEDSDDALLKMTISQQEFGRTGLPDLSSMTEEEQIAYAMQMSLQGAEFGQAESADIDASSAMDTSEPAKGETQPCPHQV

SEQ ID NO: 908653 - protein, 424 aa, Homo sapiens
NSQMTFYFIQRYKGNYVQQQSDGQSKLLGGSKFMVNVMMVGREEGGKMVLESTMVCVDNSEYMRNGDFLPTRLQAQQDAVNIVCHSKTRSNPENNVGLITLANDCEVLTTLTPDTGRILSKLHTVQPKGKITFCTGIRVAHLALKHRQGKNHKMRIIAFVGSPVEDNEKDLVKLAKRLKKEKVNVDIINFGEEEVNTEKLTAFVNTLNGKDGTGSHLVTVPPGPSLADALISSPILAGEGGAMLGLGASDFEFGVDPSADPELALALRVSMEEQRQRQEEEARRAAAASAAEAGIATTGTEDSDDALLKMTISQQEFGRTGLPDLSSMTEEEQIAYAMQMSLQGAEFGQAESADIDASSAMDTSEPAKEEDDYDVMQDPEFLQSVLENLPGVDPNNEAIRNAMGSLASQATKDGKKDKKEEDKK

SEQ ID NO: 908654 - protein, 397 aa, Homo sapiens; identical to SEQ ID NO: 908651

SEQ ID NO: 908655 - protein, 351 aa, Homo sapiens
LEELLLGRPGDPVGREEGGKMVLESTMVCVDNSEYMRNGDFLPTRLQAQQDAVNIVCHSKTRSNPENNVGLITLANDCEVLTTLTPDTGRILSKLHTVQPKGKITFCTGIRVAHLALKHRQGKNHKMRIIAFVGSPVEDNEKDLVKLAKRLKKEKVNVDIINFGEEEVNTEKLTAFVNTLNGKDGTGSHLVTVPPGPSLADALISSPILAGEGGAMLGLGASDFEFGVDPSADPELALALRVSMEEQRQRQEEEARRAAAASAAEAGIATTGTEDSDDALLKMTISQQEFGRTGLPDLSSMTEEEQIAYAMQMSLQGAEFGQAESADIDASSAMDTSEPAKGETQPCPHQV

SEQ ID NO: 908656 - protein, 391 aa, Homo sapiens
IGWMHAPGKSGRGQMVLESTMVCVDNSEYMRNGDFLPTRLQAQQDAVNIVCHSKTRSNPENNVGLITLANDCEVLTTLTPDTGRILSKLHTVQPKGKITFCTGIRVAHLALKHRQGKNHKMRIIAFVGSPVEDNEKDLVKLAKRLKKEKVNVDIINFGEEEVNTEKLTAFVNTLNGKDGTGSHLVTVPPGPSLADALISSPILAGEGGAMLGLGASDFEFGVDPSADPELALALRVSMEEQRQRQEEEARRAAAASAAEAGIATTGTEDSDDALLKMTISQQEFGRTGLPDLSSMTEEEQIAYAMQMSLQGAEFGQAESADIDASSAMDTSEPAKEEDDYDVMQDPEFLQSVLENLPGVDPNNEAIRNAMGSLASQATKDGKKDKKEEDKK

SEQ ID NO: 908657 - protein, 462 aa, Homo sapiens
LEELLLGRPGDPVGREEGGKMVLESTMVCVDNSEYMRNGDFLPTRLQAQQDAVNIVCHSKTRSNPENNVGLITLANDCEVLTTLTPDTGRILSKLHTVQPKGKITFCTGIRVAHLALKHRQGKNHKMRIIAFVGSPVEDNEKDLVKLAKRLKKEKVNVDIINFGEEEVNTEKLTAFVNTLNGKDGTGSHLVTVPPGPSLADALISSPILAGEGGAMLGLGASDFEFGVDPSADPELALALRVSMEEQRQRQEEEARRAAAASAAEAGIATTGTEGERGGIRSPGTAGCYTLKAGCRHCRESVEVCQGRNMWEGWARNGLGGWPVWIWHQFYPAPLFLFPDSDDALLKMTISQQEFGRTGLPDLSSMTEEEQIAYAMQMSLQGAEFGQAESADIDASSAMDTSEPAKEEDDYDVMQDPEFLQSVLENLPGVDPNNEAIRNAMGSLASQATKDGKKDKKEEDKK

SEQ ID NO: 908658 - protein, 377 aa, Homo sapiens
NSQMTFYFIQRYKGNYVQQQSDGQSKLLGGSKFMVNVMMVGREEGGKMVLESTMVCDCEVLTTLTPDTGRILSKLHTVQPKGKITFCTGIRVAHLALKHRQGKNHKMRIIAFVGSPVEDNEKDLVKLAKRLKKEKVNVDIINFGEEEVNTEKLTAFVNTLNGKDGTGSHLVTVPPGPSLADALISSPILAGEGGAMLGLGASDFEFGVDPSADPELALALRVSMEEQRQRQEEEARRAAAASAAEAGIATTGTEDSDDALLKMTISQQEFGRTGLPDLSSMTEEEQIAYAMQMSLQGAEFGQAESADIDASSAMDTSEPAKEEDDYDVMQDPEFLQSVLENLPGVDPNNEAIRNAMGSLASQATKDGKKDKKEEDKK

SEQ ID NO: 908659 - protein, 271 aa, Homo sapiens
MRIIAFVGSPVEDNEKDLVKLAKRLKKEKVNVDIINFGEEEVNTEKLTAFVNTLNGKDGTGSHLVTVPPGPSLADALISSPILAGEGGAMLGLGASDFEFGVDPSADPELALALRVSMEEQRQRQEEEARRAAAASAAEAGIATTGTEDSDDALLKMTISQQEFGRTGLPDLSSMTEEEQIAYAMQMSLQGAEFGQAESADIDASSAMDTSEPAKEEDDYDVMQDPEFLQSVLENLPGVDPNNEAIRNAMGSLASQATKDGKKDKKEEDKK

SEQ ID NO: 908660 - protein, 337 aa, Homo sapiens
LEELLLGRPGDPVGREEGGKMVLESTMVCVDNSEYMRNGDFLPTRLQAQQDAVNIVCHSKTRSNPENNVGLITLANDCEVLTTLTPDTGRILSKLHTVQPKGKITFCTGIRVAHLALKHRQGKNHKMRIIAFVGSPVEDNEKDLVKLAKRLKKEKVNVDIINFGEEEVNTEKLTAFVNTLNGKDGTGSHLVTVPPGPSLADALISSPILAGEGGAMLGLGASDFEFGVDPSADPELALALRVSMEEQRQRQEEEARRAAAASAAEAGIATTGTEAHRACLQEEDDYDVMQDPEFLQSVLENLPGVDPNNEAIRNAMGSLASQATKDGKKDKKEEDKK

SEQ ID NO: 908661 - protein, 182 aa, Homo sapiens [sequence omitted]

SEQ ID NO: 908662 - protein, 338 aa, Homo sapiens
LAPMADCEEPYVLLSLVNVLTTLTPDTGRLLITALLSHTHGQIISFLYGLSRVAHLALKHRQGKNHKMRIIAFVGSPVEDNEKDLVKLAKRLKKEKVNVDIINFGEEEVNTEKLTAFVNTLNGKDGTGSHLVTVPPGPSLADALISSPILAGEGGAMLGLGASDFEFGVDPSADPELALALRVSMEEQRQRQEEEARRAAAASAAEAGIATTGTEDSDDALLKMTISQQEFGRTGLPDLSSMTEEEQIAYAMQMSLQGAEFGQAESADIDASSAMDTSEPAKEEDDYDVMQDPEFLQSVLENLPGVDPNNEAIRNAMGSLASQATKDGKKDKKEEDKK

SEQ ID NO: 908663 - protein, 340 aa, Homo sapiens
LEELLLGRPGDPVGREEGGKMVLESTMVCVDNSEYMRNGDFLPTRLQAQQDAVNIVCHSKTRSNPENNVGLITLANDCEVLTTLTPDTGRILSKLHTVQPKGKITFCTGIRVAHLALKHRQGKNHKMRIIAFVGSPVEDNEKDLVKLAKRLKKEKVNVDIINFGEEEVNTEKLTAFVNTLNGKDGTGSHLVTVPPGPSLADALISSPILAGEGGAMLGLGASDFEFGVDPSADPELALALRVSMEEQRQRQEEEARRAAAASAAEAGIATTGTEDSDDALLKLPCKELALGSEPKVIGKNVSRDPPGEWAGKDMASDRPRKIGPLFQPEKISPEERSGVQ

SEQ ID NO: 908664 - protein, 412 aa, Homo sapiens
NSQMTFYFIQRYKGNYVQQQSDGQSKLLGGSKFMVNVMMVGREEGGKMVLESTMVCVDNSEYMRNGDFLPTRLQAQQDAVNIVCHSKTRSNPENNVGLITLANDCEVLTTLTPDTGRILSKLHTVQPKGKITFCTGIRVAHLALKHRQGKNHKMRIIAFVGSPVEDNEKDLVKLAKRLKKEKVNVDIINFGEEEVNTEKLTAFVNTLVPPGPSLADALISSPILAGEGGAMLGLGASDFEFGVDPSADPELALALRVSMEEQRQRQEEEARRAAAASAAEAGIATTGTEDSDDALLKMTISQQEFGRTGLPDLSSMTEEEQIAYAMQMSLQGAEFGQAESADIDASSAMDTSEPAKEEDDYDVMQDPEFLQSVLENLPGVDPNNEAIRNAMGSLASQATKDGKKDKKEEDKK

SEQ ID NO: 908665 - protein, 456 aa, Homo sapiens
IGWMHAPGKSGRGQMVLESTMVCVDNSEYMRNGDFLPTRLQAQQDAVNIVCHSKTRSNPENNVGLITLANDCEVLTTLTPDTGRILSKLHTVQPKGKITFCTGIRVAHLALKHRQGKNHKMRIIAFVGSPVEDNEKDLVKLAKRLKKEKVNVDIINFGEEEVNTEKLTAFVNTLNGKDGTGSHLVTVPPGPSLADALISSPILAGEGGAMLGLGASDFEFGVDPSADPELALALRVSMEEQRQRQEEEARRAAAASAAEAGIATTGTEGERGGIRSPGTAGCYTLKAGCRHCRESVEVSQGRNMWEGWARNGLGGWPVWIWHQFYPAPLFLFPDSDDALLKMTISQQEFGRTGLPDLSSMTEEEQIAYAMQMSLQGAEFGQAESADIDASSAMDTSEPAKEEDDYDVMQDPEFLQSVLENLPGVDPNNEAIRNAMGSLASQATKDGKKDKKEEDKK

SEQ ID NO: 908666 - protein, 239 aa, Homo sapiens
NSQMTFYFIQRYKGNYVQQQSDGQSKLLGGSKFMVNVMMVGREEGGKMVLESTMVCVDNSEYMRNGDFLPTRLQAQQDAVNIVCHSKTRSNPENNVGLITLANDCEVLTTLTPDTGRILSKLHTVQPKGKITFCTGLPDLSSMTEEEQIAYAMQMSLQGAEFGQAESADIDASSAMDTSEPAKEEDDYDVMQDPEFLQSVLENLPGVDPNNEAIRNAMGSLASQATKDGKKDKKEEDKK

SEQ ID NO: 908667 - protein, 284 aa, Homo sapiens
TNTTTPPPHPPTSSSTACLTRERLWEAICVCVDNSEYMRNGDFLPTRLQAQQDAVNIVCHSKTRSNPENNVGLITLANDCEVLTTLTPDTGRILSKLHTVQPKGKITFCTGIRVAHLALKHRQGKNHKMRIIAFVGSPVEDNEKDLVKLAKRLKKEKVNVDIINFGEEEVNTEKLTAFVNTLNGKDGTGSHLVTVPPGPSLADALISSPILAGEGGAMLGLGASDFEFGVDPSADPELALALRVSMEEQRQRQEEEARRAAAASAAEAGIATTGTEDSDDSLLK

SEQ ID NO: 908668 - protein, 397 aa, Homo sapiens; identical to SEQ ID NO: 908651

SEQ ID NO: 908669 - protein, 397 aa, Homo sapiens; identical to SEQ ID NO: 908651

SEQ ID NO: 908670 - protein, 362 aa, Homo sapiens
MRNGDFLPTRLQAQQDAVNIVCHSKTRSNPENNVGLITLANDCEVLTTLTPDTGRILSKLHTVQPKGKITFCTGIRVAHLALKHRQGKNHKMRIIAFVGSPVEDNEKDLVKLAKRLKKEKVNVDIINFGEEEVNTEKLTAFVNTLNGKDGTGSHLVTVPPGPSLADALISSPILAGEGGAMLGLGASDFEFGVDPSADPELALALRVSMEEQRQRQEEEARRAAAASAAEAGIATTGTEDSDDALLKMTISQQEFGRTGLPDLSSMTEEEQIAYAMQMSLQGAEFGQAESADIDASSAMDTSEPAKEEDDYDVMQDPEFLQSVLENLPGVDPNNEAIRNAMGSLASQATKDGKKDKKEEDKK

SEQ ID NO: 908671 - protein, 357 aa, Homo sapiens
LEELLLGRPGDPVGREEGGKMVLESTMVCVDNSEYMRNGDFLPTRLQAQQDAVNIVCHSKTRSNPENNVGLITLANDCEVLTTLTPDTGRILSKLHTVQPKGKITFCTGIRVAHLALKHRQGKNHKMRIIAFVGSPVEDNEKDLVKLAKRLKKEKVNVDIINFGEEEVNTEKLTAFVNTLNGKDGTGSHLVTVPPGPSLADALISSPILAGEGGAMLGLGASDFEFGVDPSADPELALALRVSMEEQRQRQEEEARRAAAASAAEAGIATTGTEDSDDALLKMTITDIDASSAMDTSEPAKEEDDYDVMQDPEFLQSVLENLPGVDPNNEAIRNAMGSLASQATKDGKKDKKEEDKK

SEQ ID NO: 908672 - protein, 346 aa, Homo sapiens
RLGARTGRVNFGEEEITAGLMTGEGDCEVLTTLTPDTGRILSKLHTVQPKGKITFCTGIRVAHLALKHRQGKNHKMRIIAFVGSPVEDNEKDLVKLAKRLKKEKVNVDIINFGEEEVNTEKLTAFVNTLNGKDGTGSHLVTVPPGPSLADALISSPILAGEGGAMLGLGASDFEFGVDPSADPELALALRVSMEEQRQRQEEEARRAAAASAAEAGIATTGTEDSDDALLKMTISQQEFGRTGLPDLSSMTEEEQIAYAMQMSLQGAEFGQAESADIDASSAMDTSEPAKEEDDYDVMQDPEFLQSVLENLPGVDPNNEAIRNAMGSLASQATKDGKKDKKEEDKK

SEQ ID NO: 908673 - protein, 182 aa, Homo sapiens [sequence omitted]

SEQ ID NO: 908674 - protein, 306 aa, Homo sapiens
NRLDACPWKIGTRADGVGKHYGVLALKHRQGKNHKMRIIAFVGSPVEDNEKDLVKLAKRLKKEKVNVDIINFGEEEVNTEKLTAFVNTLNGKDGTGSHLVTVPPGPSLADALISSPILAGEGGAMLGLGASDFEFGVDPSADPELALALRVSMEEQRQRQEEEARRAAAASAAEAGIATTGTEDSDDALLKMTISQQEFGRTGLPDLSSMTEEEQIAYAMQMSLQGAEFGQAESADIDASSAMDTSEPAKEEDDYDVMQDPEFLQSVLENLPGVDPNNEAIRNAMGSLASQATKDGKKDKKEEDKK

SEQ ID NO: 908675 - protein, 305 aa, Homo sapiens
LGQAGVNRTRGQIPSDGHPRGHLALKHRQGKNHKMRIIAFVGSPVEDNEKDLVKLAKRLKKEKVNVDIINFGEEEVNTEKLTAFVNTLNGKDGTGSHLVTVPPGPSLADALISSPILAGEGGAMLGLGASDFEFGVDPSADPELALALRVSMEEQRQRQEEEARRAAAASAAEAGIATTGTEDSDDALLKMTISQQEFGRTGLPDLSSMTEEEQIAYAMQMSLQGAEFGQAESADIDASSAMDTSEPAKEEDDYDVMQDPEFLQSVLENLPGVDPNNEAIRNAMGSLASQATKDGKKDKKEEDKK

SEQ ID NO: 908676 - protein, 182 aa, Homo sapiens [sequence omitted]

SEQ ID NO: 908677 - protein, 260 aa, Homo sapiens
  misc_feature (9)..(10): Xaa can be any naturally occurring amino acid
  misc_feature (19)..(19): Xaa can be any naturally occurring amino acid
GSHVATSFXXDVAHDAREXPVDIINFGEEEVNTEKLTAFVNTLNGKDGTGSHLVTVPPGPSLADALISSPILAGEGGAMLGLGASDFEFGVDPSADPELALALRVSMEEQRQRQEEEARRAAAASAAEAGIATTGTEDSDDALLKMTISQQEFGRTGLPDLSSMTEEEQIAYAMQMSLQGAEFGQAESADIDASSAMDTSEPAKEEDDYDVMQDPEFLQSVLENLPGVDPNNEAIRNAMGSLASQATKDGKKDKKEEDKK

SEQ ID NO: 908678 - protein, 210 aa, Homo sapiens
LEELLLGRPGDPVGREEGGKMVLESTMVCVDNSEYMRNGDFLPTRLQAQQDAVNIVCHSKTRSNPENNVGLITLANDCEVLTTLTPDTGRILSKLHTVQPKGKITFCTGIRVAHLALKHRQGKNHKMRIIAFVGSPVEDNEKDLVKLAKRLKKEKVNVDIINFGEEEVNTEKLTAFVNTLNGKDGTGSHLVTVPPGPSLADALISSPRGG

SEQ ID NO: 908679 - protein, 195 aa, Homo sapiens
NSQMTFYFIQRYKGNYVQQQSDGQSKLLGGSKFMVNVMMVGREEGGKMVLESTMVCVDNSEYMRNGDFLPTRLQAQQDAVNIVCHSKTRSNPENNVGLITLANDCEVLTTLTPDTGRILSKLHTVQPKGKITFCTGIRVAHLALKHRQGKNHKMRIIAFVGSPVEDNEKDLVKLAKRLKKEGCTGRLVEYRKCLG

SEQ ID NO: 908680 - protein, 137 aa, Homo sapiens
TPAFTMKSSGLFPFLVLLALGTLAPWAVEGSGKSFKAGVCPPKKSAQCLRYKKPECQSDWQCPGKKRCCPDTCGIKCLDPVDTPNPTRRKPGKCPVTYGQCLMLNPPNFCEMDGQCKRDLKCCMGMCGKSCVSPVKA

SEQ ID NO: 908681 - protein, 110 aa, Homo sapiens
GTDDRRPFKAGVCPPKKSAQCLRYKKPECQSDWQCPGKKRCCPDTCGIKCLDPVDTPNPTRRKPGKCPVTYGQCLMLNPPNFCEMDGQCKRDLKCCMGMCGKSCVSPVKA

SEQ ID NO: 908682 - protein, 118 aa, Homo sapiens
MPSSKPLRDCQKCPAFKAGVCPPKKSAQCLRYKKPECQSDWQCPGKKRCCPDTCGIKCLDPVDTPNPTRRKPGKCPVTYGQCLMLNPPNFCEMDGQCKRDLKCCMGMCGKSCVSPVKA

SEQ ID NO: 908683 - protein, 137 aa, Homo sapiens; identical to SEQ ID NO: 908680

SEQ ID NO: 908684 - protein, 132 aa, Homo sapiens
MWRKDLVEGFTDARDPEGSSRLLRKLGLPLERVECIARDADLEIVGGADLKRWVDWIHTQGCVSKAESKSVKKCGGKDRDRRPQQGSGSGQEPSVGGWKGQPPGRKKCFGAGTSGGGQTRDTRNGTLYTGTT

SEQ ID NO: 908685 - protein, 137 aa, Homo sapiens; identical to SEQ ID NO: 908680

SEQ ID NO: 908686 - protein, 205 aa, Homo sapiens
KRELQMRGGRNPGEVILKRWLEFPQEAMEDFTGHWMAPGALIWSWVLEPSQAVGIWHLGCRACPPLIPRLWQPHHRSLQAASVPMQWPHSPGFEDQPCYLPAFKAGVCPPKKSAQCLRYKKPECQSDWQCPGKKRCCPDTCGIKCLDPVDTPNPTRRKPGKCPVTYGQCLMLNPPNFCEMDGQCKRDLKCCMGMCGKSCVSPVKA

SEQ ID NO: 908687 - protein, 167 aa, Homo sapiens
TPAFTMKSSGLFPFLVLLALGTLAPWAVEGSGKSFKAGVCPPKKSAQCLRYKKPECQSDWQCPGKKRCCPDTCGIKCLDPVDTPNPTRRKPGKCPVTYGQCLMLNPPNFCEMDGQCKRDLKCCMGMCGKSCVSPVKGCFSPSISPSHFFTMSSISTFSAVLRTSASS

SEQ ID NO: 908688 - protein, 170 aa, Homo sapiens
TPAFTMKSSGLFPFLVLLALGTLAPWAVEGSGKSFKAGVCPPKKSAQCLRYKKPECQSDWQCPGKKRCCPDTCGIKCLDPVDTPNPTRRKPGKCPVTYGQCLMLNPPNFCEMDGQCKRDLKCCMGMCGKGYRSTGGFAVPKVCTAVCVCVMEAQGEQDQASVCGVWCVCF

SEQ ID NO: 908689 - protein, 1250 aa, Homo sapiens
KSRICESPGGSAAAAVRRPGAEPPVAQPLRARAWAGRERPEQRQEPEAGAEEECDQGSAGAREYARAGMGQQVGRVGEAPGLQQPQPRGIRGSSAARPSGRRRDPAGRTTETGFNIFTQHDHFASCVEDGFEGDKTGGSSPEALHRPYGCDVEPQALNEAIRWSSKENLLGATESDPNLFVALYDFVASGDNTLSITKGEKLRVLGYNQNGEWSEVRSKNGQGWVPSNYITPVNSLEKHSWYHGPVSRSAAEYLLSSLINGSFLVRESESSPGQLSISLRYEGRVYHYRINTTADGKVYVTAESRFSTLAELVHHHSTVADGLVTTLHYPAPKCNKPTVYGVSPIHDKWEMERTDITMKHKLGGGQYGEVYVGVWKKYSLTVAVKTLKEDTMEVEEFLKEAAVMKEIKHPNLVQLLGVCTLEPPFYIVTEYMPYGNLLDYLRECNREEVTAVVLLYMATQISSAMEYLEKKNFIHRDLAARNCLVGENHVVKVADFGLSRLMTGDTYTAHAGAKFPIKWTAPESLAYNTFSIKSDVWAFGVLLWEIATYGMSPYPGIDLSQVYDLLEKGYRMEQPEGCPPKVYELMRACWKWSPADRPSFAETHQAFETMFHDSSISEEVAEELGRAASSSSVVPYLPRLPILPSKTRTLKKQVENKENIEGAQDATENSASSLAPGFIRGAQASSGSPALPRKQRDKSPSSLLEDAKETCFTRDRKGGFFSSFMKKRNAPTPPKRSSSFREMENQPHKKYELTGNFSSVASLQHADGFSFTPAQQEANLVPPKCYGGSFAQRNLCNDDGGGGGGSGTAGGGWSGITGFFTPRLIKKTLGLRAGKPTASDDTSKPFPRSNSTSSMSSGLPEQDRMAMTLPRNCQRSKLQLERTVSTSSQPEENVDRANDMLPKKSEESAAPSRERPKAKLLPRGATALPLRTPSGDLAITEKDPPGVGVAGVAAAPKGKEKNGGARLGMAGVPEDGEQPGWPSPAKAAPVLPTTHNHKVPVLISPTLKHTPADVQLIGTDSQGNKFKLLSEHQVTSSGDKDRPRRVKPKCAPPPPPVMRLLQHPSICSDPTEEPTALTAGQSTSETQEGGKKAALGAVPISGKAGRPVMPPPQVPLPTSSISPAKMANGTAGTKVALRKTKQAAEKISADKISKEALLECADLLSSALTEPVPNSQLVDTGHQLLDYCSGYVDCIPQTRNKFAFREAVSKLELSLQELQVSSAAAGVPGTNPVLNNLLSCVQEISDVVQR

SEQ ID NO: 908690 - protein, 1150 aa, Homo sapiens
LGRGMVLGTVLLPPNSYGRDQDTSLCCLCTEASESALPDLTEALHRPYGCDVEPQALNEAIRWSSKENLLGATESDPNLFVALYDFVASGDNTLSITKGEKLRVLGYNQNGEWSEVRSKNGQGWVPSNYITPVNSLEKHSWYHGPVSRSAAEYLLSSLINGSFLVRESESSPGQLSISLRYEGRVYHYRINTTADGKVYVTAESRFSTLAELVHHHSTVADGLVTTLHYPAPKCNKPTVYGVSPIHDKWEMERTDITMKHKLGGGQYGEVYVGVWKKYSLTVAVKTLKEDTMEVEEFLKEAAVMKEIKHPNLVQLLGVCTLEPPFYIVTEYMPYGNLLDYLRECNREEVTAVVLLYMATQISSAMEYLEKKNFIHRDLAARNCLVGENHVVKVADFGLSRLMTGDTYTAHAGAKFPIKWTAPESLAYNTFSIKSDVWAFGVLLWEIATYGMSPYPGIDLSQVYDLLEKGYRMEQPEGCPPKVYELMRACWKWSPADRPSFAETHQAFETMFHDSSISEEVAEELGRAASSSSVVPYLPRLPILPSKTRTLKKQVENKENIEGAQDATENSASSLAPGFIRGAQASSGSPALPRKQRDKSPSSLLEDAKETCFTRDRKGGFFSSFMKKRNAPTPPKRSSSFREMENQPHKKYELTGNFSSVASLQHADGFSFTPAQQEANLVPPKCYGGSFAQRNLCNDDGGGGGGSGTAGGGWSGITGFFTPRLIKKTLGLRAGKPTASDDTSKPFPRSNSTSSMSSGLPEQDRMAMTLPRNCQRSKLQLERTVSTSSQPEENVDRANDMLPKKSEESAAPSRERPKAKLLPRGATALPLRTPSGDLAITEKDPPGVGVAGVAAAPKGKEKNGGARLGMAGVPEDGEQPGWPSPAKAAPVLPTTHNHKVPVLISPTLKHTPADVQLIGTDSQGNKFKLLSEHQVTSSGDKDRPRRVKPKCAPPPPPVMRLLQHPSICSDPTEEPTALTAGQSTSETQEGGKKAALGAVPISGKAGRPVMPPPQVPLPTSSISPAKMANGTAGTKVALRKTKQAAEKISADKISKEALLECADLLSSALTEPVPNSQLVDTGHQLLDYCSGYVDCIPQTRNKFAFREAVSKLELSLQELQVSSAAAGVPGTNPVLNNLLSCVQEISDVVQR

SEQ ID NO: 908691 - protein, 1006 aa, Homo sapiens
LGRGMVLGTVLLPPNSYGRDQDTSLCCLCTEASESALPDLTDHFASCVEDGFEGDKTGGSSPEALHRPYGCDVEPQALNEAIRWSSKENLLGATESDPNLFVALYDFVASGDNTLSITKGEKLRVLGYNQNGEWSEVRSKNGQGWVPSNYITPVNSLEKHSWYHGPVSRSAAEYLLSSLINGSFLVRESESSPGQLSISLRYEGRVYHYRINTTADGKVYVTAESRFSTLAELVHHHSTVADGLVTTLHYPAPKCNKPTVYGVSPIHDKWEMERTDITMKHKLGGGQYGEVYVGVWKKYSLTVAVKTLKEDTMEVEEFLKEAAVMKEIKHPNLVQLLGVCTLEPPFYIVTEYMPYGNLLDYLRECNREEVTAVVLLYMATQISSAMEYLEKKNFIHSFWGIVWEIATYGMSPYPGIDLSQVYDLLEKGYRMEQPEGCPPKVYELMRACWKWSPADRPSFAETHQAFETMFHDSSISEEVAEELGRAASSSSVVPYLPRLPILPSKTRTLKKQVENKENIEGAQDATENSASSLAPGFIRGAQASSGSPALPRKQRDKSPSSLLEDAKETCFTRDRKGGFFSSFMKKRNAPTPPKRSSSFREMENQPHKKYELTGLPEQDRMAMTLPRNCQRSKLQLERTVSTSSQPEENVDRANDMLPKKSEESAAPSRERPKAKLLPRGATALPLRTPSGDLAITEKDPPGVGVAGVAAAPKGKEKNGGARLGMAGVPEDGEQPGWPSPAKAAPVLPTTHNHKVPVLISPTLKHTPADVQLIGTDSQGNKFKLLSEHQVTSSGDKDRPRRVKPKCAPPPPPVMRLLQHPSICSDPTEEPTALTAGQSTSETQEGGKKAALGAVPISGKAGRPVMPPPQVPLPTSSISPAKMANGTAGTKVALRKTKQAAEKISADKISKEALLECADLLSSALTEPVPNSQLVDTGHQLLDYCSGYVDCIPQTRNKFAFREAVSKLELSLQELQVSSAAAGVPGTNPVLNNLLSCVQEISDVVQR

SEQ ID NO: 908692 - protein, 1109 aa, Homo sapiens
LGRGMVLGTVLLPPNSYGRDQDTSLCCLCTEASESALPDLTDHFASCVEDGFEGDKTGGSSPEALHRPYGCDVEPQALNEAIRWSSKENLLGATESDPNLFVALYDFVASGDNTLSITKGEKLRVLGYNQNGEWSEVRSKNGQGWVPSNYITPVNSLEKHSWYHGPVSRSAAEYLLSSLINGSFLVRESESSPGQLSISLRYEGRVYHYRINTTADGKVYVTAESRFSTLAELVHHHSTVADGLVTTLHYPAPKCNKPTVYGVSPIHDKWEMERTDITMKHKLGGGQYGEVYVGVWKKYSLTVAVKTLKEDTMEVEEFLKEAAVMKEIKHPNLVQLLGVCTLEPPFYIVTEYMPYGNLLDYLRECNREEVTAVVLLYMATQISSAMEYLEKKNFIHSFWGIVWEIATYGMSPYPGIDLSQVYDLLEKGYRMEQPEGCPPKVYELMRACWKWSPADRPSFAETHQAFETMFHDSSISEEVAEELGRAASSSSVVPYLPRLPILPSKTRTLKKQVENKENIEGAQDATENSASSLAPGFIRGAQASSGSPALPRKQRDKSPSSLLEDAKETCFTRDRKGGFFSSFMKKRNAPTPPKRSSSFREMENQPHKKYELTGNFSSVASLQHADGFSFTPAQQEANLVPPKCYGGSFAQRNLCNDDGGGGGGSGTAGGGWSGITGFFTPRLIKKTLGLRAGKPTASDDTSKPFPRSNSTSSMSSGLPEQDRMAMTLPRNCQRSKLQLERTVSTSSQPEENVDRANDMLPKKSEESAAPSRERPKAKLLPRGATALPLRTPSGDLAITEKDPPGVGVAGVAAAPKGKEKNGGARLGMAGVPEDGEQPGWPSPAKAAPVLPTTHNHKVPVLISPTLKHTPADVQLIGTDSQGNKFKLLSEHQVTSSGDKDRPRRVKPKCAPPPPPVMRLLQHPSICSDPTEEPTALTAGQSTSETQEGGKKAALGAVPISGKAGRPVMPPPQVPLPTSSISPAKMANGTAGTKVALRKTKQAAEKISADKISKEALLECADLLSSALTEPVPNSQLVDTGHQLLDYCSGYVDCIPQTRNKFAFREAVSKLELSLQELQVSSAAAGVPGTNPVLNNLLSCVQEISDVVQR

SEQ ID NO: 908693 - protein, 112 aa, Homo sapiens
TKTQASSSFQDSSQPAGKKKGHSRTLTRICTMGRKLDPTKEKRGPGRKARKQKGAETELVRFLPAVSDENSKRLSSRARKRAAKRRLGSVEAPKTNKSPEAKPLPGKLPKGP

SEQ ID NO: 908694 - protein, 812 aa, Homo sapiens
MGRKLDPTKEKRGPGRKARKQKGAETELVRFLPAVSDENSKRLSSRARKRAAKRRLGSVEAPKTNKSPEAKPLPGKLPKGISAGAVQTAGKKGPQSLFNAPRGKKRPAPGSDEEEEEEDSEEDGMVNHGDLWGSEDDADTVDDYGADSNSEDEEEGEALLPIERAARKQKAREAAAGIQWSEEETEDEEEEKEVTPESGPPKVEEADGGLQINVDEEPFVLPPAGEMEQDAQAPDLQRVHKRIQDIVGILRDFGAQREEGRSRSEYLNRLKKDLAIYYSYGDFLLGKLMDLFPLSELVEFLEANEVPRPVTLRTNTLKTRRRDLAQALINRGVNLDPLGKWSKTGLVVYDSSVPIGATPEYLAGHYMLQGASSMLPVMALAPQEHERILDMCCAPGGKTSYMAQLMKNTGVILANDANAERLKSVVGNLHRLGVTNTIISHYDGRQFPKVVGGFDRVLLDAPCSGTGVISKDPAVKTNKDEKDILRCAHLQKELLLSAIDSVNATSKTGGYLVYCTCSITVEENEWVVDYALKKRNVRLVPTGLDFGQEGFTRFRERRFHPSLRSTRRFYPHTHNMDGFFIAKFKKFSNSIPQSQTGNSETATPTNVDLPQVIPKSENSSQPAKKAKGAAKTKQQLQKQQHPKKASFQKLNGISKGADSELSTVPSVTKTQASSSFQDSSQPAGKAEGIREPKVTGKLKQRSPKLQSSKKVAFLRQNAPPKGTDTQTPAVLSPSKTQATLKPKDHHQPLGRAKGVEKQQLPEQPFEKAAFQKQNDTPKGPQPPTVSPIRSSRPPPAKRKKSQSRGNSQLLLS

SEQ ID NO: 908695 - protein, 845 aa, Homo sapiens
MGRKLDPTKEKRGPGRKARKQKGAETELVRFLPAVSDENSKRLSSRARKRAAKRRLGSVEAPKTNKSPEAKPLPGKLPKGISAGAVQTAGKKGPQSLFNAPRGKKRPAPGSDEEEEEEDSEEDGMVNHGDLWGSEDDADTVDDYGADSNSEDEEEGEALLPIERAARKQKAREAAAGIQWSEEETEDEEEEKEVTPESGPPKVEEADGGLQINVDEEPFVLPPAGEMEQDILAGQSEELGGRWLGEGFPGLRTSCHSSLTGPHAQAPDLQRVHKRIQDIVGILRDFGAQREEGRSRSEYLNRLKKDLAIYYSYGDFLLGKLMDLFPLSELVEFLEANEVPRPVTLRTNTLKTRRRDLAQALINRGVNLDPLGKWSKTGLVVYDSSVPIGATPEYLAGHYMLQGASSMLPVMALAPQEHERILDMCCAPGGKTSYMAQLMKNTGVILANDANAERLKSVVGNLHRLGVTNTIISHYDGRQFPKVVGGFDRVLLDAPCSGTGVISKDPAVKTNKDEKDILRCAHLQKELLLSAIDSVNATSKTGGYLVYCTCSITVEENEWVVDYALKKRNVRLVPTGLDFGQEGFTRFRERRFHPSLRSTRRFYPHTHNMDGFFIAKFKKFSNSIPQSQTGNSETATPTNVDLPQVIPKSENSSQPAKKAKGAAKTKQQLQKQQHPKKASFQKLNGISKGADSELSTVPSVTKTQASSSFQDSSQPAGKAEGIREPKVTGKLKQRSPKLQSSKKVAFLRQNAPPKGTDTQTPAVLSPSKTQATLKPKDHHQPLGRAKGVEKQQLPEQPFEKAAFQKQNDTPKGPQPPTVSPIRSSRPPPAKRKKSQSRGNSQLLLS

SEQ ID NO: 908696 - protein, 894 aa, Homo sapiens
MGRKLDPTKEKRGPGRKARKQKGAETELVRFLPAVSDENSKRLSSRARKRAAKRRLGSVEAPKTNKSPEAKPLPGKLPKGISAGAVQTAGKKGPQSLFNAPRGKKRPAPGSDEEEEEEDSEEDGMVNHGDLWGSEDDADTVDDYGADSNSEDEEEGEALLPIERAARKQKAREAAAGIQWSEEETEDEEEEKEVTPESGPPKVEEADGGLQINVDEEPFVLPPAGEMEQDAQAPDLQRVHKRIQDIVGILRDFGAQREEGRSRSEYLNRLKKDLAIYYSYGDFLLGKLMDLFPLSELVEFLEANEVPRPVTLRTNTLKTRRRDLAQALINRGVNLDPLGKWSKTGLVVYDSSVPIGATPEYLAGHYMLQGASSMLPVMALAPQEHERILDMCCAPGGKTSYMAQLMKNTGVILANDANAERLKSVVGNLHRLGVTNTIISHYDGRQFPKVVGGFDRVLLDAPCSGTGVISKDPAVKTNKVRSQVVAPERPWLGLVELETEMGTPSGLPSPPEAALGLFLGQDEKDILRCAHLQKELLLSAIDSVNATSKTGGYLVYCTCSITVRPLPWQSRGGWAGGLFAPESSLQLQLCFFLRSLSSPHIQVEENEWVVDYALKKRNVRLVPTGLDFGQEGFTRFRERRFHPSLRSTRRFYPHTHNMDGFFIAKFKKFSNSIPQSQTGNSETATPTNVDLPQVIPKSENSSQPAKKAKGAAKTKQQLQKQQHPKKASFQKLNGISKGADSELSTVPSVTKTQASSSFQDSSQPAGKAEGIREPKVTGKLKQRSPKLQSSKKVAFLRQNAPPKGTDTQTPAVLSPSKTQATLKPKDHHQPLGRAKGVEKQQLPEQPFEKAAFQKQNDTPKGPQPPTVSPIRSSRPPPAKRKKSQSRGNSQLLLS

SEQ ID NO: 908697 - protein, 237 aa, Homo sapiens [sequence omitted]

SEQ ID NO: 908698 - protein, 83 aa, Homo sapiens
RKRRGREASATRAPAWNDSVASAGRKLGPDCTWRAARRALSDINPHSVPWGASWTLRRRSGGQAERPGSRRVPRQNSSDSCLQ

SEQ ID NO: 908699 - protein, 83 aa, Homo sapiens; identical to SEQ ID NO: 908698

SEQ ID NO: 908700 - protein, 812 aa, Homo sapiens; identical to SEQ ID NO: 908694

SEQ ID NO: 908701 - protein, 812 aa, Homo sapiens; identical to SEQ ID NO: 908694

SEQ ID NO: 908702 - protein, 852 aa, Homo sapiens
MGRKLDPTKEKRGPGRKARKQKGAETELVRFLPAVSDENSKRLSSRARKRAAKRRLGSVEAPKTNKSPEAKPLPGKLPKGISAGAVQTAGKKGPQSLFNAPRGKKRPAPGSDEEEEEEDSEEDGMVNHGDLWGSEDDADTVDDYGADSNSEDEEEGEALLPIERAARKQKAREAAAGIQWSEEETEDEEEEKEVTPESGPPKVEEADGGLQINVDEEPFVLPPAGEMEQDAQAPDLQRVHKRIQDIVGILRDFGAQREEGRSRSEYLNRLKKDLAIYYSYGDFLLGKLMDLFPLSELVEFLEANEVPRPVTLRTNTLKTRRRDLAQALINRGVNLDPLGKWSKTGLVVYDSSVPIGATPEYLAGHYMLQGASSMLPVMALAPQEHERILDMCCAPGGKTSYMAQLMKNTGVILANDANAERLKSVVGNLHRLGVTNTIISHYDGRQFPKVVGGFDRVLLDAPCSGTGVISKDPAVKTNKDEKDILRCAHLQKELLLSAIDSVNATSKTGGYLVYCTCSITVRPLPWQSRGGWAGGLFAPESSLQLQLCFFLRSLSSPHIQVEENEWVVDYALKKRNVRLVPTGLDFGQEGFTRFRERRFHPSLRSTRRFYPHTHNMDGFFIAKFKKFSNSIPQSQTGNSETATPTNVDLPQVIPKSENSSQPAKKAKGAAKTKQQLQKQQHPKKASFQKLNGISKGADSELSTVPSVTKTQASSSFQDSSQPAGKAEGIREPKVTGKLKQRSPKLQSSKKVAFLRQNAPPKGTDTQTPAVLSPSKTQATLKPKDHHQPLGRAKGVEKQQLPEQPFEKAAFQKQNDTPKGPQPPTVSPIRSSRPPPAKRKKSQSRGNSQLLLS

SEQ ID NO: 908703 - protein, 656 aa, Homo sapiens
MALLPIERAARKQKAREAAAGIQWSEEETEDEEEEKEVTPESGPPKVEEADGGLQINVDEEPFVLPPAGEMEQDAQAPDLQRVHKRIQDIVGILRDFGAQREEGRSRSEYLNRLKKDLAIYYSYGDFLLGKLMDLFPLSELVEFLEANEVPRPVTLRTNTLKTRRRDLAQALINRGVNLDPLGKWSKTGLVVYDSSVPIGATPEYLAGHYMLQGASSMLPVMALAPQEHERILDMCCAPGGKTSYMAQLMKNTGVILANDANAERLKSVVGNLHRLGVTNTIISHYDGRQFPKVVGGFDRVLLDAPCSGTGVISKDPAVKTNKDEKDILRCAHLQKELLLSAIDSVNATSKTGGYLVYCTCSITVEENEWVVDYALKKRNVRLVPTGLDFGQEGFTRFRERRFHPSLRSTRRFYPHTHNMDGFFIAKFKKFSNSIPQSQTGNSETATPTNVDLPQVIPKSENSSQPAKKAKGAAKTKQQLQKQQHPKKASFQKLNGISKGADSELSTVPSVTKTQASSSFQDSSQPAGKAEGIREPKVTGKLKQRSPKLQSSKKVAFLRQNAPPKGTDTQTPAVLSPSKTQATLKPKDHHQPLGRAKGVEKQQLPEQPFEKAAFQKQNDTPKGPQPPTVSPIRSSRPPPAKRKKSQSRGNSQLLLS

SEQ ID NO: 908704 - protein, 236 aa, Homo sapiens
MGRKLDPTKEKRGPGRKARKQKGAETELVRFLPAVSDENSKRLSSRARKRAAKRRLGSVEAPKTNKSPEAKPLPGKLPKGISAGAVQTAGKKGPQSLFNAPRGKKRPAPGSDEEEEEEDSEEDGMVNHGDLWGSEDDADTVDDYGADSNSEDEEEGEALLPIERAARKQKAREAAAGIQWSEEETEDEEEEKEVTPESGPPKVEEADGGLQINVDGRAPLDGRAPLDGRAPLDGRA

SEQ ID NO: 908705 - protein, 102 aa, Homo sapiens
MGRKLDPTKEKRGPGRKARKQKGAETELVRFLPAVSDENSKRLSSRARKRAAKRRLGSVEAPKTNKSPEAKPLPGKLPKGISAGAVQTAGKKGPQSLFNAPL

SEQ ID NO: 908706 - protein, 235 aa, Homo sapiens
PSRYRYGNRLGGAISGCVDRTGVGTRPSAFPHSHIPAGRERSGEELHLPPAEISKNLQKCIPWYRFGLRWDQAKFRDRNGCALRPRVRVWTASSVVDESEEQDSPQPSPSPSPSPAASPAVTLRAAGGAWGSWTEEDYACPWAEKGGDSGGRGQGRMQALRVSQALIRSFSSTARNRFQNRVREKQKLFQEDNDIPLYLKGGIVDNILYRVTMTLCLGGTVYSLYSLGWASFPRN

SEQ ID NO: 908707 - protein, 276 aa, Homo sapiens
PSRYRYGNRLGGAISGCVDRTGVGTRPSAFPHSHIPAGRERSGEELHLPPAEISKNLQKCIPWYRFGLRWDQAKFRDRNGCALRPRVRVWTASSVVDESEEQDSPQPSPSPSPSPAASPAVTLRAAGGAWGSWTEEDYACPWAEKGGDSGGRGQGRMQALRVSQALIRSFSSTARNRFQNRVREKQKLFQVGGAGGVGIRRASRERAEPGQAGRALRSSQHPFLIRHPHIQEDNDIPLYLKGGIVDNILYRVTMTLCLGGTVYSLYSLGWASFPRN

SEQ ID NO: 908708 - protein, 235 aa, Homo sapiens; identical to SEQ ID NO: 908706

SEQ ID NO: 908709 - protein, 250 aa, Homo sapiens
PSRYRYGNRLGGAISGCVDRTGVGTRPSAFPHSHIPAGRERSGEELHLPPAEISKNLQKCIPWYRFGLRWDQAKFRDRNGCALRPRVRVWTASSVVDESEEQDSPQPSPSPSPSPAASPAVTLRAAGGAWGSWTEEDYACPWAEKGGDSGGRGQGRMQALRVSQALIRSFSSTARNRFQNRVREKQKLFQEDNDIPLYLKGGIVDNILYRVTMTLCLGGTVYSFVLLCWPTSQELDKRLRAEDIYSLITW

SEQ ID NO: 908710 - protein, 114 aa, Homo sapiens
RPPRTKSFWVLSLPGPSRQPGHPQARLQGESPPNPAGSSRVSQALIRSFSSTARNRFQNRVREKQKLFQEDNDIPLYLKGGIVDNILYRVTMTLCLGGTVYSLYSLGWASFPRN

SEQ ID NO: 908711 - protein, 318 aa, Homo sapiens
PSRYRYGNRLGGAISGCVDRTGVGTRPSAFPHSHIPAGRERSGEELHLPPAEISKNLQKCIPWYRFGLRWDQAKFRDRNGCALRPRVRVWTASSVVDESEEQDSPQPSPSPSPSPAASPAVTLRAAGGAWGSWTEEDYACPWAEKGGDSGGRGQGRMQALRVSQALIRSFSSTARNRFQNRVREKQKLFQEDNDIPLYLKGGIVDNILYRVTMTLCLGGTVYSLYSQEKLEQAEKKATDAEGRCGLPEPAHSAWLREELDRAQGSRLGYRPLQKLEEAEKAADESERGHEGHSKNRGHAGLRRKMELQEMQAEGGQAH

SEQ ID NO: 908712 - protein, 226 aa, Homo sapiens
PSRYRYGNRLGGAISGCVDRTGVGTRPSAFPHSHIPAGRERSGEELHLPPAEISKNLQKCIPWYRFGLRWDQAKFRDRNGCALRPRVRVWTASSVVDESEEQDSPQPSPSPSPSPAASPAVTLRAAGGAWGSWTEEDYACPWAEKGGDSGGRGQGRMQALRVSQALIRSFSSTARNRFQNREDNDIPLYLKGGIVDNILYRVTMTLCLGGTVYSLYSLGWASFPRN

SEQ ID NO: 908713 - protein, 413 aa, Homo sapiens
MKEVVYWSPKKVADWLLENAMPEYCEPLEHFTGQDLINLTQEDFKKPPLCRVSSDNGQRLLDMIETLKMEHHLEAHKNGHANGHLNIGVDIPTPDGSFSIKIKPNGMPNGYRKEMIKIPMPELERSQYPMEWGKTFLAFLYALSCFVLTTVMISVVHERVPPKEVQPPLPDTFFDHFNRVQWAFSICEINGMILVGLWLIQWLLLKYKSIISRRFFCIVGTLYLYRCITMYVTTLPVPGMHFNCSPKLFGDWEAQLRRIMKLIAGGGLSITGSHNMCGDYLYSGHTVMLTLTYLFIKEYSPRRLWWYHWICWLLSVVGIFCILLAHDHYTVDVVVAYYITTRLFWWYHTMANQQVLKEASQMNLLARVWWYRPFQYFEKNVQGIVPRSYHWPFPWPVVHLSRQVKYSRLVNDT

SEQ ID NO: 908714 - protein, 413 aa, Homo sapiens; identical to SEQ ID NO: 908713

SEQ ID NO: 908715 - protein, 413 aa, Homo sapiens; identical to SEQ ID NO: 908713

SEQ ID NO: 908716 - protein, 208 aa, Homo sapiens [sequence omitted]

SEQ ID NO: 908717 - protein, 413 aa, Homo sapiens; identical to SEQ ID NO: 908713

SEQ ID NO: 908718 - protein, 413 aa, Homo sapiens; identical to SEQ ID NO: 908713

SEQ ID NO: 908719 - protein, 87 aa, Homo sapiens
RGGKSKAFAPAGQRLRAAGGGQVGSEKDRPGLTALPSRLGSRSESAIGVRSPDAALPRISFRGGGSASGIPAAAVTPVQRDDSMYDP

SEQ ID NO: 908720 - protein, 205 aa, Homo sapiens
MDGDSSTTDASQLGISADYIGGSHYVIQPHDDTEDSMNDHEDTNGSKESFREQDIYLPIANVARIMKNAIPQTGKIAKDAKECVQECVSEFISFITSEASERCHQEKRKTINGEDILFAMSTLGFDSYVEPLKLYLQKFREAMKGEKGIGGAVTATDGLSEELTEEAFTNQLPAGLITTDGQQQNVMVYTTSYQQISGVQQIQFS

SEQ ID NO: 908721 - protein, 205 aa, Homo sapiens; identical to SEQ ID NO: 908720

SEQ ID NO: 908722 - protein, 205 aa, Homo sapiens; identical to SEQ ID NO: 908720

SEQ ID NO: 908723 - protein, 205 aa, Homo sapiens; identical to SEQ ID NO: 908720

SEQ ID NO: 908724 - protein, 207 aa, Homo sapiens
MTMDGDSSTTDASQLGISADYIGGSHYVIQPHDDTEDSMNDHEDTNGSKESFREQDIYLPIANVARIMKNAIPQTGKIAKDAKECVQECVSEFISFITSEASERCHQEKRKTINGEDILFAMSTLGFDSYVEPLKLYLQKFREAMKGEKGIGGAVTATDGLSEELTEEAFTNQLPAGLITTDGQQQNVMVYTTSYQQISGVQQIQFS

SEQ ID NO: 908725 - protein, 205 aa, Homo sapiens; identical to SEQ ID NO: 908720

SEQ ID NO: 908726 - protein, 189 aa, Homo sapiens
MTMDGDSSTTDASQLGISADYIGGSHYVIQPHDDTEDSMNDHEDTNGSKESFREQDIYLPIANVARIMKKCVSEFISFITSEASERCHQEKRKTINGEDILFAMSTLGFDSYVEPLKLYLQKFREAMKGEKGIGGAVTATDGLSEELTEEAFTNQLPAGLITTDGQQQNVMVYTTSYQQISGVQQIQFS

SEQ ID NO: 908727 - protein, 205 aa, Homo sapiens; identical to SEQ ID NO: 908720

SEQ ID NO: 908728 - protein, 205 aa, Homo sapiens; identical to SEQ ID NO: 908720

SEQ ID NO: 908729 - protein, 207 aa, Homo sapiens; identical to SEQ ID NO: 908724

SEQ ID NO: 908730 - protein, 208 aa, Homo sapiens
MNLMDGDSSTTDASQLGISADYIGGSHYVIQPHDDTEDSMNDHEDTNGSKESFREQDIYLPIANVARIMKNAIPQTGKIAKDAKECVQECVSEFISFITSEASERCHQEKRKTINGEDILFAMSTLGFDSYVEPLKLYLQKFREAMKGEKGIGGAVTATDGLSEELTEEAFTNQLPAGLITTDGQQQNVMVYTTSYQQISGVQQIQFS

SEQ ID NO: 908731 - protein, 1320 aa, Homo sapiens
AAASASQTRSGGGSEAGVRGGWAGSPSGGRSAVPPLPTPAPSRPPAPFPSGRSLNRARLAVLRGAAGKDGRGAAVRVASPPLQPLPAYPDPRGYGNVMEPPVITEQSPRRLVVFPTDDISLKCEASGKPEVQFRWTRDGVHFKPKEELGVTVYQSPHSGSFTITGNNSNFAQRFQGIYRCFASNKLGTAMSHEIRLMAEGAPKWPKETVKPVEVEEGESVVLPCNPPPSAEPLRIYWMNSKILHIKQDERVTMGQNGNLYFANVLTSDNHSDYICHAHFPGTRTIIQKEPIDLRVKATNSMIDRKPRLLFPTNSSSHLVALQGQPLVLECIAEGFPTPTIKWLRPSGPMPADRVTYQNHNKTLQLLKVGEEDDGEYRCLAENSLGSARHAYYVTVEAAPYWLHKPQSHLYGPGETARLDCQVQGRPQPEVTWRINGIPVEELAKDQKYRIQRGALILSNVQPSDTMVTQCEARNRHGLLLANAYIYVVQLPAKILTADNQTYMAVQGSTAYLLCKAFGAPVPSVQWLDEDGTTVLQDERFFPYANGTLGIRDLQANDTGRYFCLAANDQNNVTIMANLKVKDATQITQGPRSTIEKKGSRVTFTCQASFDPSLQPSITWRGDGRDLQELGDSDKYFIEDGRLVIHSLDYSDQGNYSCVASTELDVVESRAQLLVVGSPGPVPRLVLSDLHLLTQSQVRVSWSPAEDHNAPIEKYDIEFEDKEMAPEKWYSLGKVPGNQTSTTLKLSPYVHYTFRVTAINKYGPGEPSPVSETVVTPEAAPEKNPVDVKGEGNETTNMVITWKPLRWMDWNAPQVQYRVQWRPQGTRGPWQEQIVSDPFLVVSNTSTFVPYEIKVQAVNSQGKGPEPQVTIGYSGEDYPQAIPELEGIEILNSSAVLVKWRPVDLAQVKGHLRGYNVTYWREGSQRKHSKRHIHKDHVVVPANTTSVILSGLRPYSSYHLEVQAFNGRGSGPASEFTFSTPEGVPGHPEALHLECQSNTSLLLRWQPPLSHNGVLTGYVLSYHPLDEGGKGQLSFNLRDPELRTHNLTDLSPHLRYRFQLQATTKEGPGEAIVREGGTMALSGISDFGNISATAGENYSVVSWVPKEGQCNFRFHILFKALGEEKGGASLSPQYVSYNQSSYTQWDLQPDTDYEIHLFKERMFRHQMAVKTNGTGRVRLPPAGFATEGWFIGFVSAIILLLLVLLILCFIKRSKGGKYSVKDKEDTQVDSEARPMKDETFGEYSDDNEEKAFGSSQPSLNGDIKPLGSDDSLADYGGSVDVQFNEDGSFIGQYSGKKEKEAAGGNDSSGATSPINPAVALE

SEQ ID NO: 908732 - protein, 1320 aa, Homo sapiens; identical to SEQ ID NO: 908731

SEQ ID NO: 908733 - protein, 1185 aa, Homo sapiens
AAASASQTRSGGGSEAGVRGGWAGSPSGGRSAVPPLPTPAPSRPPAPFPSGRSLNRARLAVLRGAAGKDGRGAAVRVASPPLQPLPAYPDPRGYGNVMEPPVITEQSPRRLVVFPTDDISLKCEASGKPEVQFRWTRDGVHFKPKEELGVTVYQSPHSGSFTITGNNSNFAQRFQGIYRCFASNKLGTAMSHEIRLMAEVPRPPSNGCRPSGPMPADRVTYQNHNKTLQLLKVGEEDDGEYRCLAENSLGSARHAYYVTVEAAPYWLHKPQSHLYGPGETARLDCQVQGRPQPEVTWRINGIPVEELAKDQKYRIQRGALILSNVQPSDTMVTQCEARNRHGLLLANAYIYVVQLPAKILTADNQTYMAVQGSTAYLLCKAFGAPVPSVQWLDEDGTTVLQDERFFPYANGTLGIRDLQANDTGRYFCLAANDQNNVTIMANLKVKDATQITQGPRSTIEKKGSRVTFTCQASFDPSLQPSITWRGDGRDLQELGDSDKYFIEDGRLVIHSLDYSDQGNYSCVASTELDVVESRAQLLVVGSPGPVPRLVLSDLHLLTQSQVRVSWSPAEDHNAPIEKYDIEFEDKEMAPEKWYSLGKVPGNQTSTTLKLSPYVHYTFRVTAINKYGPGEPSPVSETVVTPEAAPEKNPVDVKGEGNETTNMVITWKPLRWMDWNAPQVQYRVQWRPQGTRGPWQEQIVSDPFLVVSNTSTFVPYEIKVQAVNSQGKGPEPQVTIGYSGEDYPQAIPELEGIEILNSSAVLVKWRPVDLAQVKGHLRGYNVTYWREGSQRKHSKRHIHKDHVVVPANTTSVILSGLRPYSSYHLEVQAFNGRGSGPASEFTFSTPEGVPGHPEALHLECQSNTSLLLRWQPPLSHNGVLTGYVLSYHPLDEGGKGQLSFNLRDPELRTHNLTDLSPHLRYRFQLQATTKEGPGEAIVREGGTMALSGISDFGNISATAGENYSVVSWVPKEGQCNFRFHILFKALGEEKGGASLSPQYVSYNQSSYTQWDLQPDTDYEIHLFKERMFRHQMAVKTNGTGRVRLPPAGFATEGWFIGFVSAIILLLLVLLILCFIKRSKGGKYSVKDKEDTQVDSEARPMKDETFGEYSDDNEEKAFGSSQPSLNGDIKPLGSDDSLADYGGSVDVQFNEDGSFIGQYSGKKEKEAAGGNDSSGATSPINPAVALE

SEQ ID NO: 908734 - protein, 931 aa, Homo sapiens
AALPFLPAAPYWLHKPQSHLYGPGETARLDCQVQGRPQPEVTWRINGIPVEELAKDQKYRIQRGALILSNVQPSDTMVTQCEARNRHGLLLANAYIYVVQLPAKILTADNQTYMAVQGSTAYLLCKAFGAPVPSVQWLDEDGTTVLQDERFFPYANGTLGIRDLQANDTGRYFCLAANDQNNVTIMANLKVKDATQITQGPRSTIEKKGSRVTFTCQASFDPSLQPSITWRGDGRDLQELGDSDKYFIEDGRLVIHSLDYSDQGNYSCVASTELDVVESRAQLLVVGSPGPVPRLVLSDLHLLTQSQVRVSWSPAEDHNAPIEKYDIEFEDKEMAPEKWYSLGKVPGNQTSTTLKLSPYVHYTFRVTAINKYGPGEPSPVSETVVTPEAAPEKNPVDVKGEGNETTNMVITWKPLRWMDWNAPQVQYRVQWRPQGTRGPWQEQIVSDPFLVVSNTSTFVPYEIKVQAVNSQGKGPEPQVTIGYSGEDYPQAIPELEGIEILNSSAVLVKWRPVDLAQVKGHLRGYNVTYWREGSQRKHSKRHIHKDHVVVPANTTSVILSGLRPYSSYHLEVQAFNGRGSGPASEFTFSTPEGVPGHPEALHLECQSNTSLLLRWQPPLSHNGVLTGYVLSYHPLDEGGKGQLSFNLRDPELRTHNLTDLSPHLRYRFQLQATTKEGPGEAIVREGGTMALSGISDFGNISATAGENYSVVSWVPKEGQCNFRFHILFKALGEEKGGASLSPQYVSYNQSSYTQWDLQPDTDYEIHLFKERMFRHQMAVKTNGTGRVRLPPAGFATEGWFIGFVSAIILLLLVLLILCFIKRSKGGKYSVKDKEDTQVDSEARPMKDETFGEYSDDNEEKAFGSSQPSLNGDIKPLGSDDSLADYGGSVDVQFNEDGSFIGQYSGKKEKEAAGGNDSSGATSPINPAVALE

SEQ ID NO: 908735 - protein, 1293 aa, Homo sapiens
AAASASQTRSGGGSEAGVRGGWAGSPSGGRSAVPPLPTPAPSRPPAPFPSGRSLNRARLAVLRGAAGKDGRGAAVRVASPPLQPLPAYPDPRGYGNVMEPPVITEQSPRRLVVFPTDDISLKCEASGKPEVQFRWTRDGVHFKPKEELGVTVYQSPHSGSFTITGNNSNFAQRFQGIYRCFASNKLGTAMSHEIRLMAEGAPKWPKETVKPVEVEEGESVVLPCNPPPSAEPLRIYWMNSKILHIKQDERVTMGQNGNLYFANVLTSDNHSDYICHAHFPGTRTIIQKEPIDLRVKATNSMIDRKPRLLFPTNSSSHLVALQGQPLVLECIAEGFPTPTIKWLRPSGPMPADRVTYQNHNKTLQLLKVGEEDDGEYRCLAENSLGSARHAYYVTVEAAPYWLHKPQSHLYGPGETARLDCQVQGRPQPEVTWRINGIPVEELAKDQKYRIQRGALILSNVQPSDTMVTQCEARNRHGLLLANAYIYVVQLPAKILTADNQTYMAVQGSTAYLLCKAFGAPVPSVQWLDEDGTTVLQDERFFPYANGTLGIRDLQANDTGRYFCLAANDQNNVTIMANLKVKDATQITQGPRSTIEKKGSRVTFTCQASFDPSLQPSITWRGDGRDLQELGDSDKYFIEDGRLVIHSLDYSDQGNYSCVASTELDVVESRAQLLVVGSPGPVPRLVLSDLHLLTQSQVRVSWSPAEDHNAPIEKYDIEFEDKEMAPEKWYSLGKVPGNQTSTTLKLSPYVHYTFRVTAINKYGPGEPSPVSETVVTPEAAPEKNPVDVKGEGNETTNMVITWKPLRWMDWNAPQVQYRVQWRPQGTRGPWQEQIVSDPFLVVSNTSTFVPYEIKVQAVNSQGKGPEPQVTIGYSGEDYPQAIPELEGIEILNSSAVLVKWRPVDLAQVKGHLRGYNVTYWREGSQRKHSKRHIHKDHVVVPANTTSVILSGLRPYSSYHLEVQAFNGRGSGPASEFTFSTPEGVPGHPEALHLECQSNTSLLLRWQPPLSHNGVLTGYVLSYHPLDEGGKGQLSFNLRDPELRTHNLTDLSPHLRYRFQLQATTKEGPGEAIVREGGTMALSGISDFGNISATAGENYSVVSWVPKEGQCNFRFHILFKALGEEKGGASLSPQYVSYNQSSYTQWDLQPDTDYEIHLFKERMFRHQMAVKTNGTGRVRLPPAGFATEGWFIGFVSAIILLLLVLLILCFIKRSKGGKYSVKDKEDTQVDSEARPMKDETFGEYSDFGTHHTTSKWPPSLPGCGAGTPPPTAHWPASSSRPHPPGPLSSPALPIV

SEQ ID NO: 908736 - protein, 1130 aa, Homo sapiens
AAASASQTRSGGGSEAGVRGGWAGSPSGGRSAVPPLPTPAPSRPPAPFPSGRSLNRARLAVLRGAAGKDGRGAAVRVASPPLQPLPAYPDPRGYGNVMEPPVITEQSPRRLVVFPTDDISLKCEASGKPEVQFRWTRDGVHFKPKEELGVTVYQSPHSGSFTITGNNSNFAQRFQGIYRCFASNKLGTAMSHEIRLMAEGAPKWPKETVKPVEVEEGESVVLPCNPPPSAEPLRIYWMNSKILHIKQDERVTMGQNGNLYFANVLTSDNHSDYICHAHFPGTRTIIQKEPIDLRVKATNSMIDRKPRLLFPTNSSSHLVALQGQPLVLECIAEGFPTPTIKWLRPSGPMPADRVTYQNHNKTLQLLKVGEEDDGEYRCLAENSLGSARHAYYVTVEAAPYWLHKPQSHLYGPGETARLDCQVQGRPQPEVTWRINGIPVEELAKDQKYRIQRGALILSNVQPSDTMVTQCEARNRHGLLLANAYIYVVQLPAKILTADNQTYMAVQGSTAYLLCKAFGAPVPSVQWLDEDGTTVLQDERFFPYANGTLGIRDLQANDTGRYFCLAANDQNNVTIMANLKVKDATQITQGPRSTIEKKGSRVTFTCQASFDPSLQPSITWRGDGRDLQELGDSDKYFIEDGRLVIHSLDYSDQGNYSCVASTELDVVESRAQLLVVGSPGPVPRLVLSDLHLLTQSQVRVSWSPAEDHNAPIEKYDIEFEDKEMAPEKWYSLGKVPGNQTSTTLKLSPYVHYTFRVTAINKYGPGEPSPVSETVVTPEAAPEKNPVDVKGEGNETTNMVITWKPLRWMDWNAPQVQYRVQWRPQGTRGPWQEQIVSDPFLVVSNTSTFVPYEIKVQAVNSQGKGPEPQVTIGYSGEDYPQAIPELEGIEILNSSAVLVKWRPVDLAQVKGHLRGYNVTYWREGSQRKHSKRHIHKDHVVVPANTTSVILSGLRPYSSYHLEVQAFNGRGSGPASEFTFSTPEGVPGHPEALHLECQSNTSLLLRWQPPLSHNGVLTGYVLSYHPLDEGGKGQLSFNLRDPELRTHNLTDLSPHLRYRFQLQATTKEGPGEAIVREGGTMALSGISDFGNISATAGENYSVVSWVPKEGQCNFRFHILFKALGEGEGGGRGQ

SEQ ID NO: 908737 - protein, 196 aa, Homo sapiens
AAASASQTRSGGGSEAGVRGGWAGSPSGGRSAVPPLPTPAPSRPPAPFPSGRSLNRARLAVLRGAAGKDGRGAAVRVASPPLQPLPAYPDPRGYEEVAEGSLGAYLRRYVGPLFIFYLLTFSLFRTLTPLPGLSWAQGGQEIARTLGTPGEKGRVEGAGRVRTMDRDRRGRRGDFSTRDSEPGAGPRGLGPPPCSP

SEQ ID NO: 908738 - protein, 104 aa, Homo sapiens
RSIGIADALGRRVRGRRARRLGGQPERWPQRRTLEIYRKEQKKLRIASDLITKRETRSARPSLPGLLHRAPKRLLPKFPAASSLLSIRRTISASRWRGPLPCSQ

SEQ ID NO: 908739 - protein, 1320 aa, Homo sapiens; identical to SEQ ID NO: 908731

SEQ ID NO: 908740 - protein, 1320 aa, Homo sapiens; identical to SEQ ID NO: 908731

SEQ ID NO: 908741 - protein, 1515 aa, Homo sapiens
AAASASQTRSGGGSEAGVRGGWAGSPSGGRSAVPPLPTPAPSRPPAPFPSGRSLNRARLAVLRGAAGKDGRGAAVRVASPPLQPLPAYPDPRGYGNVMEPPVITEQSPRRLVVFPTDDISLKCEASGKPEVQFRWTRDGVHFKPKEELGVTVYQSPHSGSFTITGNNSNFAQRFQGIYRCFASNKLGTAMSHEIRLMAEGAPKWPKETVKPVEVEEGESVVLPCNPPPSAEPLRIYWMNSKILHIKQDERVTMGQNGNLYFANVLTSDNHSDYICHAHFPGTRTIIQKEPIDLRVKATNSMIDRKPRLLFPTNSSSHLVALQGQPLVLECIAEGFPTPTIKWLRPSGPMPADRVTYQNHNKTLQLLKVGEEDDGEYRCLAENSLGSARHAYYVTVEAAPYWLHKPQSHLYGPGETARLDCQVQGRPQPEVTWRINGIPVEELAKDQKYRIQRGALILSNVQPSDTMVTQCEARNRHGLLLANAYIYVVQLPAKILTADNQTYMAVQGSTAYLLCKAFGAPVPSVQWLDEDGTTVLQDERFFPYANGTLGIRDLQANDTGRYFCLAANDQNNVTIMANLKVKDATQITQGPRSTIEKKGSRVTFTCQASFDPSLQPSITWRGDGRDLQELGDSDKYFIEDGRLVIHSLDYSDQGNYSCVASTELDVVESRAQLLVVGSPGPVPRLVLSDLHLLTQSQVRVSWSPAEDHNAPIEKYDIEFEDKEMAPEKWYSLGKVPGNQTSTTLKLSPYVHYTFRVTAINKYGPGEPSPVSETVVTPEAAPEKNPVDVKGEGNETTNMVITWKPLRWMDWNAPQVQYRVQWRPQGTRGPWQEQIVSDPFLVVSNTSTFVPYEIKVQAVNSQGKGPEPQVTIGYSGEDYPQAIPELEGIEILNSSAVLVKWRPVDLAQVKGHLRGYNVTYWREGSQRKHSKRHIHKDHVVVPANTTSVILSGLRPYSSYHLEVQAFNGRGSGPASEFTFSTPEGVPGHPEALHLECQSNTSLLLRWQPPLSHNGVLTGYVLSYHPLDEGGKGQLSFNLRDPELRTHNLTDLSPHLRYRFQLQATTKEGPGEAIVREGGTMALSGISDFGNISATAGENYSVVSWVPKEGQCNFRFHILFKALGEEKGGASLSPQYVSYNQSSYTQWDLQPDTDYEIHLFKERMFRHQMAVKTNGTGRVRLPPAGFATEGWFIGFVSAIILLLLVLLILCFIKRSKGGKYSVKDKEDTQVDSEARPMKDETFGEYSDQVSRGRSGCWHSAPPWPSHLTPSLSSLCCRVTSGPWRGKAGAVGRGQQQGLPIDNVRLVCHCPLAAGALTGLSLPSPQARQLLISGRGQHAPAPPLHTDTFTAPLSPREAPDSFPDRNQAPNPLAERTFSPSQSPGSGECPKMTAPDLPARVARAALSERILNKWKAGGRLPHPQPGSCRGSAVLSLAPALCLCSDNEEKAFGSSQPSLNGDIKPLGSDDSLADYGGSVDVQFNEDGSFIGQYSGKKEKEAAGGNDSSGATSPINPAVALE

SEQ ID NO: 908742 - protein, 1255 aa, Homo sapiens
AAASASQTRSGGGSEAGVRGGWAGSPSGGRSAVPPLPTPAPSRPPAPFPSGRSLNRARLAVLRGAAGKDGRGAAVRVASPPLQPLPAYPDPRGYGNVMEPPVITEQSPRRLVVFPTDDISLKCEASGKPEVQFRWTRDGVHFKPKEELGVTVYQSPHSGSFTITGNNSNFAQRFQGIYRCFASNKLGTAMSHEIRLMAEGAPKWPKETVKPVEVEEGESVVLPCNPPPSAEPLRIYWMNSKILHIKQDERVTMGQNGNLYFANVLTSDNHSDYICHAHFPGTRTIIQKEPIDLRVKATNSMIDRKPRLLFPTNSSSHLVALQGQPLVLECIAEGFPTPTIKWLRPSGPMPADRVTYQNHNKTLQLLKVGEEDDGEYRCLAENSLGSARHAYYVTVEAAPYWLHKPQSHLYGPGETARLDCQVQGRPQPEVTWRINGIPVEELAKDQKYRIQRGALILSNVQPSDTMVTQCEARNRHGLLLANAYIYVVQLPAKILTADNQTYMAVQGSTAYLLCKAFGAPVPSVQWLDEDGTTVLQDERFFPYANGTLGIRDLQANDTGRYFCLAANDQNNVTIMANLKVKDATQITQGPRSTIEKKGSRVTFTCQASFDPSLQPSITWRGDGRDLQELGDSDKYFIEDGRLVIHSLDYSDQGNYSCVASTELDVVESRAQLLVVGSPGPVPRLVLSDLHLLTQSQVRVSWSPAEDHNAPIEKYDIEFEDKEMAPEKWYSLGKVPGNQTSTTLKLSPYVHYTFRVTAINKYGPGEPSPVSETVVTPEAAPEKNPVDVKGEGNETTNMVITWKPLRWMDWNAPQVQYRVQWRPQGTRGPWQEQIVSDPFLVVSNTSTFVPYEIKVQAVNSQGKGPEPQVTIGYSGEDYPQAIPELEGIEILNSSAVLVKWRPVDLAQVKGHLRGYNVTYWREGSQRKHSKRHIHKDHVVVPANTTSVILSGLRPYSSYHLEVQAFNGRGSGPASEFTFSTPEGVPGHPEALHLECQSNTSLLLRWQPPLSHNGVLTGYVLSYHPLDEGGKGQLSFNLRDPELRTHNLTDLSPHLRYRFQLQATTKEGPGEAIVREGGTMALSGISDFGNISATAGENYSVVSWVPKEGQCNFRFHILFKALGEEKGGASLSPQYVSYNQSSYTQWDLQPDTDYEIHLFKERMFRHQMAVKTNGTGRVRLPPAGFATEGWFIGFVSAIILLLLVLLILCFIKRSKGGKYSVKDKEDTQVDSEARPMKDETFGEYSDTTRRLDMSGIL

SEQ ID NO: 908743 - protein, 419 aa, Homo sapiens
AAASASQTRSGGGSEAGVRGGWAGSPSGGRSAVPPLPTPAPSRPPAPFPSGRSLNRARLAVLRGAAGKDGRGAAVRVASPPLQPLPAYPDPRGYGNVMEPPVITEQSPRRLVVFPTDDISLKCEASGKPEVQFRWTRDGVHFKPKEELGVTVYQSPHSGSFTITGNNSNFAQRFQGIYRCFASNKLGTAMSHEIRLMAEGAPKWPKETVKPVEVEEGESVVLPCNPPPSAEPLRIYWMNSKILHIKQDERVTMGQNGNLYFANVLTSDNHSDYICHAHFPGTRTIIQKEPIDLRVKATNSMIDRKPRLLFPTNSSSHLVALQGQPLVLECIAEGFPTPTIKWLRPSGPMPADRVTYQNHNKTLQLLKVGEEDDGEYRCLAENSLGSARHAYYVTVEGMDLLGHRPHPPGPLSSPALPIV

SEQ ID NO: 908744 - protein, 585 aa, Homo sapiens
SGWDVGAGRQVVATTAKGAETVQAARLGQEDHVNGARGLPGWAGTMGCGCSSHPEDDWMENIDVCENCHYPIVPLDGKGTLLIRNGSEVRDPLVTYEGSNPPASPLQDNLVIALHSYEPSHDGDLGFEKGEQLRILEQSGEWWKAQSLTTGQEGFIPFNFVAKANSLEPEPWFFKNLSRKDAERQLLAPGNTHGSFLIRESESTAGSFSLSVRDFDQNQGEVVKHYKIRNLDNGGFYISPRITFPGLHELVRHYTNASDGLCTRLSRPCQTQKPQKPWWEDEWEVPRETLKLVERLGAGQFGEVWMGYYNGHTKVAVKSLKQGSMSPDAFLAEANLMKQLQHQRLVRLYAVVTQEPIYIITEYMENGSLVDFLKTPSGIKLTINKLLDMAAQVKETGEGGWAREQTSDVKTSGSGPLTVFGLQIAEGMAFIEERNYIHRDLRAANILVSDTLSCKIADFGLARLIEDNEYTAREGAKFPIKWTAPEAINYGTFTIKSDVWSFGILLTEIVTHGRIPYPGMTNPEVIQNLERGYRMVRPDNCPEELYQLMRLCWKERPEDRPTFDYLRSVLEDFFTATEGQYQPQP

SEQ ID NO: 908745 - protein, 546 aa, Homo sapiens
TCSLRAQREHRFGAGTPYFSFSVAGEWGSQDLTISGTMGCGCSSHPEDDWMENIDVCENCHYPIVPLDGKGTLLIRNGSEVRDPLVTYEGSNPPASPLQDNLVIALHSYEPSHDGDLGFEKGEQLRILEQSGEWWKAQSLTTGQEGFIPFNFVAKANSLEPEPWFFKNLSRKDAERQLLAPGNTHGSFLIRESESTAGSFSLSVRDFDQNQGEVVKHYKIRNLDNGGFYISPRITFPGLHELVRHYTNASDGLCTRLSRPCQTQKPQKPWWEDEWEVPRETLKLVERLGAGQFGEVWMGYYNGHTKVAVKSLKQGSMSPDAFLAEANLMKQLQHQRLVRLYAVVTQEPIYIITEYMENGSLVDFLKTPSGIKLTINKLLDMAAQIAEGMAFIEERNYIHRDLRAANILVSDTLSCKIADFGLARLIEDNEYTAREGAKFPIKWTAPEAINYGTFTIKSDVWSFGILLTEIVTHGRIPYPGMTNPEVIQNLERGYRMVRPDNCPEELYQLMRLCWKERPEDRPTFDYLRSVLEDFFTATEGQYQPQP

SEQ ID NO: 908746 - protein, 546 aa, Homo sapiens; identical to SEQ ID NO: 908745

SEQ ID NO: 908747 - protein, 503 aa, Homo sapiens
SGWDVGAGRQVVATTAKGAETVQAARLGQEDHVNGARGLPGWAGTMGCGCSSHPEDDWMENIDVCENCHYPIVPLDGKGTLLIRNGSEVRDPLVTYEGSNPPASPLQDNLVIALHSYEPSHDGDLGFEKGEQLRILEQSGEWWKAQSLTTGQEGFIPFNFVAKANSLEPEPWFFKNLSRKDAERQLLAPGNTHGSFLIRESESTAGSFSLSVRDFDQNQGEVVKHYKIRNLDNGGFYISPRITFPGLHELVRHYTRYYNGHTKVAVKSLKQGSMSPDAFLAEANLMKQLQHQRLVRLYAVVTQEPIYIITEYMENGSLVDFLKTPSGIKLTINKLLDMAAQIAEGMAFIEERNYIHRDLRAANILVSDTLSCKIADFGLARLIEDNEYTAREGAKFPIKWTAPEAINYGTFTIKSDVWSFGILLTEIVTHGRIPYPGMTNPEVIQNLERGYRMVRPDNCPEELYQLMRLCWKERPEDRPTFDYLRSVLEDFFTATEGQYQPQP

SEQ ID NO: 908748 - protein, 327 aa, Homo sapiens
TCSLRAQREHRFGAGTPYFSFSVAGEWGSQDLTISGTFGTFQGKAPLYLMLGEQIWEVPRETLKLVERLGAGQFGEVWMGYYNGHTKVAVKSLKQGSMSPDAFLAEANLMKQLQHQRLVRLYAVVTQEPIYIITEYMENGSLVDFLKTPSGIKLTINKLLDMAAQIAEGMAFIEERNYIHRDLRAANILVSDTLSCKIADFGLARLIEDNEYTAREGAKFPIKWTAPEAINYGTFTIKSDVWSFGILLTEIVTHGRIPYPGMTNPEVIQNLERGYRMVRPDNCPEELYQLMRLCWKERPEDRPTFDYLRSVLEDFFTATEGQYQPQP

SEQ ID NO: 908749 - protein, 468 aa, Homo sapiens
SGWDVGAGRQVVATTAKGAETVQAARLGQEDHVNGARGLPGWAGTMGCGCSSHPEDDWMENIDVCENCHYPIVPLDGKGTLLIRNGSEVRDPLVTYEGSNPPASPLQDNLVIALHSYEPSHDGDLGFEKGEQLRILEQSGEWWKAQSLTTGQEGFIPFNFVAKANSLEPEPWFFKNLSRKDAERQLLAPGNTHGSFLIRESESTAGSFSLSVRDFDQNQGEVVKHYKIRNLDNGGFYISPRITFPGLHELVRHYTNASDGLCTRLSRPCQTQKPQKPWWEDEWEVPRETLKLVERLGAGQFGEVWMGYYNGHTKVAVKSLKQGSMSPDAFLAEANLMKQLQHQRLVRLYAVVTQEPIYIITEYMENGSLVDFLKTPSGIKLTINKLLDMAAQIAEGMAFIEERNYIHRDLRAANILVSDTLSCKIADFGLARLIEDNEYTAREAAKFPIKWTAPEACANSLHSCSSPP

SEQ ID NO: 908750 - protein, 554 aa, Homo sapiens
SGWDVGAGRQVVATTAKGAETVQAARLGQEDHVNGARGLPGWAGTMGCGCSSHPEDDWMENIDVCENCHYPIVPLDGKGTLLIRNGSEVRDPLVTYEGSNPPASPLQDNLVIALHSYEPSHDGDLGFEKGEQLRILEQSGEWWKAQSLTTGQEGFIPFNFVAKANSLEPEPWFFKNLSRKDAERQLLAPGNTHGSFLIRESESTAGSFSLSVRDFDQNQGEVVKHYKIRNLDNGGFYISPRITFPGLHELVRHYTNASDGLCTRLSRPCQTQKPQKPWWEDEWEVPRETLKLVERLGAGQFGEVWMGYYNGHTKVAVKSLKQGSMSPDAFLAEANLMKQLQHQRLVRLYAVVTQEPIYIITEYMENGSLVDFLKTPSGIKLTINKLLDMAAQIAEGMAFIEERNYIHRDLRAANILVSDTLSCKIADFGLARLIEDNEYTAREGAKFPIKWTAPEAINYGTFTIKSDVWSFGILLTEIVTHGRIPYPGMTNPEVIQNLERGYRMVRPDNCPEELYQLMRLCWKERPEDRPTFDYLRSVLEDFFTATEGQYQPQP

SEQ ID NO: 908751 - protein, 576 aa, Homo sapiens
TCSLRAQREHRFGAGTPYFSFSVAGEWGSQDLTISGTMGCGCSSHPEDDWMENIDVCENCHYPIVPLDGKGTLLIRNGSEVRDPLVTYEGSNPPASPLQDNLVIALHSYEPSHDGDLGFEKGEQLRILEQSGEWWKAQSLTTGQEGFIPFNFVAKANSLEPEPWFFKNLSRKDAERQLLAPGNTHGSFLIRESESTAGSFSLSVRDFDQNQGEVVKHYKIRNLDNGGFYISPRITFPGLHELVRHYTNASDGLCTRLSRPCQTQKPQKPWWEDEWEVPRETLKLVERLGAGQFGEVWMGYYNGHTKVAVKSLKQGSMSPDAFLAEANLMKQLQHQRLVRLYAVVTQEPIYIITEYMENDTLLDSQLEEKGLGASPWGNLGQQLLLLPTGSLVDFLKTPSGIKLTINKLLDMAAQIAEGMAFIEERNYIHRDLRAANILVSDTLSCKIADFGLARLIEDNEYTAREGAKFPIKWTAPEAINYGTFTIKSDVWSFGILLTEIVTHGRIPYPGMTNPEVIQNLERGYRMVRPDNCPEELYQLMRLCWKERPEDRPTFDYLRSVLEDFFTATEGQYQPQP

SEQ ID NO: 908752 - protein, 612 aa, Homo sapiens
SGWDVGAGRQVVATTAKGAETVQAARLGQEDHVNGARGLPGWAGTMGCGCSSHPEDDWMENIDVCENCHYPIVPLDGKGTLLIRNGSEVRDPLVTYEGSNPPASPLQGDPRQQGLKDKACGSLAVGFHLSPTYFLPGLAFLVPHPVTPGFLPIPARFSLMPLVFTDNLVIALHSYEPSHDGDLGFEKGEQLRILEQSGEWWKAQSLTTGQEGFIPFNFVAKANSLEPEPWFFKNLSRKDAERQLLAPGNTHGSFLIRESESTAGSFSLSVRDFDQNQGEVVKHYKIRNLDNGGFYISPRITFPGLHELVRHYTNASDGLCTRLSRPCQTQKPQKPWWEDEWEVPRETLKLVERLGAGQFGEVWMGYYNGHTKVAVKSLKQGSMSPDAFLAEANLMKQLQHQRLVRLYAVVTQEPIYIITEYMENGSLVDFLKTPSGIKLTINKLLDMAAQIAEGMAFIEERNYIHRDLRAANILVSDTLSCKIADFGLARLIEDNEYTAREGAKFPIKWTAPEAINYGTFTIKSDVWSFGILLTEIVTHGRIPYPGMTNPEVIQNLERGYRMVRPDNCPEELYQLMRLCWKERPEDRPTFDYLRSVLEDFFTATEGQYQPQP

SEQ ID NO: 908753 - protein, 220 aa, Homo sapiens
MSDTLLDSQLEEKGLGASPWGNLGQQLLLLPTGSLVDFLKTPSGIKLTINKLLDMAAQIAEGMAFIEERNYIHRDLRAANILVSDTLSCKIADFGLARLIEDNEYTAREGAKFPIKWTAPEAINYGTFTIKSDVWSFGILLTEIVTHGRIPYPGMTNPEVIQNLERGYRMVRPDNCPEELYQLMRLCWKERPEDRPTFDYLRSVLEDFFTATEGQYQPQP

SEQ ID NO: 908754 - protein, 482 aa, Homo sapiens
SGWDVGAGRQVVATTAKGAETVQAARLGQEDHVNGARGLPGWAGTMGCGCSSHPEDDWMENIDVCENCHYPIVPLDGKGTLLIRNGSEVRDPLVTYEGSNPPASPLQDNLVIALHSYEPSHDGDLGFEKGEQLRILEQSGEWWKAQSLTTGQEGFIPFNFVAKANSLEPEPWFFKNLSRKDAERQLLAPGNTHGSFLIRESESTAGSFSLSVRDFDQNQGEVVKHYKIRNLDNGGFYISPRITFPGLHELVRHYTNASDGLCTRLSRPCQTQKPQKPWWEDEWEVPRETLKLVERLGAGQFGEVWMGYYNGHTKVAVKSLKQGSMSPDAFLAEANLMKQLQHQRLVRLYAVVTQEPIYIITEYMENGSLVDFLKTPSGIKLTINKLLDMAAQIAEGMAFIEERNYIHRDLRAANILVSDTLSCKIADFGLARLIEDIHHQVRCVVFWDPADGNCHPRPHPLPRDDQPGGDSEPGARLPHGAP

SEQ ID NO: 908755 - protein, 224 aa, Homo sapiens
MEKLLCFLVLTSLSHAFGQTDMSRKAFVFPKESDTSYVSLKAPLTKPLKAFTVCLHFYTELSSTRGYSIFSYATKRQDNEILIFWSKDIGYSFTVGGSEILFEVPEVTVAPVHICTSWESASGIVEFWVDGKPRVRKSLKKGYTVGAEASIILGQEQDSFGGNFEGSQSLVGDIGNVNMWDFVLSPDEINTIYLGGPFSPNVLNWRALKYEVQGEVFTKPQLWP

SEQ ID NO: 908756 - protein, 224 aa, Homo sapiens; identical to SEQ ID NO: 908755

SEQ ID NO: 908757 - protein, 224 aa, Homo sapiens; identical to SEQ ID NO: 908755

SEQ ID NO: 908758 - protein, 279 aa, Homo sapiens
MEKLLCFLVLTSLSHAFGQTDMSRKAFVFPKESDTSYVSLKAPLTKPLKAFTVCLHFYTELSSTRGYSIFSYATKRQDNEILIFWSKDIGYSFTVGGSEILFEVPEVTVAPVHICTSWESASGIVEFWVDGKPRVRKSLKKGYTVGAEASIILGQEQDSFGGNFEGSQSLVGDIGNVNMWDFVLSPDEINTIYLGGPFSPNVLNWRALKYEVQGEPEGTSRFFTPHGPHVSVSGTSRFFTLHGSHVSVSGPLFPYMHCRPAPPSSAPENGGKVSGLGAR

SEQ ID NO: 908759 - protein, 224 aa, Homo sapiens; identical to SEQ ID NO: 908755

SEQ ID NO: 908760 - protein, 224 aa, Homo sapiens; identical to SEQ ID NO: 908755

SEQ ID NO: 908761 - protein, 109 aa, Homo sapiens
MEKLLCFLVLTSLSHAFGQTDMSRKAFVFPKESDTSYVSLKAPLTKPLKAFTVCLHFYTELSSTRGYSIFSYATKRQDNEILIFWSKDIGYSFTVGGSEILFEVPEVTA

SEQ ID NO: 908762 - protein, 125 aa, Homo sapiens
MEKLLCFLVLTSLSHAFGQTDMSRKAFVFPKESDTSYVSLKAPLTKPLKAFTVCLHFYTELSSTRGYSIFSYATKRQDNEILIFWSKDIGYSFTVGGSEILFEVPEVTASSAPENGGKVSGLGAR

SEQ ID NO: 908763 - protein, 224 aa, Homo sapiens; identical to SEQ ID NO: 908755

SEQ ID NO: 908764 - protein, 229 aa, Homo sapiens
MEKLLCFLVLTSLSHAFGQTDMSRKAFVFPKESDTSYVSLKAPLTKPLKAFTVCLHFYTELSSTRGYSIFSYATKRQDNEILIFWSKDIGYSFTVGGSEILFEVPEVTVAPVHICTSWESASGIVEFWVDGKPRVRKSLKKGYTVGAEASLRIRTLARCLVWVQSAHHHVIELLGPGLLKWEAQQYHAVPPLSQSTLERPLELPQQSRSAFFPEQNEALGINMLLLPRT

SEQ ID NO: 908765 - protein, 173 aa, Homo sapiens
MEKLLCFLVLTSLSHAFGQTDMSRKAFVFPKESDTSYVSLKAPLTKPLKAFTVCLHFYTELSSTRGYSIFSYATKRQDNEILIFWSKDIGYSFTVGGSEILFEVPEVTVAPVHICTSWEPGLLKWEAQQYHAVPPLSQSTLERPLELPQQSRSAFFPEQNEALGINMLLLPRT

SEQ ID NO: 908766 - protein, 148 aa, Homo sapiens
MEKLLCFLVLTSLSHAFGQTDMSRKAFVFPKESDTSYVSLKAPLTKPLKAFTVCLHFYTELSSTRGYSIFSYATKRQDNEILIFWSKDIGYSFTVGGSEILFEVPEVTVAPVHICTSWELPFSTRTLWGCEFFLHPRIPNIPRPQEWT

SEQ ID NO: 908767 - protein, 127 aa, Homo sapiens
MEKLLCFLVLTSLSHAFGQTDMSRKAFVFPKESDTSYVSLKAPLTKPLKAFTVCLHFYTELSSTRCFLNFMALLGNSSPFPHEPCGAVNSFFIPAFPIYPGHKSGREPQGVLSEEPISHLPSSLSGG

SEQ ID NO: 908768 - protein, 137 aa, Homo sapiens
MEKLLCFLVLTSLSHAFGQTDMSRKAFVFPKESDTSYVSLKAPLTKPLKAFTVCLHFYTELSSTRGYSIFSYATKRQDNEILIFWSKDIGYSFTVGGSEILFEVPEVTVAPVHICTSWESASGIVEFWVDGKPRVRN

SEQ ID NO: 908769 - protein, 224 aa, Homo sapiens; identical to SEQ ID NO: 908755

SEQ ID NO: 908770 - protein, 179 aa, Homo sapiens
MEKLLCFLVLTSLSHAFGQTDMSRKAFVFPKESDTSYVSLKAPLTKPLKAFTVCLHFYTELSSTRGYSIFSYATKRQDNEILIFWSKDIGYSFTVGGSEILFEVPEVTVAPVHICTSWESASGIVEFWVDGKPRVRKSLKKGYTVGAEASIILGQEQDSFGGNFEGSQSLVGDIGNVNI

SEQ ID NO: 908771 - protein, 207 aa, Homo sapiens
MEKLLCFLVLTSLSHAFGQTDMSRKAFVFPKESDTSYVSLKAPLTKPLKAFTVCLHFYTELSSTRGYSIFSYATKRQDNEILIFWSKDIGYSFTVGGSEILFEVPEVTVAPVHICTSWESASGIVEFWVDGKPRVRKSLKKGYTVGAEASQSLVGDIGNVNMWDFVLSPDEINTIYLGGPFSPNVLNWRALKYEVQGEVFTKPQLWP

SEQ ID NO: 908772 - protein, 243 aa, Homo sapiens
MEKLLCFLVLTSLSHAFGQTDMSRKAFVFPKESDTSYVSLKAPLTKPLKAFTVCLHFYTELSSTRGYSIFSYATKRQDNEILIFWSKDIGYSFTVGGSEILFEVPEVTVAPVHICTSWESASGIVEFWVDGKPRVRKSLKKGYTVGAEASIILGQEQDSFGGNFEGSLKVPPGFLHRMGPTSLSLVPPAFLHCMVPTSLSLGLCSPICIAGLLHPPQRLRMEVKCLVWELVNYAGKRSKRIRI

SEQ ID NO: 908773 - protein, 168 aa, Homo sapiens
MEKLLCFLVLTSLSHAFGQTDMSRKAFVFPKESDTSYVSLKAPLTKPLKAFTVCLHFYTELSSTRGYSIFSYATKRQDNEILIFWSKDIGYSFTVGGSEILFEVPEVTVAPVHICTSWESASGIVEFWVDGKPRVRKSSLTMLGNGPKESEFEVFCFHFYFKLDRSWR

SEQ ID NO: 908774 - protein, 224 aa, Homo sapiens; identical to SEQ ID NO: 908755

SEQ ID NO: 908775 - protein, 224 aa, Homo sapiens; identical to SEQ ID NO: 908755

SEQ ID NO: 908776 - protein, 148 aa, Homo sapiens
MEKLLCFLVLTSLSHAFGQTDMSRKAFVFPKESDTSYVSLKAPLTKPLKAFTVCLHFYTELSSTRGYSIFSYATKRQDNEILIFWSKDIGYSFTVGGSEILFEVPEVTVAPVHICTSWESASGIVEFWVDGKPRVRNNTTQSLHFRAK

SEQ ID NO: 908777 - protein, 160 aa, Homo sapiens
MEKLLCFLVLTSLSHAFGQTDMSRKAFVFPKESDTSYVSLKAPLTKPLKAFTVCLHFYTELSSTRGYSIFSYATKRQDNEILIFWSKDIGYSFTVGGSEILFEVPEVTVAPVHICTSWESASGIVEFWVDGKPRVRNCQRSPSPISPAPYLEDSWIVTCS

SEQ ID NO: 908778 - protein, 343 aa, Homo sapiens
AGLPRTLRESGQPSRWTEMDSELKEEIPVHEEFILCGGAETQVLKCGPWTDLFHDQSVKRPKLLIFIIPGNPGFSAFYVPFAKALYSLTNRRFPVWTISHAGHALAPKDKKILTTSEDSNAQEIKDIYGLNGQIEHKLAFLRTHVPKDMKLVLIGHSIGSYFTLQMLKRVPELPVIRAFLLFPTIERMSESPNGRIATPLLCWFRYVLYVTGYLLLKPCPETIKSLLIRRGLQVMNLENEFSPLNILEPFCLANAAYLGGQEMMEVVKRDDETIKEHLCKLTFYYGTIDPWCPKEYYEDIKKDFPEGDIRLCEKNIPHAFITHFNQEMADMIADSLKDDLSKM

SEQ ID NO: 908779 - protein, 291 aa, Homo sapiens
AGLPRTLRESGQPSRWTGNPGFSAFYVPFAKALYSLTNRRFPVWTISHAGHALAPKDKKILTTSEDSNAQEIKDIYGLNGQIEHKLAFLRTHVPKDMKLVLIGHSIGSYFTLQMLKRVPELPVIRAFLLFPTIERMSESPNGRIATPLLCWFRYVLYVTGYLLLKPCPETIKSLLIRRGLQVMNLENEFSPLNILEPFCLANAAYLGGQEMMEVVKRDDETIKEHLCKLTFYYGTIDPWCPKEYYEDIKKDFPEGDIRLCEKNIPHAFITHFNQEMADMIADSLKDDLSKM

SEQ ID NO: 908780 - protein, 343 aa, Homo sapiens; identical to SEQ ID NO: 908778

SEQ ID NO: 908781 - protein, 343 aa, Homo sapiens; identical to SEQ ID NO: 908778

SEQ ID NO: 908782 - protein, 343 aa, Homo sapiens; identical to SEQ ID NO: 908778

SEQ ID NO: 908783 - protein, 343 aa, Homo sapiens; identical to SEQ ID NO: 908778

SEQ ID NO: 908784 - protein, 348 aa, Homo sapiens
SIGCWLVHCHRVPFDAYSSLLLCEEDVSIAQILVIALSDFRVVCPIKQSTIHVLPCWRCPQSVKRPKLLIFIIPGNPGFSAFYVPFAKALYSLTNRRFPVWTISHAGHALAPKDKKILTTSEDSNAQEIKDIYGLNGQIEHKLAFLRTHVPKDMKLVLIGHSIGSYFTLQMLKRVPELPVIRAFLLFPTIERMSESPNGRIATPLLCWFRYVLYVTGYLLLKPCPETIKSLLIRRGLQVMNLENEFSPLNILEPFCLANAAYLGGQEMMEVVKRDDETIKEHLCKLTFYYGTIDPWCPKEYYEDIKKDFPEGDIRLCEKNIPHAFITHFNQEMADMIADSLKDDLSKM

SEQ ID NO: 908785 - protein, 184 aa, Homo sapiens
AGLPRTLRESGQPSRWTEMDSELKEEIPVHEEFILCGGAETQVLKCGPWTDLFHDQSVKRPKLLIFIIPGNPGFSAFYVPFAKALYSLTNRRFPVWTISHAGHALAPKDKKILTTSEDSNAQEIKDIYGLNGQIEHKLAFLRTHVPKDMKLVLIGHSIGSYFTLQMLKRVPELPLMLPTLGAKK

SEQ ID NO: 908786 - protein, 196 aa, Homo sapiens
MAPPWVPAMGFTLAPSLGCFVGSRFVHGEGLRWYAGLQKPSWHPPHWVLGPVWGTLYSAMGYGSYLVWKELGGFTEKAVVPLGLYTGQLALNWAWPPIFFGARQMGWALVDLLLVSGAAAATYRGLVPGEPAGRPPALPLPGLAGLRDHTQLLRMAGQPWLAWGTAAARVSARPTRDCSCTSRCHHACDVVAVTLS

SEQ ID NO: 908787 - protein, 196 aa, Homo sapiens; identical to SEQ ID NO: 908786

SEQ ID NO: 908788 - protein, 98 aa, Homo sapiens
AAGRGGADAGTAAWLTPARQCPSRSVPSPLVRLLPGLERAGRLHREGCGSPGPLHWAAGPELGMAPHLLWCPTNGLGLGGSPAGQWGGGSHLPWPGTR

SEQ ID NO: 908789 - protein, 196 aa, Homo sapiens; identical to SEQ ID NO: 908786

SEQ ID NO: 908790 - protein, 199 aa, Homo sapiens
MAPPWVPAMGFTLAPSLGCFVGSRFVHGEGLRWYAGLQKPSWHPPHWVLGPVWGTLYSAMGYGSYLVWKELGGFTEKAVVPLGLYTGQLALNWAWPPIFFGARQMGWALVDLLLVSGAAAATYRGLVPGEPAGRPPALPLPGLAGLRDHTQLLRMAGQPWLAWGTAAARVDARGKRNGFPVALARAVSNEIVRFPTERA

SEQ ID NO: 908791 - protein, 196 aa, Homo sapiens; identical to SEQ ID NO: 908786

SEQ ID NO: 908792 - protein, 196 aa, Homo sapiens; identical to SEQ ID NO: 908786

SEQ ID NO: 908793 - protein, 196 aa, Homo sapiens; identical to SEQ ID NO: 908786

SEQ ID NO: 908794 - protein, 196 aa, Homo sapiens; identical to SEQ ID NO: 908786

SEQ ID NO: 908795 - protein, 360 aa, Homo sapiens
MIPLLLAALLCVPAGALTCYGDSGQPVDWFVVYKLPALRGSGEAAQRGLQYKYLDESSGGWRDGRALINSPEGAVGRSLQPLYRSNTSQLAFLLYNDQPPQPSKAQDSSMRGHTKGVLLLDHDGGFWLVHSVPNFPPPASSAAYSWPHSACTYGQTLLCVSFPFAQFSKMGKQLTYTYPWVYNYQLEGIFAQEFPDLENVVKGHHVSQEPWNSSITLTSQAGAVFQSFAKFSKFGDDLYSGWLAAALGTNLQVQFWHKTVGILPSNCSDIWQVLNVNQIAFPGPAGPSFNSTEDHSKWCVSPKGPWTCVGDMNRNQGEEQRGGGTLCAQLPALWKAFQPLVKNYQPCNGMARKPSRAYKI

SEQ ID NO: 908796 - protein, 360 aa, Homo sapiens; identical to SEQ ID NO: 908795

SEQ ID NO: 908797 - protein, 332 aa, Homo sapiens
MFVVYKLPALRGSGEAAQRGLQYKYLDESSGGWRDGRALINSPEGAVGRSLQPLYRSNTSQLAFLLYNDQPPQPSKAQDSSMRGHTKGVLLLDHDGGFWLVHSVPNFPPPASSAAYSWPHSACTYGQTLLCVSFPFAQFSKMGKQLTYTYPWVYNYQLEGIFAQEFPDLENVVKGHHVSQEPWNSSITLTSQAGAVFQSFAKFSKFGDDLYSGWLAAALGTNLQVQFWHKTVGILPSNCSDIWQVLNVNQIAFPGPAGPSFNSTEDHSKWCVSPKGPWTCVGDMNRNQGEEQRGGGTLCAQLPALWKAFQPLVKNYQPCNGMARKPSRAYKI

SEQ ID NO: 908798 - protein, 282 aa, Homo sapiens
MIPLLLAALLCVPAGALTCYGDSGQPVDWFVVYKLPALRGSGEAAQRGLQYKYLDESSGGWRDGRALINSPEGAVGRSLQPLYRSNTSQLAFLLYNDQPPQPSKAQDSSMRGHTKGVLLLDHDGGFWLVHSVPNFPPPASSAAYSWPHSACTYGQTLLCVSFPFAQFSKMGKQLTYTYPWVYNYQLEGIFAQEFPDLENVVKGHHVSQEPWNSSITLTSQAGAVFQSFAKFSKFGDDLYSGWLAAALGTNLQVQFWHKTVGILAPREAEAGESLELGRQRLS

SEQ ID NO: 908799 - protein, 360 aa, Homo sapiens; identical to SEQ ID NO: 908795

SEQ ID NO: 908800 - protein, 390 aa, Homo sapiens
MIPLLLAALLCVPAGALTCYGDSGQPVDWFVVYKLPALRGSGEAAQRGLQYKYLDESSGGWRDGRALINSPEGAVGRSLQPLYRSNTSQVKGAPGQLGAKSRAALPGRNFTLPPFIRPQLAFLLYNDQPPQPSKAQDSSMRGHTKGVLLLDHDGGFWLVHSVPNFPPPASSAAYSWPHSACTYGQTLLCVSFPFAQFSKMGKQLTYTYPWVYNYQLEGIFAQEFPDLENVVKGHHVSQEPWNSSITLTSQAGAVFQSFAKFSKFGDDLYSGWLAAALGTNLQVQFWHKTVGILPSNCSDIWQVLNVNQIAFPGPAGPSFNSTEDHSKWCVSPKGPWTCVGDMNRNQGEEQRGGGTLCAQLPALWKAFQPLVKNYQPCNGMARKPSRAYKI

SEQ ID NO: 908801 - protein, 366 aa, Homo sapiens
YCAGYLAGLNVNQIALPGTSGPSFNSTEDHSKWCVSPQGTWTCVGDMNRNQEEEQRGGGTLCAQLPALWKAFQPLVKNYQPCNGMAREPSRAYRIYPLWQSAGITGVSHCARPPLMPSFGPGVLLLDHDGGFWLVHSVPNFPPPASSAAYSWPHSACTYGQTLLCVSFPFAQFSKMGKQLTYTYPWVYNYQLEGIFAQEFPDLENVVKGHHVSQEPWNSSITLTSQAGAVFQSFAKFSKFGDDLYSGWLAAALGTNLQVQFWHKTVGILPSNCSDIWQVLNVNQIAFPGPAGPSFNSTEDHSKWCVSPKGPWTCVGDMNRNQGEEQRGGGTLCAQLPALWKAFQPLVKNYQPCNGMARKPSRAYKI

SEQ ID NO: 908802 - protein, 238 aa, Homo sapiens
MPPRKKRRQPSQKAPLLFHQQPLEGPKHSCASTQLPITHTRQVPSKPIDHSTITSWVSPDFDTAAGSLFPAYQKHQNRARHSSRKPTTSKFPHLTFESPQSSSSETLGIPLIRECPSESEKDVSRRPLVPVLSPQSCGNMSVQALQSLPYVFIPPDIQTPESSSVKEELIPQDQKENSLLSCTLHTGTPNSPEPGPVLVKDTPEDKYGIKVTWRRRQHLLAYLRERGKLSRSQFLVKS

SEQ ID NO: 908803 - protein, 222 aa, Homo sapiens
  misc_feature (1)..(1): Xaa can be any naturally occurring amino acid
  misc_feature (5)..(5): Xaa can be any naturally occurring amino acid
XGLWXAQGSLINLIPPPPPPIPGSKAVRSARSCGPVRPGLVSPDFDTAAGSLFPAYQKHQNRARHSSRKPTTSKFPHLTFESPQSSSSETLGIPLIRECPSESEKDVSRRPLVPVLSPQSCGNMSVQALQSLPYVFIPPDIQTPESSSVKEELIPQDQKENSLLSCTLHTGTPNSPEPGPVLVKDTPEDKYGIKVTWRRRQHLLAYLRERGKLSRSQFLVKS

SEQ ID NO: 908804 - protein, 148 aa, Homo sapiens
  misc_feature (1)..(1): Xaa can be any naturally occurring amino acid
  misc_feature (5)..(5): Xaa can be any naturally occurring amino acid
XGLWXAQGSLINLIPPPPPPDSGLEGCAVCQELRPRPARAGMGWNWSLSPNPKANSIMWLLTVPHSPVDASQKKTPPAFPESPAAVPPTTTGGPQTQLCIYTASHHSHSTGYHLILIQQQEACSQPTRNTKTGRDTQVENLPPPSFHI

SEQ ID NO: 908805 - protein, 139 aa, Homo sapiens
  misc_feature (1)..(1): Xaa can be any naturally occurring amino acid
  misc_feature (5)..(5): Xaa can be any naturally occurring amino acid
  misc_feature (113)..(114): Xaa can be any naturally occurring amino acid
  misc_feature (117)..(117): Xaa can be any naturally occurring amino acid
  misc_feature (119)..(119): Xaa can be any naturally occurring amino acid
  misc_feature (125)..(125): Xaa can be any naturally occurring amino acid
  misc_feature (131)..(131): Xaa can be any naturally occurring amino acid
  misc_feature (133)..(134): Xaa can be any naturally occurring amino acid
  misc_feature (136)..(136): Xaa can be any naturally occurring amino acid
XGLWXAQGSLINLIPPPPPPDSGLEGCAVCQELRPRPARAGMGWNWSLSPNPKANSIMWLLTVPHSPVDASQKKTPPAFPESPAAVPPTTTGGPQTQLCIYTASHHSHSTGTXXQIXNXHNYINXLSKSYXLXXPXQHS

SEQ ID NO: 908806 - protein, 238 aa, Homo sapiens; identical to SEQ ID NO: 908802

SEQ ID NO: 908807 - protein, 238 aa, Homo sapiens; identical to SEQ ID NO: 908802

SEQ ID NO: 908808 - protein, 238 aa, Homo sapiens; identical to SEQ ID NO: 908802

SEQ ID NO: 908809 - protein, 174 aa, Homo sapiens
MRWKTTAGEIPRRCMTEEQQRTSGVEWSRCMCMNSRRNEAEKIDKGEKIPKVTRRERERGEEYRSTRLSEKMKISGYKVRGTDSVKWHLAVAENDDTVGKRRAHDEMKRSPEKTPECELEEAPEIRKRENEGDAGPREWLNGAKKMANGRVLGRGDNAVARDTRPDSVGPSANN

SEQ ID NO: 908810 - protein, 78 aa, Homo sapiens
DVAPGQRPAAQNGGGDDLLPAAEPVWRGGAEPAPGRQVFRGAGLADRGEGHAHWPGISLKMPLITPSTVHLFDFSSMA

SEQ ID NO: 908811 - protein, 136 aa, Homo sapiens
GTLRRVKGQRRKMAAAMTFCRLLNRCGEAARSLPLGARCFGVRVSPTGEKVTHTGQVYDDKDYRRIRFVGRQKEVNENFAIDLIAEQPVSEVETRVIACDGGGGALGHPKVYINLDKETKTGTCGYCGLQFRQHHH

SEQ ID NO: 908812 - protein, 136 aa, Homo sapiens; identical to SEQ ID NO: 908811

SEQ ID NO: 908813 - protein, 136 aa, Homo sapiens; identical to SEQ ID NO: 908811

SEQ ID NO: 908814 - protein, 136 aa, Homo sapiens; identical to SEQ ID NO: 908811

SEQ ID NO: 908815 - protein, 136 aa, Homo sapiens; identical to SEQ ID NO: 908811

SEQ ID NO: 908816 - protein, 136 aa, Homo sapiens; identical to SEQ ID NO: 908811

SEQ ID NO: 908817 - protein, 137 aa, Homo sapiens
GTLRRVKGQRRKMAAAMTFCRLLNRCGEAARSLPLGARCFGVRVSPTGEKVTHTGQVYDDKDYRRIRFVGRQKEVNENFAIDLIAEKPKKAPAKKGEKVPKGKKGKADAGKEGNNPAENGDAKTDQAQKAEGAGDAK

SEQ ID NO: 908818 - protein, 1435 aa, Homo sapiens
MAQCVQSVQELIPDSFVPCVAALCSDEAERLTRLNHLSFAELLKPFSRLTSEVHMRDPNNQLHVIKNLKIAVSNIVTQPPQPGAIRKLLNDVVSGSQPAEGLVANVITAGDYDLNISATTPWFESYRETFLQSMPASDHEFLNHYLACMLVASSSEAEPVEQFSKLSQEQHRIQHNSDYSYPKWFIPNTLKYYVLLHDVSAGDEQRAESIYEEMKQKYGTQGCYLLKINSRTSNRASDEQIPDPWSQYLQKNSIQNQESYEDGPCTITSNKNSDNNLLSLDGLDNEVKDGLPNNFRAHPLQLEQSSDPSNSIDGPDHLRSASSLHETKKGNTGIIHGACLTLTDHDRIRQFIQEFTFRGLLPHIEKTIRQLNDQLISRKGLSRSLFSATKKWFSGSKVPEKSINDLKNTSGLLYPPEAPELQIRKMADLCFLVQHYDLAYSCYHTAKKDFLNDQAMLYAAGALEMAAVSAFLQPGAPRPYPAHYMDTAIQTYRDICKNMVLAERCVLLSAELLKSQSKYSEAAALLIRLTSEDSDLRSALLLEQAAHCFINMKSPMVRKYAFHMILAGHRFSKAGQKKHALRCYCQAMQVYKGKGWSLAEDHINFTIGRQSYTLRQLDNAVSAFRHILINESKQSAAQQGAFLREYLYVYKNVSQLSPDGPLPQLPLPYINSSATRVFFGHDRRPADGEKQAATHVSLDQEYDSESSQQWRELEEQVVSVVNKGVIPSNFHPTQYCLNSYSDNSRFPLAVVEEPITVEVAFRNPLKVLLLLTDLSLLWKFHPKDFSGKDNEEVKQLVTSEPEMIGAEVISEFLINGEESKVARLKLFPHHIGELHILGVVYNLGTIQGSMTVDGIGALPGCHTGKYSLSMSVRGKQDLEIQGPRLNNTKEEKTSVKYGPDRRLDPIITEEMPLLEVFFIHFPTGLLCGEIRKAYVEFVNVSKCPLTGLKVVSKRPEFFTFGGNTAVLTPLSPSASENCSAYKTVVTDATSVCTALISSASSVDFGIGTGSQPEVIPVPLPDTVLLPGASVQLPMWLRGPDEEGVHEINFLFYYESVKKQPKIRHRILRHTAIICTSRSLNVRATVCRSNSLENEEGRGGNMLVFVDVENTNTSEAGVKEFHIVQVSSSSKHWKLQKSVNLSENKDTKLASREKGKFCFKAIRCEKEEAATQSSEKYTFADIIFGNEQIISSASPCADFFYRSLSSELKKPQAHLPVHTEKQSTEDAVRLIQKCSEVDLNIVILWKAYVVEDSKQLILEGQHHVILRTIGKEAFSYPQKQEPPEMELLKFFRPENITVSSRPSVEQLSSLIKTSLHYPESFNHPFHQKSLCLVPVTLLLSNCSKADVDVIVDLRHKTTSPEALEIHGSFTWLGQTQYKLQLKSQEIHSLQLKACFVHTGVYNLGTPRVFAKLSDQVTVFETSQQNSMPALIIISNV

SEQ ID NO: 908819 - protein, 1435 aa, Homo sapiens; identical to SEQ ID NO: 908818

SEQ ID NO: 908820 - protein, 1435 aa, Homo sapiens; identical to SEQ ID NO: 908818

SEQ ID NO: 908821 - protein, 799 aa, Homo sapiens
MAQCVQSVQELIPDSFVPCVAALCSDEAERLTRLNHLSFAELLKPFSRLTSEVHMRDPNNQLHVIKNLKIAVSNIVTQPPQPGAIRKLLNDVVSGSQPAEGLVANVITAGDYDLNISATTPWFESYRETFLQSMPASDHEFLNHYLACMLVASSSEAEPVEQFSKLSQEQHRIQHNSDYSYPKWFIPNTLKYYVLLHDVSAGDEQRAESIYEEMKQKYGTQGCYLLKINSRTSNRASDEQIPDPWSQYLQKNSIQNQESYEDGPCTITSNKNSDNNLLSLDGLDNEVKDGLPNNFRAHPLQLEQSSDPSNSIDGPDHLRSASSLHETKKGNTGIIHGACLTLTDHDRIRQFIQEFTFRGLLPHIEKTIRQLNDQLISRKGLSRSLFSATKKWFSGSKVPEKSINDLKNTSGLLYPPEAPELQIRKMADLCFLVQHYDLAYSCYHTAKKDFLNDQAMLYAAGALEMAAVSAFLQPGAPRPYPAHYMDTAIQTYRDICKNMVLAERCVLLSAELLKSQSKYSEAAALLIRLTSEDSDLRSALLLEQAAHCFINMKSPMVRKYAFHMILAGHRFSKAGQKKHALRCYCQAMQVYKGKGWSLAEDHINFTIGRQSYTLRQLDNAVSAFRHILINESKQSAAQQGAFLREYLYVYKNVSQLSPDGPLPQLPLPYINSSATRVFFGHDRRPADGEKQAATHVSLDQEYDSESSQQWRELEEQVVSVVNKGVIPSNFHPTQYCLNSYSDNSRFPLAVVEEPITVEVAFRNPLKVLLLLTDLSLLWKFHPKDFSGKDNEEVKQLVSY

SEQ ID NO: 908822 - protein, 1348 aa, Homo sapiens
MAQCVQSVQELIPDSFVPCVAALCSDEAERLTRLNHLSFAELLKPFSRLTSEVHMRDPNNQLHVIKNLKIAVSNIVTQPPQPGAIRKLLNDVVSGSQPAEGLVANVITAGDYDLNISATTPWFESYRETFLQSMPASDHEFLNHYLACMLVASSSEAEPVEQFSKLSQEQHRIQHNSDYSYPKWFIPNTLKYYVLLHDVSAGDEQRAESIYEEMKQKYGTQGCYLLKINSRTSNRASDEQIPDPWSQYLQKNSIQNQESYEDGPCTITSNKNSDNNLLSLDGLDNEVKDGLPNNFRAHPLQLEQSSDPSNSIDGPDHLRSASSLHETKKGNTGIIHGACLTLTDHDRIRQFIQEFTFRGLLPHIEKTIRQLNDQLISRKGLSRSLFSATKKWFSGSKVPEKSINDLKNTSGLLYPPEAPELQIRKMADLCFLVQHYDLAYSCYHTAKKDFLNDQAMLYAAGALEMAAVSAFLQPGAPRPYPAHYMDTAIQTYRDICKNMVLAERCVLLSAELLKSQSKYSEAAALLIRLTSEDSDLRSALLLEQAAHCFINMKSPMVRKYAFHMILAGHRFSKAGQKKHALRCYCQAMQVYKGKGWSLAEDHINFTIGRQSYTLRQLDNAVSAFRHILINESKQSAAQQGAFLREYLYVYKNVSQLSPDGPLPQLPLPYINSSATRVFFGHDRRPADGEKQAATHVSLDQEYDSESSQQWRELEEQVVSVVNKGVIPSNFHPTQYCLNSYSDNSRFPLAVVEEPITVEVAFRNPLKVLLLLTDLSLLWKFHPKDFSGKDNEEVKQLVTSEPEMIGAEVISEFLINGEESKVARLKLFPHHIGELHILGVVYNLGTIQGSMTVDGIGALPGCHTGKYSLSMSVRGKQDLEIQGPRLNNTKEEKTSVKYGPDRRLDPIITEEMPLLETLALAQEVNQQVIPVPLPDTVLLPGASVQLPMWLRGPDEEGVHEINFLFYYESVKKQPKIRHRILRHTAIICTSRSLNVRATVCRSNSLENEEGRGGNMLVFVDVENTNTSEAGVKEFHIVQVSSSSKHWKLQKSVNLSENKDTKLASREKGKFCFKAIRCEKEEAATQSSEKYTFADIIFGNEQIISSASPCADFFYRSLSSELKKPQAHLPVHTEKQSTEDAVRLIQKCSEVDLNIVILWKAYVVEDSKQLILEGQHHVILRTIGKEAFSYPQKQEPPEMELLKFFRPENITVSSRPSVEQLSSLIKTSLHYPESFNHPFHQKSLCLVPVTLLLSNCSKADVDVIVDLRHKTTSPEALEIHGSFTWLGQTQYKLQLKSQEIHSLQLKACFVHTGVYNLGTPRVFAKLSDQVTVFETSQQNSMPALIIISNV

SEQ ID NO: 908823 - protein, 1435 aa, Homo sapiens; identical to SEQ ID NO: 908818

SEQ ID NO: 908824 - protein, 1435 aa, Homo sapiens; identical to SEQ ID NO: 908818

SEQ ID NO: 908825 - protein, 688 aa, Homo sapiens
MAQCVQSVQELIPDSFVPCVAALCSDEAERLTRLNHLSFAELLKPFSRLTSEVHMRDPNNQLHVIKNLKIAVSNIVTQPPQPGAIRKLLNDVVSGSQPAEGLVANVITAGDYDLNISATTPWFESYRETFLQSMPASDHEFLNHYLACMLVASSSEAEPVEQFSKLSQEQHRIQHNSDYSYPKWFIPNTLKYYVLLHDVSAGDEQRAESIYEEMKQKYGTQGCYLLKINSRTSNRASDEQIPDPWSQYLQKNSIQNQESYEDGPCTITSNKNSDNNLLSLDGLDNEVKDGLPNNFRAHPLQLEQSSDPSNSIDGPDHLRSASSLHETKKGNTGIIHGACLTLTDHDRIRQFIQEFTFRGLLPHIEKTIRQLNDQLISRKGLSRSLFSATKKWFSGSKVPEKSINDLKNTSGLLYPPEAPELQIRKMADLCFLVQHYDLAYSCYHTAKKDFLNDQAMLYAAGALEMAAVSAFLQPGAPRPYPAHYMDTAIQTYRDICKNMVLAERCVLLSAELLKSQSKYSEAAALLIRLTSEDSDLRSALLLEQAAHCFINMKSPMVRKYAFHMILAGHRFSKAGQKKHALRCYCQAMQVYKGKGWSLAEDHINFTIGRQSYTLRQLDNAVSAFRHILINESKQSAAQQGAFLREYLYVYKNVSQLSPDGPLPQLPLPYINSSATRVFFGHDRRPADG

SEQ ID NO: 908826 - protein, 624 aa, Homo sapiens
MEIPGSLCKKVKLSNNAQNWGMQRATNVTYQAHHVSRNKRGQVVGTRGGFRGCTVWLTGLSGAGKTTVSMALEEYLVCHGIPCYTLDGDNIRQGLNKNLGFSPEDREENVRRIAEVAKLFADAGLVCITSFISPYTQDRNNARQIHEGASLPFFEVFVDAPLHVCEQRDVKGLYKKARAGEIKGFTGIDSEYEKPEAPELVLKTDSCDVNDCVQQVVELLQERDIVPVDASYEVKELYVPENKLHLAKTDAETLPALKINKVDMQWVQVLAEGWATPLNGFMREREYLQCLHFDCLLDGGVINLSVPIVLTATHEDKERLDGCTAFALMYEGRRVAILRNPEFFEHRKEERCARQWGTTCKNHPYIKMVMEQGDWLIGGDLQVLDRVYWNDGLDQYRLTPTELKQKFKDMNADAVFAFQLRNPVHNGHALLMQDTHKQLLERGYRRPVLLLHPLGGWTKDDDVPLMWRMKQHAAVLEEGVLNPETTVVAIFPSPMMYAGPTEVQWHCRARMVAGANFYIVGRDPAGMPHPETGKDLYEPSHGAKVLTMAPGLITLEIVPFRVAAYNKKKKRMDYYDSEHHEDFEFISGTRMRKLAREGQKPPEGFMAPKAWTVLTEYYKSLEKA

SEQ ID NO: 908827 - protein, 624 aa, Homo sapiens; identical to SEQ ID NO: 908826

SEQ ID NO: 908828 - protein, 656 aa, Homo sapiens
FRGCGASRLGPWVVARQRGAAQGGDLALAWRSVRSEPPFVGRTPPLPSASAQGMQRATNVTYQAHHVSRNKRGQVVGTRGGFRGCTVWLTGLSGAGKTTVSMALEEYLVCHGIPCYTLDGDNIRQGLNKNLGFSPEDREENVRRIAEVAKLFADAGLVCITSFISPYTQDRNNARQIHEGASLPFFEVFVDAPLHVCEQRDVKGLYKKARAGEIKGFTGIDSEYEKPEAPELVLKTDSCDVNDCVQQVVELLQERDIVPVDASYEVKELYVPENKLHLAKTDAETLPALKINKVDMQWVQVLAEGWATPLNGFMREREYLQCLHFDCLLDGGVINLSVPIVLTATHEDKERLDGCTAFALMYEGRRVAILRNPEFFEHRKEERCARQWGTTCKNHPYIKMVMEQGDWLIGGDLQVLDRVYWNDGLDQYRLTPTELKQKFKDMNADAVFAFQLRNPVHNGHALLMQDTHKQLLERGYRRPVLLLHPLGGWTKDDDVPLMWRMKQHAAVLEEGVLNPETTVVAIFPSPMMYAGPTEVQWHCRARMVAGANFYIVGRDPAGMPHPETGKDLYEPSHGAKVLTMAPGLITLEIVPFRVAAYNKKKKRMDYYDSEHHEDFEFISGTRMRKLAREGQKPPEGFMAPKAWTVLTEYYKSLEKA

SEQ ID NO: 908829 - protein, 507 aa, Homo sapiens
MEIPGSLCKKVKLSNNAQNWDRNNARQIHEGASLPFFEVFVDAPLHVCEQRDVKGLYKKARAGEIKGFTGIDSEYEKPEAPELVLKTDSCDVNDCVQQVVELLQERDIVPVDASYEVKELYVPENKLHLAKTDAETLPALKINKVDMQWVQVLAEGWATPLNGFMREREYLQCLHFDCLLDGGVINLSVPIVLTATHEDKERLDGCTAFALMYEGRRVAILRNPEFFEHRKEERCARQWGTTCKNHPYIKMVMEQGDWLIGGDLQVLDRVYWNDGLDQYRLTPTELKQKFKDMNADAVFAFQLRNPVHNGHALLMQDTHKQLLERGYRRPVLLLHPLGGWTKDDDVPLMWRMKQHAAVLEEGVLNPETTVVAIFPSPMMYAGPTEVQWHCRARMVAGANFYIVGRDPAGMPHPETGKDLYEPSHGAKVLTMAPGLITLEIVPFRVAAYNKKKKRMDYYDSEHHEDFEFISGTRMRKLAREGQKPPEGFMAPKAWTVLTEYYKSLEKA

SEQ ID NO: 908830 - protein, 331 aa, Homo sapiens
MEIPGSLCKKVKLSNNAQNWGMQRATNVTYQAHHVSRNKRGQVVGTRGGFRGCTVWLTGLSGAGKTTVSMALEEYLVCHGIPCYTLDGDNIRQGLNKNLGFSPEDREENVRRIAEVAKLFADAGLVCITSFISPYTQDRNNARQIHEGASLPFFEVFVDAPLHVCEQRDVKGLYKKARAGEIKGFTGIDSEYEKPEAPELVLKTDSCDVNDCVQQVVELLQERDIVPVDASYEVKELYVPENKLHLAKTDAETLPALKINKVDMQWVQVLAEGWATPLNGFMREREYLQCLNWKGLWKWGGINLVRPLIFKWDPLGIKEGLTVFPHLGFKF

SEQ ID NO: 908831 - protein, 624 aa, Homo sapiens; identical to SEQ ID NO: 908826

SEQ ID NO: 908832 - protein, 634 aa, Homo sapiens
GRVGRPTRRTHASDPRVGKKVKLSNNAQNWGMQRATNVTYQAHHVSRNKRGQVVGTRGGFRGCTVWLTGLSGAGKTTVSMALEEYLVCHGIPCYTLDGDNIRQGLNKNLGFSPEDREENVRRIAEVAKLFADAGLVCITSFISPYTQDRNNARQIHEGASLPFFEVFVDAPLHVCEQRDVKGLYKKARAGEIKGFTGIDSEYEKPEAPELVLKTDSCDVNDCVQQVVELLQERDIVPVDASYEVKELYVPENKLHLAKTDAETLPALKINKVDMQWVQVLAEGWATPLNGFMREREYLQCLHFDCLLDGGVINLSVPIVLTATHEDKERLDGCTAFALMYEGRRVAILRNPEFFEHRKEERCARQWGTTCKNHPYIKMVMEQGDWLIGGDLQVLDRVYWNDGLDQYRLTPTELKQKFKDMNADAVFAFQLRNPVHNGHALLMQDTHKQLLERGYRRPVLLLHPLGGWTKDDDVPLMWRMKQHAAVLEEGVLNPETTVVAIFPSPMMYAGPTEVQWHCRARMVAGANFYIVGRDPAGMPHPETGKDLYEPSHGAKVLTMAPGLITLEIVPFRVAAYNKKKKRMDYYDSEHHEDFEFISGTRMRKLAREGQKPPEGFMAPKAWTVLTEYYKSLEKA

SEQ ID NO: 908833 - protein, 579 aa, Homo sapiens
MEIPGSLCKKVKLSNNAQNWGMQRATNVTYQAHHVSRNKRGQVVGTRGGFRGCTVWLTGLSGAGKTTVSMALEEYLVCHGIPCYTLDGDNIRQGLNKNLGFSPEDREENVRRIAEVAKLFADAGLVCITSFISPYTQDRNNARQIHEGASLPFFEVFVDAPLHVCEQRDVKGLYKKARAGEIKGFTGIDSEYEKPEAPELVLKTDSCDVNDCVQQVVELLQERDIVPVDASYEVKELYVPENKLHLAKTDAETLPALKINKVDMQWVQVLAEGWATPLNGFMREREYLQCLHFDCLLDGGVINLSVPIVLTATHEDKERLDGCTAFALMYEGRRVAILRNPEFFEHRKEERCARQWGTTCKNHPYIKMVMEQGDWLIGGDLQVLDRVYWNDGLDQYRLTPTELKQKFKDMNADAVFAFQLRNPVHNGHALLMQDTHKQLLERGYRRPVLLLHPLGGWTKDDDVPLMWRMKQHAAVLEEGVLNPETTVVAIFPSPMMYAGPTEVQWHCRARMVAGANFYIVGRDPAGMPHPETGKDLYEPSHGAKVLTMAPGLITLEIVPFRVAAYNKKKKRMDYYDSEQ

SEQ ID NO: 908834 - protein, 745 aa, Homo sapiens
MGVPFFSSLRCMVDLGPCWAGGLTAEMKLLLALAGLLAILATPQPSEGAAPAVLGEVDTSLVLSSMEEAKQLVDKAYKERRESIKQRLRSGSASPMELLSYFKQPVAATRTAVRAADYLHVALDLLERKLRSLWRRPFNVTDVLTPAQLNVLSKSSGCAYQDVGVTCPEQDKYRTITGMCNNRRSPTLGASNRAFVRWLPAEYEDGFSLPYGWTPGVKRNGFPVALARAVSNEIVRFPTDQLTPDQERSLMFMQWGQLLDHDLDFTPEPAARASFVTGVNCETSCVQQPPCFPLKIPPNDPRIKNQADCIPFFRSCPACPGSNITIRNQINALTSFVDASMVYGSEEPLARNLRNMSNQLGLLAVNQRFQDNGRALLPFDNLHDDPCLLTNRSARIPCFLAGDTRSSEMPELTSMHTLLLREHNRLATELKSLNPRWDGERLYQEARKIVGAMVQIITYRDYLPLVLGPTAMRKYLPTYRSYNDSVDPRIANVFTNAFRYGHTLIQPFMFRLDNRYQPMEPNPRVPLSRVFFASWRVVLEGGIDPILRGLMATPAKLNRQNQIAVDEIRERLFEQVMRIGLDLPALNMQRSRDHGLPGYNAWRRFCGLPQPETVGQLGTVLRNLKLARKLMEQYGTPNNIDIWMGGVSEPLKRKGRVGPLLACIIGTQFRKLRDGDRFWWENEGVFSMQQRQALAQISLPRIICDNTGITTVSKNNIFMSNSYPRDFVNCSTLPALNLASWREAS

SEQ ID NO: 908835 - protein, 756 aa, Homo sapiens
MPELTSMHTLLLREHNRLDTELKSLNPRWDGERLYQEARKIVGAMVQIITYRDYQPSEGAALAVLGEVDTSLVLSSMEEAKQLVDKAYKERRESIKQRLRSGSASPMELLSYFKQPVAATRTAVRAADYLHVALDLLERKLRSLWRRPFNVTDVLTPAQLNVLSKSSGCAYQDVGVTCPEQDKYRTITGMCNNRRSPTLGASNRAFVRWLPAEYEDGFSLPYGWTPGVKRNGFPVALARAVSNEIVRFPTDQLTPDQERSLMFMQWGQLLDHDLDFTPEPAARASFVTGVNCETSCVQQPPCFPLKIPPNDPRIKNQADCIPFFRSCPACPGSNITIRNQINALTSFVDASMVYGSEEPLARNLRNMSNQLGLLAVNQRFQDNGRALLPFDNLHDDPCLLTNRSARIPCFLAGDTRSSEMPELTSMHTLLLREHNRLATELKSLNPRWDGERLYQEARKIVGAMVQIITYRDYLPLVLGPTAMRKYLPTYRSYNDSVDPRIANVFTNAFRYGHTLIQPFMFRLDNRYQPMEPNPRVPLSRVFFASWRVVLEGGIDPILRGLMATPAKLNRQNQIAVDEIRERLFEQVMRIGLDLPALNMQRSRDHGLPGYNAWRRFCGLPQPETVGQLGTVLRNLKLARKLMEQYGTPNNIDIWMGGVSEPLKRKGRVGPLLACIIGTQFRKLRDGDRFWWENEGVFSMQQRQALAQISLPRIICDNTGITTVSKNNIFMSNSYPRDFVNCSTLPALNLASWREAS

SEQ ID NO: 908836 - protein, 736 aa, Homo sapiens
MQWIPYSVIEYSGFHAAWKNASRLNAVDYVQHEMTSPGGAAPAVLGEVDTSLVLSSMEEAKQLVDKAYKERRESIKQRLRSGSASPMELLSYFKQPVAATRTAVRAADYLHVALDLLERKLRSLWRRPFNVTDVLTPAQLNVLSKSSGCAYQDVGVTCPEQDKYRTITGMCNNRRSPTLGASNRAFVRWLPAEYEDGFSLPYGWTPGVKRNGFPVALARAVSNEIVRFPTDQLTPDQERSLMFMQWGQLLDHDLDFTPEPAARASFVTGVNCETSCVQQPPCFPLKIPPNDPRIKNQADCIPFFRSCPACPGSNITIRNQINALTSFVDASMVYGSEEPLARNLRNMSNQLGLLAVNQRFQDNGRALLPFDNLHDDPCLLTNRSARIPCFLAGDTRSSEMPELTSMHTLLLREHNRLATELKSLNPRWDGERLYQEARKIVGAMVQIITYRDYLPLVLGPTAMRKYLPTYRSYNDSVDPRIANVFTNAFRYGHTLIQPFMFRLDNRYQPMEPNPRVPLSRVFFASWRVVLEGGIDPILRGLMATPAKLNRQNQIAVDEIRERLFEQVMRIGLDLPALNMQRSRDHGLPGYNAWRRFCGLPQPETVGQLGTVLRNLKLARKLMEQYGTPNNIDIWMGGVSEPLKRKGRVGPLLACIIGTQFRKLRDGDRFWWENEGVFSMQQRQALAQISLPRIICDNTGITTVSKNNIFMSNSYPRDFVNCSTLPALNLASWREAS

SEQ ID NO: 908837 - protein, 405 aa, Homo sapiens
MVYGSEEPLARNLRNMSNQLGLLAVNQRFQDNGRALLPFDNLHDDPCLLTNRSARIPCFLAGDTRSSEMPELTSMHTLLLREHNRLATELKSLNPRWDGERLYQEARKIVGAMVQIITYRDYLPLVLGPTAMRKYLPTYRSYNDSVDPRIANVFTNAFRYGHTLIQPFMFRLDNRYQPMEPNPRVPLSRVFFASWRVVLEGGIDPILRGLMATPAKLNRQNQIAVDEIRERLFEQVMRIGLDLPALNMQRSRDHGLPGYNAWRRFCGLPQPETVGQLGTVLRNLKLARKLMEQYGTPNNIDIWMGGVSEPLKRKGRVGPLLACIIGTQFRKLRDGDRFWWENEGVFSMQQRQALAQISLPRIICDNTGITTVSKNNIFMSNSYPRDFVNCSTLPALNLASWREAS

SEQ ID NO: 908838 - protein, 772 aa, Homo sapiens
MGVPFFSSLRCMVDLGPCWAGGLTAEMKLLLALAGLLAILATPQPSEGAAPAVLGEVDTSLVLSSMEEAKQLVDKAYKERRERWGTRHCPALGKDVPGLSEKQQAAGSLSIKQRLRSGSASPMELLSYFKQPVAATRTAVRAADYLHVALDLLERKLRSLWRRPFNVTDVLTPAQLNVLSKSSGCAYQDVGVTCPEQDKYRTITGMCNNRRSPTLGASNRAFVRWLPAEYEDGFSLPYGWTPGVKRNGFPVALARAVSNEIVRFPTDQLTPDQERSLMFMQWGQLLDHDLDFTPEPAARASFVTGVNCETSCVQQPPCFPLKIPPNDPRIKNQADCIPFFRSCPACPGSNITIRNQINALTSFVDASMVYGSEEPLARNLRNMSNQLGLLAVNQRFQDNGRALLPFDNLHDDPCLLTNRSARIPCFLAGDTRSSEMPELTSMHTLLLREHNRLATELKSLNPRWDGERLYQEARKIVGAMVQIITYRDYLPLVLGPTAMRKYLPTYRSYNDSVDPRIANVFTNAFRYGHTLIQPFMFRLDNRYQPMEPNPRVPLSRVFFASWRVVLEGGIDPILRGLMATPAKLNRQNQIAVDEIRERLFEQVMRIGLDLPALNMQRSRDHGLPGYNAWRRFCGLPQPETVGQLGTVLRNLKLARKLMEQYGTPNNIDIWMGGVSEPLKRKGRVGPLLACIIGTQFRKLRDGDRFWWENEGVFSMQQRQALAQISLPRIICDNTGITTVSKNNIFMSNSYPRDFVNCSTLPALNLASWREAS

SEQ ID NO: 908839 - protein, 567 aa, Homo sapiens
MCNNRRSPTLGASNRAFVRWLPAEYEDGFSLPYGWTPGVKRNGFPVALARAVSNEIVRFPTDQLTPDQERSLMFMQWGQLLDHDLDFTPEPAARASFVTGVNCETSCVQQPPCFPLKIPPNDPRIKNQADCIPFFRSCPACPGSNITIRNQINALTSFVDASMVYGSEEPLARNLRNMSNQLGLLAVNQRFQDNGRALLPFDNLHDDPCLLTNRSARIPCFLAGDTRSSEMPELTSMHTLLLREHNRLATELKSLNPRWDGERLYQEARKIVGAMVQIITYRDYLPLVLGPTAMRKYLPTYRSYNDSVDPRIANVFTNAFRYGHTLIQPFMFRLDNRYQPMEPNPRVPLSRVFFASWRVVLEGGIDPILRGLMATPAKLNRQNQIAVDEIRERLFEQVMRIGLDLPALNMQRSRDHGLPGYNAWRRFCGLPQPETVGQLGTVLRNLKLARKLMEQYGTPNNIDIWMGGVSEPLKRKGRVGPLLACIIGTQFRKLRDGDRFWWENEGVFSMQQRQALAQISLPRIICDNTGITTVSKNNIFMSNSYPRDFVNCSTLPALNLASWREAS

SEQ ID NO: 908840 - protein, 745 aa, Homo sapiens
MGVPFFSSLRCMVDLGPCWAGGLTAEMKLLLALAGLLAILATPQPSEGAAPAVLGEVDTSLVLSSMEEAKQLVDKAYKERRESIKQRLRSGSASPMELLSYFKQPVAATRTAVRAADYLHVALDLLERKLRSLWRRPFNVTDVLTPAQLNVLSKSSGCAYQDVGVTCPEQDKYRTITGMCNNRRSPTLGASNRAFVRWLPAEYEDGFSLPYGWTPGVKRNGFPVALARAVSNEIVRFPTDQLTPDQERSLMFMQSQRFSNQELEFHDYTAERASFLTGVKGETSCVQQPPCCSLKIPPNDPRIKNQADCIPFFRSCPACPGSNITIRNQINALTSFVDASMVYGSEEPLARNLRNMSNQLGLLAVNQRFQDNGRALLPFDNLHDDPCLLTNRSARIPCFLAGDTRSSEMPELTSMHTLLLREHNRLATELKSLNPRWDGERLYQEARKIVGAMVQIITYRDYLPLVLGPTAMRKYLPTYRSYNDSVDPRIANVFTNAFRYGHTLIQPFMFRLDNRYQPMEPNPRVPLSRVFFASWRVVLEGGIDPILRGLMATPAKLNRQNQIAVDEIRERLFEQVMRIGLDLPALNMQRSRDHGLPGYNAWRRFCGLPQPETVGQLGTVLRNLKLARKLMEQYGTPNNIDIWMGGVSEPLKRKGRVGPLLACIIGTQFRKLRDGDRFWWENEGVFSMQQRQALAQISLPRIICDNTGITTVSKNNIFMSNSYPRDFVNCSTLPALNLASWREAS

SEQ ID NO: 908841 - protein, 677 aa, Homo sapiens
MGVPFFSSLRCMVDLGPCWAGGLTAEMKLLLALAGLLAILATPQPSEGAAPAVLGEVDTSLVLSSMEEAKQLVDKAYKERRESIKQRLRSGSASPMELLSYFKQPVAATRTAVRAADYLHVALDLLERKLRSLWRRPFNVTDVLTPAQLNVLSKSSGCAYQDVGVTCPEQDKYRTITGMCNNRRSPTLGASNRAFVRWLPAEYEDGFSLPYGWTPGVKRNGFPVALARAVSNEIVRFPTDQLTPDQERSLMFMQWGQLLDHDLDFTPEPAARASFVTGVNCETSCVQQPPCFPLKIPPNDPRIKNQADCIPFFRSCPACPGSNITIRNQINALTSFVDASMVYGSEEPLARNLRNMSNQLGLLAVNQRFQDNGRALLPFDNLHDDPCLLTNRSARIPCFLAGDTRSSEMPELTSMHTLLLREHNRLATELKSLNPRWDGERLYQEARKIVGAMVQIITYRDYLPLVLGPTAMRKYLPTYRSYNDSVDPRIANVFTNAFRYGHTLIQPFMFRLDNRYQPMEPNPRVPLSRVFFASWRVVLEGGIDPILRGLMATPAKLNRQNQIAVDEIRERLFEQVMRIGLDLPALNMQRSRDHGLPGYNAWRRFCGLPQPETVGQLGTVLRNLKLARKLMEQYGTPNNIDIWMGGVSEPLKRKGRVGPLLACIIGTQFRKLRDGDR

SEQ ID NO: 908842 - protein, 616 aa, Homo sapiens
MGVPFFSSLRCMVDLGPCWAGGLTAEMKLLLALAGLLAILATPQPSEGAAPAVLGEVDTSLVLSSMEEAKQLVDKAYKERRESIKQRLRSGSASPMELLSYFKQPVAATRTAVRAADYLHVALDLLERKLRSLWRRPFNVTDVLTPAQLNVLSKSSGCAYQDVGVTCPEQDKYRTITGMCNNRRSPTLGASNRAFVRWLPAEYEDGFSLPYGWTPGVKRNGFPVALARAVSNEIVRFPTDQLTPDQERSLMFMQWGQLLDHDLDFTPEPAARASFVTGVNCETSCVQQPPCFPLKIPPNDPRIKNQADCIPFFRSCPACPGSNITIRNQINALTSFVDASMVYGSEEPLARNLRNMSNQLGLLAVNQRFQDNGRALLPFDNLHDDPCLLTNRSARIPCFLAGDTRSSEMPELTSMHTLLLREHNRLATELKSLNPRWDGERLYQEARKIVGAMVQIITYRDYLPLVLGPTAMRKYLPTYRSYNDSVDPRIANVFTNAFRYGHTLIQPFMFRLDNRYQPMEPNPRVPLSRVFFASWRVVLEGGIDPILRGLMATPAKLNRQNQIAVDEIRERLFEQVMRIGLDLPALNMQRSRDHGLPGEGLQESPLMLTSPELPPR

SEQ ID NO: 908843 - protein, 360 aa, Homo sapiens
MLVPDSAQSARIPASGRDTRSSEMPELTSMHTLLLREHNRLATELKSLNPRWDGERLYQEARKIVGAMVQIITYRDYLPLVLGPTAMRKYLPTYRSYNDSVDPRIANVFTNAFRYGHTLIQPFMFRLDNRYQPMEPNPRVPLSRVFFASWRVVLEGGIDPILRGLMATPAKLNRQNQIAVDEIRERLFEQVMRIGLDLPALNMQRSRDHGLPGYNAWRRFCGLPQPETVGQLGTVLRNLKLARKLMEQYGTPNNIDIWMGGVSEPLKRKGRVGPLLACIIGTQFRKLRDGDRFWWENEGVFSMQQRQALAQISLPRIICDNTGITTVSKNNIFMSNSYPRDFVNCSTLPALNLASWREAS

SEQ ID NO: 908844 - protein, 337 aa, Homo sapiens
MPELTSMHTLLLREHNRLATELKSLNPRWDGERLYQEARKIVGAMVQIITYRDYLPLVLGPTAMRKYLPTYRSYNDSVDPRIANVFTNAFRYGHTLIQPFMFRLDNRYQPMEPNPRVPLSRVFFASWRVVLEGGIDPILRGLMATPAKLNRQNQIAVDEIRERLFEQVMRIGLDLPALNMQRSRDHGLPGYNAWRRFCGLPQPETVGQLGTVLRNLKLARKLMEQYGTPNNIDIWMGGVSEPLKRKGRVGPLLACIIGTQFRKLRDGDRFWWENEGVFSMQQRQALAQISLPRIICDNTGITTVSKNNIFMSNSYPRDFVNCSTLPALNLASWREAS

SEQ ID NO: 908845 - protein, 293 aa, Homo sapiens
MVQIITYRDYLPLVLGPTAMRKYLPTYRSYNDSVDPRIANVFTNAFRYGHTLIQPFMFRLDNRYQPMEPNPRVPLSRVFFASWRVVLEGGIDPILRGLMATPAKLNRQNQIAVDEIRERLFEQVMRIGLDLPALNMQRSRDHGLPGYNAWRRFCGLPQPETVGQLGTVLRNLKLARKLMEQYGTPNNIDIWMGGVSEPLKRKGRVGPLLACIIGTQFRKLRDGDRFWWENEGVFSMQQRQALAQISLPRIICDNTGITTVSKNNIFMSNSYPRDFVNCSTLPALNLASWREAS

SEQ ID NO: 908846 - protein, 323 aa, Homo sapiens
VSWLAELDQWCLGGISQLQLGCVDDLWAQAMVQIITYRDYLPLVLGPTAMRKYLPTYRSYNDSVDPRIANVFTNAFRYGHTLIQPFMFRLDNRYQPMEPNPRVPLSRVFFASWRVVLEGGIDPILRGLMATPAKLNRQNQIAVDEIRERLFEQVMRIGLDLPALNMQRSRDHGLPGYNAWRRFCGLPQPETVGQLGTVLRNLKLARKLMEQYGTPNNIDIWMGGVSEPLKRKGRVGPLLACIIGTQFRKLRDGDRFWWENEGVFSMQQRQALAQISLPRIICDNTGITTVSKNNIFMSNSYPRDFVNCSTLPALNLASWREAS

SEQ ID NO: 908847 - protein, 195 aa, Homo sapiens [sequence omitted]

SEQ ID NO: 908848 - protein, 252 aa, Homo sapiens
VSQCSGTVTPHSCLVFRLHNRYVPLEPQPRVLLSRVFCALLEELVLECGIDPILRGLMATPAKLNRQNQIAVDEIRERLFEQVMRIGLDLPALNMQRSRDHGLPGYNAWRRFCGLPQPETVGQLGTVLRNLKLARKLMEQYGTPNNIDIWMGGVSEPLKRKGRVGPLLACIIGTQFRKLRDGDRFWWENEGVFSMQQRQALAQISLPRIICDNTGITTVSKNNIFMSNSYPRDFVNCSTLPALNLASWREAS

SEQ ID NO: 908849 - protein, 305 aa, Homo sapiens
MGVPFFSSLRCMVDLGPCWAGGLTAEMKLLLALAGLLAILATPQPSEGAAPAVLGEVDTSLVLSSMEEAKQLVDKAYKERRESIKQRLRSGSASPMELLSYFKQPVAATRTAVRAADYLHVALDLLERKLRSLWRRPFNVTDVLTPAQLNVLSKSSGCAYQDVGVTCPEQDKYRTITGMCNNRRSPTLGASNRAFVRWLPAEYEDGFSLPYGWTPGVKRNGFPVALARAVSNEIVRFPTDQLTPDQERSLMFMQWGQLLDHDLDFTPEPAARASFVTGVNCETSCVQQPPCFPLKIPPNTRRHKR

SEQ ID NO: 908850 - protein, 88 aa, Homo sapiens
ICVVAADQHRYRARCSPSMPGTELASRQQVRFNAVSVRQFTKCRGYELDMKRSFVCSCMCEVYKLAFHACVLSEHGECFMGYVYVPFM

SEQ ID NO: 908851 - protein, 764 aa, Homo sapiens
MGVPFFSSLRCMVDLGPCWAGGLTAEMKLLLALAGLLAILATPQPSEGAAPAVLGEVDTSLVLSSMEEAKQLVDKAYKERRESIKQRLRSGSASPMELLSYFKQPVAATRTAVRAADYLHVALDLLERKLRSLWRRPFNVTDVLTPAQLNVLSKSSGCAYQDVGVTCPEQDKYRTITGMCNNRRSPTLGASNRAFVRWLPAEYEDGFSLPYGWTPGVKRNGFPVALARAVSNEIVRFPTDQLTPDQERSLMFMQWGQLLDHDLDFTPEPAARASFVTGVNCETSCVQQPPCFPLKIPPNDPRIKNQADCIPFFRSCPACPGSNITIRNQINALTSFVDASMVYGSEEPLARNLRNMSNQLGLLAVNQRFQDNGRALLPFDNLHDDPCLLTNRSARIPCFLAGSFGVGTRGGIGDVPCWSHRDTRSSEMPELTSMHTLLLREHNRLATELKSLNPRWDGERLYQEARKIVGAMVQIITYRDYLPLVLGPTAMRKYLPTYRSYNDSVDPRIANVFTNAFRYGHTLIQPFMFRLDNRYQPMEPNPRVPLSRVFFASWRVVLEGGIDPILRGLMATPAKLNRQNQIAVDEIRERLFEQVMRIGLDLPALNMQRSRDHGLPGYNAWRRFCGLPQPETVGQLGTVLRNLKLARKLMEQYGTPNNIDIWMGGVSEPLKRKGRVGPLLACIIGTQFRKLRDGDRFWWENEGVFSMQQRQALAQISLPRIICDNTGITTVSKNNIFMSNSYPRDFVNCSTLPALNLASWREAS

SEQ ID NO: 908852 - protein, 699 aa, Homo sapiens
SLLWAAVLGEVDTSLVLSSMEEAKQLVDKAYKERRESIKQRLRSGSASPMELLSYFKQPVAATRTAVRAADYLHVALDLLERKLRSLWRRPFNVTDVLTPAQLNVLSKSSGCAYQDVGVTCPEQDKYRTITGMCNNRRSPTLGASNRAFVRWLPAEYEDGFSLPYGWTPGVKRNGFPVALARAVSNEIVRFPTDQLTPDQERSLMFMQWGQLLDHDLDFTPEPAARASFVTGVNCETSCVQQPPCFPLKIPPNDPRIKNQADCIPFFRSCPACPGSNITIRNQINALTSFVDASMVYGSEEPLARNLRNMSNQLGLLAVNQRFQDNGRALLPFDNLHDDPCLLTNRSARIPCFLAGDTRSSEMPELTSMHTLLLREHNRLATELKSLNPRWDGERLYQEARKIVGAMVQIITYRDYLPLVLGPTAMRKYLPTYRSYNDSVDPRIANVFTNAFRYGHTLIQPFMFRLDNRYQPMEPNPRVPLSRVFFASWRVVLEGGIDPILRGLMATPAKLNRQNQIAVDEIRERLFEQVMRIGLDLPALNMQRSRDHGLPGYNAWRRFCGLPQPETVGQLGTVLRNLKLARKLMEQYGTPNNIDIWMGGVSEPLKRKGRVGPLLACIIGTQFRKLRDGDRFWWENEGVFSMQQRQALAQISLPRIICDNTGITTVSKNNIFMSNSYPRDFVNCSTLPALNLASWREAS

SEQ ID NO: 908853 - protein, 429 aa, Homo sapiens
MGVPFFSSLRCMVDLGPCWAGGLTAEMKLLLALAGLLAILATPQPSEGAAPAVLGEVDTSLVLSSMEEAKQLVDKAYKERRESIKQRLRSGSASPMELLSYFKQPVAATRTAVRAADYLHVALDLLERKLRSLWRRPFNVTDVLTPAQLNVLSKSSGCAYQDVGVTCPEQDKYRTITGMCNNRRSPTLGASNRAFVRWLPAEYEDGFSLPYGWTPGVKRNGFPVALARAVSNEIVRFPTDQLTPDQERSLMFMQWGQLLDHDLDFTPEPAARASFVTGVNCETSCVQQPPCFPLKIPPNDPRIKNQADCIPFFRSCPACPGSNITIRNQINALTSFVDASMVYGSEEPLARNLRNMSNQLGLLAVNQRFQDNGRALLPFDNLHDDPCLLTNRSARIPCFLADHHLPGLPAPGAGANGHEEVPAHVPFLQ

SEQ ID NO: 908854 - protein, 567 aa, Homo sapiens; identical to SEQ ID NO: 908839

SEQ ID NO: 908855 - protein, 624 aa, Homo sapiens
MGVPFFSSLRCMVDLGPCWAGGLTAEMKLLLALAGLLAILATPQPSEGAAPAVLGEVDTSLVLSSMEEAKQLVDKAYKERRESIKQRLRSGSASPMELLSYFKQPVAATRTAVRAADYLHVALDLLERKLRSLWRRPFNVTDVLTPAQLNVLSKSSGCAYQDVGVTCPEQDKYRTITGMCNNRRSPTLGASNRAFVRWLPAEYEDGFSLPYGWTPGVKRNGFPVALARAVSNEIVRFPTDQLTPDQERSLMFMQWGQLLDHDLDFTPEPAARASFVTGVNCETSCVQQPPCFPLKIPPNDPRIKNQADCIPFFRSCPACPGSNITIRNQINALTSFVDASMVYGSEEPLARNLRNMSNQLGLLAVNQRFQDNGRALLPFDNLHDDPCLLTNRSARIPCFLAGDTRSSEMPELTSMHTLLLREHNRLATELKSLNPRWDGERLYQEARKIVGAMVQIITYRDYLPLVLGPTAMRKYLPTYRSYNDSVDPRIANVFTNAFRYGHTLIQPFMFRLDNRYQPMEPNPRVPLSRVFFASWRVVLEGGIDPILRGLMATPAKLNRQNQIAVDEIRERLFEQISLPRIICDNTGITTVSKNNIFMSNSYPRDFVNCSTLPALNLASWREAS

SEQ ID NO: 908856 - protein, 351 aa, Homo sapiens
IKSVQTRRDTRSSEMPELTSMHTLLLREHNRLATELKSLNPRWDGERLYQEARKIVGAMVQIITYRDYLPLVLGPTAMRKYLPTYRSYNDSVDPRIANVFTNAFRYGHTLIQPFMFRLDNRYQPMEPNPRVPLSRVFFASWRVVLEGGIDPILRGLMATPAKLNRQNQIAVDEIRERLFEQVMRIGLDLPALNMQRSRDHGLPGYNAWRRFCGLPQPETVGQLGTVLRNLKLARKLMEQYGTPNNIDIWMGGVSEPLKRKGRVGPLLACIIGTQFRKLRDGDRFWWENEGVFSMQQRQALAQISLPRIICDNTGITTVSKNNIFMSNSYPRDFVNCSTLPALNLASWREAS

SEQ ID NO: 908857 - protein, 274 aa, Homo sapiens
MRKYLPTYRSYNDSVDPRIANVFTNAFRYGHTLIQPFMFRLDNRYQPMEPNPRVPLSRVFFASWRVVLEGGIDPILRGLMATPAKLNRQNQIAVDEIRERLFEQVMRIGLDLPALNMQRSRDHGLPGYNAWRRFCGLPQPETVGQLGTVLRNLKLARKLMEQYGTPNNIDIWMGGVSEPLKRKGRVGPLLACIIGTQFRKLRDGDRFWWENEGVFSMQQRQALAQISLPRIICDNTGITTVSKNNIFMSNSYPRDFVNCSTLPALNLASWREAS

SEQ ID NO: 908858 - protein, 274 aa, Homo sapiens; identical to SEQ ID NO: 908857

SEQ ID NO: 908859 - protein, 476 aa, Homo sapiens
MGVPFFSSLRCMVDLGPCWAGGLTAEMKLLLALAGLLAILATPQPSEGAAPAVLGEVDTSLVLSSMEEAKQLVDKAYKERRESIKQRLRSGSASPMELLSYFKQPVAATRTAVRAADYLHVALDLLERKLRSLWRRPFNVTDVLTPAQLNVLSKSSGCAYQDVGVTCPEQDKYRTITGMCNNRRSPTLGASNRAFVRWLPAEYEDGFSLPYGWTPGVKRNGFPVALARAVSNEIVRFPTDQLTPDQERSLMFMQWGQLLDHDLDFTPEPAARASFVTGVNCETSCVQQPPCFPLKIPPNDPRIKNQADCIPFFRSCPACPGSNITIRNQINALTSFVDASMVYGSEEPLARNLRNMSNQLGLLAVNQRFQDNGRALLPFDNLHDDPCLLTNRSARIPCFLAGDTRSSEMPELTSMHTLLLREHNRLATELKSLNPRWDGERLYQEARKIVGAMVQVGRLEHRAHGIQMCPCNILAV

SEQ ID NO: 908860 - protein, 115 aa, Homo sapiens [sequence omitted]

SEQ ID NO: 908861 - protein, 197 aa, Homo sapiens
MGVPFFSSLRCMVDLGPCWAGGLTAEMKLLLALAGLLAILATPQPSEGAAPAVLGEVDTSLVLSSMEEAKQLVDKAYKERRESIKQRLRSGSASPMELLSYFKQPVAATRTAVRAADYLHVALDLLERKLRSLWRRPFNVTDVLTPAQLNVLSKSSGCAYQDVGVTCPEQDKYRTITGMCNNRRSPRWASLCLYKLR

SEQ ID NO: 908862 - protein, 67 aa, Homo sapiens
MRKYLPTYRSYNDSVDPRIANVFTNAFRYGHTLIQPFMFRLDNRYQPMEPPPHCTRVALGSSERPTK

SEQ ID NO: 908863 - protein, 162 aa, Homo sapiens
MRSEPLRKKKKVDPKKDQEAKERLKRKIRKLEKATQELIPIEDFITPLKFLDKARERPQVELTFEETERRALLLKKWSLYKQQERKMERDTIRAMLEAQQEALEELQLESPKLHAEAIKRDPNLFPFEKEGPHYTPPIPNYQPPEGRYNDITKVYTQVEFKR

SEQ ID NO: 908864 - protein, 162 aa, Homo sapiens; identical to SEQ ID NO: 908863

SEQ ID NO: 908865 - protein, 206 aa, Homo sapiens [sequence omitted]

SEQ ID NO: 908866 - protein, 206 aa, Homo sapiens [sequence omitted]

SEQ ID NO: 908867 - protein, 206 aa, Homo sapiens [sequence omitted]

SEQ ID NO: 908868 - protein, 122 aa, Homo sapiens
AGALGAWSAGPQQGAPRAGLWRGARPEAARVAMTASVLRSISLALRPTSGLLGTWQTQLRETHQRASLLSFWELIPMRSEPLRKKKKVDPKKDQEAKERLKRKIRKLEKATQERAASGGAHL

SEQ ID NO: 908869 - protein, 105 aa, Homo sapiens
PVPAPRALRLFLRALGQAASSPEPTGCLLSQRRPLITVAMPGGLLLGDVAPNFEANTTVGRIRFHDFLGDSWGILFSHPRDFTPVCTTELGRAAKLGTRICQEEC

SEQ ID NO: 908870 - protein, 98 aa, Homo sapiens
GRIDSFSFLSGPKTNTTRAVTGRNFDEILRGSHLSPADSRNTTGLPPPVDWTRMGIRVMVLSQPSPESKKPKKLFPKGVFTQRSSHLGKKYLRYTPQP

SEQ ID NO: 908871 - protein, 105 aa, Homo sapiens; identical to SEQ ID NO: 908869

SEQ ID NO: 908872 - protein, 105 aa, Homo sapiens; identical to SEQ ID NO: 908869

SEQ ID NO: 908873 - protein, 90 aa, Homo sapiens
THASRTRGPTGCLLSQRRPLITVAMPGGLLLGDVAPNFEANTTVGRIRFHDFLGDSWGILFSHPRDFTPVCTTELGRAAKLGTRICQEEC

SEQ ID NO: 908874 - protein, 105 aa, Homo sapiens; identical to SEQ ID NO: 908869

SEQ ID NO: 908875 - protein, 130 aa, Homo sapiens
MIGIGSCAILCGHAGSSRERMNTGHACDSSCGVCFFFGPDKKLKLSILYPATTGRNFDEILRGSHLSPADSRNTTGLPPPVDWTRMGIRVMVLSQPSPESKKPKKLFPKGVFTQRSSHLGKKYLRYTPQP

SEQ ID NO: 908876 - protein, 105 aa, Homo sapiens; identical to SEQ ID NO: 908869

SEQ ID NO: 908877 - protein, 130 aa, Homo sapiens; identical to SEQ ID NO: 908875

SEQ ID NO: 908878 - protein, 105 aa, Homo sapiens
AIKGVGRRYAHVVLRKADIDLTKRAGELTEDEVERVITIMQNPRQYKIPDWFLNRQKEKDGHGSRDLHPRVRPEFAKRNVKLIALSIDSVEDHLAWSKDINAYNV

SEQ ID NO: 908879 - protein, 105 aa, Homo sapiens; identical to SEQ ID NO: 908869

SEQ ID NO: 908880 - protein, 105 aa, Homo sapiens; identical to SEQ ID NO: 908869

SEQ ID NO: 908881 - protein, 69 aa, Homo sapiens
DACSERAASVVELQEAKKTFPERSLHPKELPSGQEIPPLHTPALSLLEKAGAVSQRMSAGQLCFPAAIP

SEQ ID NO: 908882 - protein, 105 aa, Homo sapiens; identical to SEQ ID NO: 908869

SEQ ID NO: 908883 - protein, 105 aa, Homo sapiens; identical to SEQ ID NO: 908869

SEQ ID NO: 908884 - protein, 105 aa, Homo sapiens; identical to SEQ ID NO: 908869

SEQ ID NO: 908885 - protein, 105 aa, Homo sapiens; identical to SEQ ID NO: 908869

SEQ ID NO: 908886 - protein, 105 aa, Homo sapiens; identical to SEQ ID NO: 908869

SEQ ID NO: 908887 - protein, 95 aa, Homo sapiens
KSGINAECPITAGPTGCLLSQRRPLITVAMPGGLLLGDVAPNFEANTTVGRIRFHDFLGDSWGILFSHPRDFTPVCTTELGRAAKLGTRICQEEC

SEQ ID NO: 908888 - protein, 105 aa, Homo sapiens; identical to SEQ ID NO: 908869

SEQ ID NO: 908889 - protein, 124 aa, Homo sapiens
PPSDRRTVPSVPPSDDPKGLPTTPATIMARPRQLVCNINEYSDGPTNAREFGHSRGVAMPGGLLLGDVAPNFEANTTVGRIRFHDFLGDSWGILFSHPRDFTPVCTTELGRAAKLGTRICQEEC

SEQ ID NO: 908890 - protein, 105 aa, Homo sapiens; identical to SEQ ID NO: 908869

SEQ ID NO: 908891 - protein, 105 aa, Homo sapiens; identical to SEQ ID NO: 908869

SEQ ID NO: 908892 - protein, 115 aa, Homo sapiens
QKLPGIGKGHACDSSCGVCFFFGPDKKLKLSILYPATTGRNFDEILRGSHLSPADSRNTTGLPPPVDWTRMGIRVMVLSQPSPESKKPKKLFPKGVFTQRSSHLGKKYLRYTPQP

SEQ ID NO: 908893 - protein, 105 aa, Homo sapiens; identical to SEQ ID NO: 908869

SEQ ID NO: 908894 - protein, 74 aa, Homo sapiens
MTNVYSLDGILVFGLLFVCTCAYFKKVPRLKTWLLSEKKGVWGVFYKAAVIGTRLHAAVAIACVVMAFYVLFIK

SEQ ID NO: 908895 - protein, 74 aa, Homo sapiens; identical to SEQ ID NO: 908894

SEQ ID NO: 908896 - protein, 74 aa, Homo sapiens; identical to SEQ ID NO: 908894

SEQ ID NO: 908897 - protein, 74 aa, Homo sapiens; identical to SEQ ID NO: 908894

SEQ ID NO: 908898 - protein, 113 aa, Homo sapiens
KKTKCDRITEKIIHYFFTWMTGLDLEYVFFFFITLQEAESGNISQKSDEEDFVKVEDLPLKLTIYSEADLRKKMVEEEQKNHLSGEICEMQTEELAGNSETLKEPETVGAQSI

SEQ ID NO: 908899 - protein, 2016 aa, Homo sapiens
MATGGGPFEDGMNDQDLPNWSNENVDDRLNNMDWGAQQKKANRSSEKNKKKFGVESDKRVTNDISPESSPGVGRRRTKTPHTFPHSRYMSQMSVPEQAELEKLKQRINFSDLDQRSIGSDSQGRATAANNKRQLSENRKPFNFLPMQINTNKSKDASTSPPNRETIGSAQCKELFASALSNDLLQNCQVSEEDGRGEPAMESSQIVSRLVQIRDYITKASSMREDLVEKNERSANVERLTHLIDHLKEQEKSYMKFLKKILARDPQQEPMEEIENLKKQHDLLKRMLQQQEQLRALQGRQAALLALQHKAEQAIAVMDDSVVAETAGSLSGVSITSELNEELNDLIQRFHNQLRDSQPPAVPDNRRQAESLSLTREVSQSRKPSASERLPDEKVELFSKMRVLQEKKQKMDKLLGELHTLRDQHLNNSSSSPQRSVDQRSTSAPSASVGLAPVVNGESNSLTSSVPYPTASLVSQNESENEGHLNPSEKLQKLNEVRKRLNELRELVHYYEQTSDMMTDAVNENRKDEETEESEYDSEHENSEPVTNIRNPQVASTWNEVNSHSNAQCVSNNRDGRTVNSNCEINNRSAANIRALNVPPSLDCRYNREGEQEIHVAQGEDDEEEEEEAEEEGVSGASLSSHRSSLVDEHPEDAEFEQKINRLMAAKQKLRQLQDLVAMVQDDDAAQGVISASASNLDDFYPAEEDTKQNSNNTRGNANKTQKDTGVNEKAREKFYEAKLQQQQRELKQLQEERKKLIDIQEKIQALQTACPDLQLSAASVGNCPTKKYMPAVTSTPTVNQHETSTSKSVFEPEDSSIVDNELWSEMRRHEMLREELRQRRKQLEALMAEHQRRQGLAETASPVAVSLRSDGSENLCTPQQSRTEKTMATWGGSTQCALDEEGDEDGYLSEGIVRTDEEEEEEQDASSNDNFSVCPSNSVNHNSYNRKETKNTWKNNCPFSADENYRPLAKTRQQNISMQRQENLRWVSELSYVEEKEQWQEQINQLKKQLDFSVSICQTLMQDQQTLSCLLQTLLTGPYSVMPSNVASPQVHFIMHQLNQCYTQLTWQQNNVQRLKQMLNELMRQQNQHPEKPGGKERGSSASHPPSPSLFCPFSFPTQPVNLFNIPGFTNFSSFAPGMNFSPLFPSNFGDFSQNISTPSEQQQPLAQNSSGKTEYMAFPKPFESSSSIGAEKPRNKKLPEEEVESSRTPWLYEQEGEVEKPFIKTGFSVSVEKSTSSNRKNQLDTNGRRRQFDEESLESFSSMPDPVDPTTVTKTFKTRKASAQASLASKDKTPKSKSKKRNSTQLKSRVKNIRYESASMSSTCEPCKSRNRHSAQTEEPVQAKVFSRKNHEQLEKIIKCNRSTEISSETGSDFSMFEALRDTIYSEVATLISQNESRPHFLIELFHELQLLNTDYLRQRALYALQDIVSRHISESHEKGENVKSVNSGTWIASNSELTPSESLATTDDETFEKNFERETHKISEQNDADNASVLSVSSNFEPFATDDLGNTVIHLDQALARMREYERMKTEAESNSNMRCICRIIEDGDGAGAETPVIENRSSQQPVSEVSTIPCPRIDTQQLDRQIKAIMKEVIPFLKEHMDEVCSSQLLTSVRRMVLTLTQQNDESKEFVKFFHKQLGSILQDSLAKFAGRKLKDCGEDLLVEISEVLFNELAFFKLMQDLDNNSITVKQRCKRKIEATGVIQSCAKEAKRILEDHGSPAGEIDDEDKDKDETETVKQTQTSEVYDGPKNVRSDISDQEEDEESEGCPVSINLSKAETQALTNYGSGEDENEDEEMEEFEEGPVDVQTSLQANTEATEENEHDEQVLQRDFKKTAESKNVPLEREATSKNDQNNCPVKPCYLNILEDEQPLNSAAHKESPPTVDSTQQPNPLPLRLPEMEPLVPRVKEVKSAQETPESSLAGSPDTESPVLVNDYEAESGNISQKSDEEDFVKVEDLPLKLTIYSEADLRKKMVEEEQKNHLSGEICEMQTEELAGNSETLKEPETVGAQSI

SEQ ID NO: 908900 - protein, 2016 aa, Homo sapiens; identical to SEQ ID NO: 908899

SEQ ID NO: 908901 - protein, 2055 aa, Homo sapiens
MATGGGPFEDGMNDQDLPNWSNENVDDRLNNMDWGAQQKKANRSSEKNKKKFGVESDKRVTNDISPESSPGVGRRRTKTPHTFPHSRYMSQMSVPEQAELEKLKQRINFSDLDQRSIGSDSQGRATAANNKRQLSENRKPFNFLPMQINTNKSKDASTSPPNRETIGSAQCKELFASALSNDLLQNCQVSEEDGRGEPAMESSQIVSRLVQIRDYITKASSMREDLVEKNERSANVERLTHLIDHLKEQEKSYMKFLKKILARENEEEDVRTIDSAVGSGSVAESTSLNIDVQSEASDTTARDPQQEPMEEIENLKKQHDLLKRMLQQQEQLRALQGRQAALLALQHKAEQAIAVMDDSVVAETAGSLSGVSITSELNEELNDLIQRFHNQLRDSQPPAVPDNRRQAESLSLTREVSQSRKPSASERLPDEKVELFSKMRVLQEKKQKMDKLLGELHTLRDQHLNNSSSSPQRSVDQRSTSAPSASVGLAPVVNGESNSLTSSVPYPTASLVSQNESENEGHLNPSEKLQKLNEVRKRLNELRELVHYYEQTSDMMTDAVNENRKDEETEESEYDSEHENSEPVTNIRNPQVASTWNEVNSHSNAQCVSNNRDGRTVNSNCEINNRSAANIRALNVPPSLDCRYNREGEQEIHVAQGEDDEEEEEEAEEEGVSGASLSSHRSSLVDEHPEDAEFEQKINRLMAAKQKLRQLQDLVAMVQDDDAAQGVISASASNLDDFYPAEEDTKQNSNNTRGNANKTQKDTGVNEKAREKFYEAKLQQQQRELKQLQEERKKLIDIQEKIQALQTACPDLQLSAASVGNCPTKKYMPAVTSTPTVNQHETSTSKSVFEPEDSSIVDNELWSEMRRHEMLREELRQRRKQLEALMAEHQRRQGLAETASPVAVSLRSDGSENLCTPQQSRTEKTMATWGGSTQCALDEEGDEDGYLSEGIVRTDEEEEEEQDASSNDNFSVCPSNSVNHNSYNRKETKNTWKNNCPFSADENYRPLAKTRQQNISMQRQENLRWVSELSYVEEKEQWQEQINQLKKQLDFSVSICQTLMQDQQTLSCLLQTLLTGPYSVMPSNVASPQVHFIMHQLNQCYTQLTWQQNNVQRLKQMLNELMRQQNQHPEKPGGKERGSSASHPPSPSLFCPFSFPTQPVNLFNIPGFTNFSSFAPGMNFSPLFPSNFGDFSQNISTPSEQQQPLAQNSSGKTEYMAFPKPFESSSSIGAEKPRNKKLPEEEVESSRTPWLYEQEGEVEKPFIKTGFSVSVEKSTSSNRKNQLDTNGRRRQFDEESLESFSSMPDPVDPTTVTKTFKTRKASAQASLASKDKTPKSKSKKRNSTQLKSRVKNIRYESASMSSTCEPCKSRNRHSAQTEEPVQAKVFSRKNHEQLEKIIKCNRSTEISSETGSDFSMFEALRDTIYSEVATLISQNESRPHFLIELFHELQLLNTDYLRQRALYALQDIVSRHISESHEKGENVKSVNSGTWIASNSELTPSESLATTDDETFEKNFERETHKISEQNDADNASVLSVSSNFEPFATDDLGNTVIHLDQALARMREYERMKTEAESNSNMRCICRIIEDGDGAGAETPVIENRSSQQPVSEVSTIPCPRIDTQQLDRQIKAIMKEVIPFLKEHMDEVCSSQLLTSVRRMVLTLTQQNDESKEFVKFFHKQLGSILQDSLAKFAGRKLKDCGEDLLVEISEVLFNELAFFKLMQDLDNNSITVKQRCKRKIEATGVIQSCAKEAKRILEDHGSPAGEIDDEDKDKDETETVKQTQTSEVYDGPKNVRSDISDQEEDEESEGCPVSINLSKAETQALTNYGSGEDENEDEEMEEFEEGPVDVQTSLQANTEATEENEHDEQVLQRDFKKTAESKNVPLEREATSKNDQNNCPVKPCYLNILEDEQPLNSAAHKESPPTVDSTQQPNPLPLRLPEMEPLVPRVKEVKSAQETPESSLAGSPDTESPVLVNDYEAESGNISQKSDEEDFVKVEDLPLKLTIYSEADLRKKMVEEEQKNHLSGEICEMQTEELAGNSETLKEPETVGAQSI

SEQ ID NO: 908902 - protein, 2016 aa, Homo sapiens; identical to SEQ ID NO: 908899

SEQ ID NO: 908903 - protein, 878 aa, Homo sapiens
MNFSPLFPSNFGDFSQNISTPSEQQQPLAQNSSGKTEYMAFPKPFESSSSIGAEKPRNKKLPEEEVESSRTPWLYEQEGEVEKPFIKTGFSVSVEKSTSSNRKNQLDTNGRRRQFDEESLESFSSMPDPVDPTTVTKTFKTRKASAQASLASKDKTPKSKSKKRNSTQLKSRVKNIRYESASMSSTCEPCKSRNRHSAQTEEPVQAKVFSRKNHEQLEKIIKCNRSTEISSETGSDFSMFEALRDTIYSEVATLISQNESRPHFLIELFHELQLLNTDYLRQRALYALQDIVSRHISESHEKGENVKSVNSGTWIASNSELTPSESLATTDDETFEKNFERETHKISEQNDADNASVLSVSSNFEPFATDDLGNTVIHLDQALARMREYERMKTEAESNSNMRCICRIIEDGDGAGAETPVIENRSSQQPVSEVSTIPCPRIDTQQLDRQIKAIMKEVIPFLKEHMDEVCSSQLLTSVRRMVLTLTQQNDESKEFVKFFHKQLGSILQDSLAKFAGRKLKDCGEDLLVEISEVLFNELAFFKLMQDLDNNSITVKQRCKRKIEATGVIQSCAKEAKRILEDHGSPAGEIDDEDKDKDETETVKQTQTSEVYDGPKNVRSDISDQEEDEESEGCPVSINLSKAETQALTNYGSGEDENEDEEMEEFEEGPVDVQTSLQANTEATEENEHDEQVLQRDFKKTAESKNVPLEREATSKNDQNNCPVKPCYLNILEDEQPLNSAAHKESPPTVDSTQQPNPLPLRLPEMEPLVPRVKEVKSAQETPESSLAGSPDTESPVLVNDYEAESGNISQKSDEEDFVKVEDLPLKLTIYSEADLRKKMVEEEQKNHLSGEICEMQTEELAGNSETLKEPETVGAQSI

SEQ ID NO: 908904 - protein, 2033 aa, Homo sapiens
MATGGGPFEDGMNDQDLPNWSNENVDDRLNNMDWGAQQKKANRSSEKNKKKFGVESDKRVTNDISPESSPGVGRRRTKTPHTFPHSRYMSQMSVPEQAELEKLKQRINFSDLDQRSIGSDSQGRATAANNKRQLSENRKPFNFLPMQINTNKSKDASTSPPNRETIGSAQCKELFASALSNDLLQNCQVSEEDGRGEPAMESSQIVSRLVQIRDYITKASSMREDLVEKNERSANVERLTHLIDHLKEQEKSYMKFLKKILARDPQQEPMEEIENLKKQHDLLKRMLQQQEQLRALQGRQAALLALQHKAEQAIAVMDDSVVAETAGSLSGVSITSELNEELNDLIQRFHNQLRDSQPPAVPDNRRQAESLSLTREVSQSRKPSASERLPDEKVELFSKMRVLQEKKQKMDKLLGELHTLRDQHLNNSSSSPQRSVDQRSTSAPSASVGLAPVVNGESNSLTSSVPYPTASLVSQNESENEGHLNPSEKLQKLNEVRKRLNELRELVHYYEQTSDMMTDAVNENRKDEETEESEYDSEHENSEPVTNIRNPQVASTWNEVNSHSNAQCVSNNRDGRTVNSNCEINNRSAANIRALNVPPSLDCRYNREGEQEIHVAQGEDDEEEEEEAEEEGVSGASLSSHRSSLVDEHPEDAEFEQKINRLMAAKQKLRQLQDLVAMVQDDDAAQGVISASASNLDDFYPAEEDTKQNSNNTRGNANKTQKDTGVNEKAREKFYEAKLQQQQRELKQLQEERKKLIDIQEKIQALQTACPDLQLSAASVGNCPTKKYMPAVTSTPTVNQHETSTSKSVFEPEDSSIVDNELWSEMRRHEMLREELRQRRKQLEALMAEHQRRQGLAETASPVAVSLRSDGSENLCTPQQSRTEKTMATWGGSTQCALDEEGDEDGYLSEGIVRTDEEEEEEQDASSNDNFSVCPSNSVNHNSYNRKETKNTWKNNCPFSADENYRPLAKTRQQNISMQRQENLRWVSELSYVEEKEQWQEQINQLKKQLDFSVSICQTLMQDQQTLSCLLQTLLTGPYSVMPSNVASPQVHFIMHQLNQCYTQLTWQQNNVQRLKQMLNELMRQQNQHPEKPGGKERGSSASHPPSPSLFCPFSFPTQPVNLFNIPGFTNFSSFAPGMNFSPLFPSNFGDFSQNISTPSEQQQPLAQNSSGKTEYMAFPKPFESSSSIGAEKPRNKKLPEEEVESSRTPWLYEQEGEVEKPFIKTGFSVSVEKSTSSNRKNQLDTNGRRRQFDEESLESFSSMPDPVDPTTVTKTFKTRKASAQASLASKDKTPKSKSKKRNSTQLKSRVKNIRYESASMSSTCEPCKSRNRHSAQTEEPVQAKVFSRKNHEQLEKIIKCNRSTEISSETGSDFSMFEALRDTIYSEVATLISQNESRPHFLIELFHELQLLNTDYLRQRALYALQDIVSRHISESHEKGENVKSVNSGTWIASNSELTPSESLATTDDETFEKNFERETHKISEQNDADNASVLSVSSNFEPFATDDLGNTVIHLDQALARMREYERMKTEAESNSNMRCICRIIEDGDGAGAETPVIENRSSQQPVSEVSTIPCPRIDTQQLDRQIKAIMKEVIPFLKEHMDEVCSSQLLTSVRRMVLTLTQQNDESKEFVKFFHKQLGSILQDSLAKFAGRKLKDCGEDLLVEISEVLFNELAFFKLMQDLDNNSITVKQRCKRKIEATGVIQSCAKEAKRILEDHGSPAGEIDDEDKDKDETETVKQTQTSEVYDGPKNVRSDISDQEEDEESEGCPVSINLSKAETQALTNYGSGEDENEDEEMEEFEEGPVDVQTSLQANTEATEENEHDEQVLQRDFKKTAESKNVPLEREATSKNDQNNCPVKPCYLNILEDEQPLNSAAHKESPPTVDSTQQPNPLPLRLPEMEPLVPRVKEVKSAQETPESSLAGSPDTESPVLVNDYEAESGNISQKSDEEDFVKVEDLPLKLTIYSEADLRKKMVEEEQKNHLSGEICEMQTEELAEFSKIFFSSLFTFIYSWVVFRGSSNSVLTYSMHI

SEQ ID NO: 908905 - protein, 1987 aa, Homo sapiens
MATGGGPFEDGMNDQDLPNWSNENVDDRLNNMDWGAQQKKANRSSEKNKKKFGVESDKRVTNDISPESSPGVGRRRTKTPHTFPHSRYMSQMSVPEQAELEKLKQRINFSDLDQRSIGSDSQGRATAANNKRQLSENRKPFNFLPMQINTNKSKDASTSPPNRETIGSAQCKELFASALSNDLLQNCQVSEEDGRGEPAMESSQIVSRLVQIRDYITKASSMREDLVEKNERSANVERLTHLIDHLKEQEKSYMKFLKKILARDPQQEPMEEIENLKKQHDLLKRMLQQQEQLRALQGRQAALLALQHKAEQAIAVMDDSVVAETAGSLSGVSITSELNEELNDLIQRFHNQLRDSQPPAVPDNRRQAESLSLTREVSQSRKPSASERLPDEKVELFSKMRVLQEKKQKMDKLLGELHTLRDQHLNNSSSSPQRSVDQRSTSAPSASVGLAPVVNGESNSLTSSVPYPTASLVSQNESENEGHLNPSEKLQKLNEVRKRLNELRELVHYYEQTSDMMTDAVNENRKDEETEESEYDSEHENSEPVTNIRNPQVASTWNEVNSHSNAQCVSNNRDGRTVNSNCEINNRSAANIRALNVPPSLDCRYNREGEQEIHVAQGEDDEEEEEEAEEEGVSGASLSSHRSSLVDEHPEDAEFEQKINRLMAAKQKLRQLQDLVAMVQDDDAAQGVISASASNLDDFYPAEEDTKQNSNNTRGNANKTQKDTGVNEKAREKFYEAKLQQQQRELKQLQEERKKLIDIQEKIQALQTACPDLQLSAASVGNCPTKKYMPAVTSTPTVNQHETSTSKSVFEPEDSSIVDNELWSEMRRHEMLREELRQRRKQLEALMAEHQRRQGLAETASPVAVSLRSDGSENLCTPQQSRTEKTMATWGGSTQCALDEEGDEDGYLSEGIVRTDEEEEEEQDASSNDNFSVCPSNSVNHNSYNRKETKNTWKNNCPFSADENYRPLAKTRQQNISMQRQENLRWVSELSYVEEKEQWQEQINQLKKQLDFSVSICQTLMQDQQTLSCLLQTLLTGPYSVMPSNVASPQVHFIMHQLNQCYTQLTWQQNNVQRLKQMLNELMRQQNQHPEKPGGKERGSSASHPPSPSLFCPFSFPTQPVNLFNIPGFTNFSSFAPGMNFSPLFPSNFGDFSQNISTPSEQQQPLAQNSSGKTEYMAFPKPFESSSSIGAEKPRNKKLPEEEVESSRTPWLYEQEGEVEKPFIKTGFSVSVEKSTSSNRKNQLDTNGRRRQFDEESLESFSSMPDPVDPTTVTKTFKTRKASAQASLASKDKTPKSKSKKRNSTQLKSRVKNIRYESASMSSTCEPCKSRNRHSAQTEEPVQAKVFSRKNHEQLEKIIKCNRSTEISSETGSDFSMFEALRDTIYSEVATLISQNESRPHFLIELFHELQLLNTDYLRQRALYALQDIVSRHISESHEKGENVKSVNSGTWIASNSELTPSESLATTDDETFEKNFERETHKISEQNDADNASVLSVSSNFEPFATDDLGNTVIHLDQALARMREYERMKTEAESNSNMRCICRIIEDGDGAGAETPVIENRSSQQPVSEVSTIPCPRIDTQQLDRQIKAIMKEVIPFLKEHMDEVCSSQLLTSVRRMVLTLTQQNDESKEFVKFFHKQLGSILQDSLAKFAGRKLKDCGEDLLVEISEVLFNELAFFKLMQDLDNNSITVKQRCKRKIEATGVIQSCAKEAKRILEDHGSPAGEIDDEDKDKDETETVKQTQTSEVYDGPKNVRSDISDQEEDEESEGCPVSINLSKAETQALTNYGSGEDENEDEEMEEFEEGPVDVQTSLQANTEATEENEHDEQVLQRDFKKTAESKNVPLEREATSKNDQNNCPVKPCYLNILEDEQPLNSAAHKESPPTVDSTQQPNPLPLRLPEMEPLVPRVKEVKSAQETPESSLAGSPDTESPVLVNDYEAESGNISQKSDEVEDLPLKLTIYSEADLRKKMVEEEQKNHVKCRPKN

SEQ ID NO: 908906 - protein, 1971 aa, Homo sapiens
MATGGGPFEDGMNDQDLPNWSNENVDDRLNNMDWGAQQKKANRSSEKNKKKFGVESDKRVTNDISPESSPGVGRRRTKTPHTFPHSRYMSQMSVPEQAELEKLKQRINFSDLDQRSIGSDSQGRATAANNKRQLSENRKPFNFLPMQINTNKSKDASTSPPNRETIGSAQCKELFASALSNDLLQNCQVSEEDGRGEPAMESSQIVSRLVQIRDYITKASSMREDLVEKNERSANVERLTHLIDHLKEQEKSYMKFLKKILARDPQQEPMEEIENLKKQHDLLKRMLQQQEQLRALQGRQAALLALQHKAEQAIAVMDDSVVAETAGSLSGVSITSELNEELNDLIQRFHNQLRDSQPPAVPDNRRQAESLSLTREVSQSRKPSASERLPDEKVELFSKMRVLQEKKQKMDKLLGELHTLRDQHLNNSSSSPQRSVDQRSTSAPSASVGLAPVVNGESNSLTSSVPYPTASLVSQNESENEGHLNPSEKLQKLNEVRKRLNELRELVHYYEQTSDMMTDAVNENRKDEETEESEYDSEHENSEPVTNIRNPQVASTWNEVNSHSNAQCVSNNRDGRTVNSNCEINNRSAANIRALNVPPSLDCRYNREGEQEIHVAQGEDDEEEEEEAEEEGVSGASLSSHRSSLVDEHPEDAEFEQKINRLMAAKQKLRQLQDLVAMVQDDDAAQGVISASASNLDDFYPAEEDTKQNSNNTRGNANKTQKDTGVNEKAREKFYEAKLQQQQRELKQLQEERKKLIDIQEKIQALQTACPDLQLSAASVGNCPTKKYMPAVTSTPTVNQHETSTSKSVFEPEDSSIVDNELWSEMRRHEMLREELRQRRKQLEALMAEHQRRQGLAETASPVAVSLRSDGSENLCTPQQSRTEKTMATWGGSTQCALDEEGDEDGYLSEGIVRTDEEEEEEQDASSNDNFSVCPSNSVNHNSYNRKETKNTWKNNCPFSADENYRPLAKTRQQNISMQRQENLRWVSELSYVEEKEQWQEQINQLKKQLDFSVSICQTLMQDQQTLSCLLQTLLTGPYSVMPSNVASPQVHFIMHQLNQCYTQLTWQQNNVQRLKQMLNELMRQQNQHPEKPGGKERGSSASHPPSPSLFCPFSFPTQPVNLFNIPGFTNFSSFAPGMNFSPLFPSNFGDFSQNISTPSEQQQPLAQNSSGKTEYMAFPKPFESSSSIGAEKPRNKKLPEEEVESSRTPWLYEQEGEVEKPFIKTGFSVSVEKSTSSNRKNQLDTNGRRRQFDEESLESFSSMPDPVDPTTVTKTFKTRKASAQASLASKDKTPKSKSKKRNSTQLKSRVKNIRYESASMSSTCEPCKSRNRHSAQTEEPVQAKVFSRKNHEQLEKIIKCNRSTEISSETGSDFSMFEALRDTIYSEVATLISQNESRPHFLIELFHELQLLNTDYLRQRALYALQDIVSRHISESHEKGENVKSVNSGTWIASNSELTPSESLATTDDETFEKNFERETHKISEQNDADNASVLSVSSNFEPFATDDLGNTVIHLDQALARMREYERMKTEAESNSNMRCICRIIEDGDGAGAETPVIENRSSQQPVSEVSTIPCPRIDTQQLDRQIKAIMKEVIPFLKEHMDEVCSSQLLTSVRRMVLTLTQQNDESKEFVKFFHKQLGSILQDSLAKFAGRKLKDCGEDLLVEISEVLFNELAFFKLMQDLDNNSITVKQRCKRKIEATGVIQSCAKEAKRILEDHGSPAGEIDDEDKDKDETETVKQTQTSEVYDGPKNVRSDISDQEEDEESEGCPVSINLSKAETQALTNYGSGEDENEDEEMEEFEEGPVDVQTSLQANTEATEENEHDEQVLQRDFKKTAESKNVPLEREATSKNDQNNCPVKPCYLNILEDEQPLNSAAHKESPPTVDSTQQPNPLPLRLPEMEPLVPRVKEVKSAQETPESSLAGSPDTESPVLVNDYICLLQFGVRVGFERDPLWPLEASRNQAKGVHC

SEQ ID NO: 908907 - protein, 114 aa, Homo sapiens [sequence omitted]

SEQ ID NO: 908908 - protein, 1472 aa, Homo sapiens
MATGGGPFEDGMNDQDLPNWSNENVDDRLNNMDWGAQQKKANRSSEKNKKKFGVESDKRVTNDISPESSPGVGRRRTKTPHTFPHSRYMSQMSVPEQAELEKLKQRINFSDLDQRSIGSDSQGRATAANNKRQLSENRKPFNFLPMQINTNKSKDASTSPPNRETIGSAQCKELFASALSNDLLQNCQVSEEDGRGEPAMESSQIVSRLVQIRDYITKASSMREDLVEKNERSANVERLTHLIDHLKEQEKSYMKFLKKILARDPQQEPMEEIENLKKQHDLLKRMLQQQEQLRALQGRQAALLALQHKAEQAIAVMDDSVVAETAGSLSGVSITSELNEELNDLIQRFHNQLRDSQPPAVPDNRRQAESLSLTREVSQSRKPSASERLPDEKVELFSKMRVLQEKKQKMDKLLGELHTLRDQHLNNSSSSPQRSVDQRSTSAPSASVGLAPVVNGESNSLTSSVPYPTASLVSQNESENEGHLNPSEKLQKLNEVRKRLNELRELVHYYEQTSDMMTDAVNENRKDEETEESEYDSEHENSEPVTNIRNPQVASTWNEVNSHSNAQCVSNNRDGRTVNSNCEINNRSAANIRALNVPPSLDCRYNREGEQEIHVAQGEDDEEEEEEAEEEGVSGASLSSHRSSLVDEHPEDAEFEQKINRLMAAKQKLRQLQDLVAMVQDDDAAQGVISASASNLDDFYPAEEDTKQNSNNTRGNANKTQKDTGVNEKAREKFYEAKLQQQQRELKQLQEERKKLIDIQEKIQALQTACPDLQLSAASVGNCPTKKYMPAVTSTPTVNQHETSTSKSVFEPEDSSIVDNELWSEMRRHEMLREELRQRRKQLEALMAEHQRRQGLAETASPVAVSLRSDGSENLCTPQQSRTEKTMATWGGSTQCALDEEGDEDGYLSEGIVRTDEEEEEEQDASSNDNFSVCPSNSVNHNSYNRKETKNTWKNNCPFSADENYRPLAKTRQQNISMQRQENLRWVSELSYVEEKEQWQEQINQLKKQLDFSVSICQTLMQDQQTLSCLLQTLLTGPYSVMPSNVASPQVHFIMHQLNQCYTQLTWQQNNVQRLKQMLNELMRQQNQHPEKPGGKERGSSASHPPSPSLFCPFSFPTQPVNLFNIPGFTNFSSFAPGMNFSPLFPSNFGDFSQNISTPSEQQQPLAQNSSGKTEYMAFPKPFESSSSIGAEKPRNKKLPEEEVESSRTPWLYEQEGEVEKPFIKTGFSVSVEKSTSSNRKNQLDTNGRRRQFDEESLESFSSMPDPVDPTTVTKTFKTRKASAQASLASKDKTPKSKSKKRNSTQLKSRVKNIRYESASMSSTCEPCKSRNRHSAQTEEPVQAKVFSRKNHEQLEKIIKCNRSTEISSETGSDFSMFEALRDTIYSEVATLISQNESRPHFLIELFHELQLLNTDYLRQRALYALQDIVSRHISESHEKGENVKSVNSGTWIASNSELTPSESLATTDDVS

SEQ ID NO: 908909 - protein, 530 aa, Homo sapiens
MATGGGPFEDGMNDQDLPNWSNENVDDRLNNMDWGAQQKKANRSSEKNKKKFGVESDKRVTNDISPESSPGVGRRRTKTPHTFPHSRYMSQMSVPEQAELEKLKQRINFSDLDQRSIGSDSQGRATAANNKRQLSENRKPFNFLPMQINTNKSKDASTSPPNRETIGSAQCKELFASALSNDLLQNCQVSEEDGRGEPAMESSQIVSRLVQIRDYITKASSMREDLVEKNERSANVERLTHLIDHLKEQEKSYMKFLKKILARENEEEDVRTIDSAVGSGSVAESTSLNIDVQSEASDTTARDPQQEPMEEIENLKKQHDLLKRMLQQQEQLRALQGRQAALLALQHKAEQAIAVMDDSVVAETAGSLSGVSITSELNEELNDLIQRFHNQLRDSQPPAVPDNRRQAESLSLTREVSQSRKPSASERLPDEKVELFSKMRVLQEKKQKMDKLLGELHTLRDQHLNNSSSSPQRSVDQRSTSAPSASVGLAPVVNGESNSLTSSVPYPTASLVSQNESENEGHLNPSEKLQ

SEQ ID NO: 908910 - protein, 2024 aa, Homo sapiens
MATGGGPFEDGMNDQDLPNWSNENVDDRLNNMDWGAQQKKANRSSEKNKKKFGVESDKRVTNDISPESSPGVGRRRTKTPHTFPHSRYMSQMSVPEQAELEKLKQRINFSDLDQRSIGSDSQGRATAANNKRQLSENRKPFNFLPMQINTNKSKDASTSPPNRETIGSAQCKELFASALSNDLLQNCQVSEEDGRGEPAMESSQIVSRLVQIRDYITKASSMREDLVEKNERSANVERLTHLIDHLKEQEKSYMKFLKKILARDPQQEPMEEIENLKKQHDLLKRMLQQQEQLRALQGRQAALLALQHKAEQAIAVMDDSVVAETAGSLSGVSITSELNEELNDLIQRFHNQLRDSQPPAVPDNRRQAESLSLTREVSQSRKPSASERLPDEKVELFSKMRVLQEKKQKMDKLLGELHTLRDQHLNNSSSSPQRSVDQRSTSAPSASVGLAPVVNGESNSLTSSVPYPTASLVSQNESENEGHLNPSEKLQKLNEVRKRLNELRELVHYYEQTSDMMTDAVNENRKDEETEESEYDSEHENSEPVTNIRNPQVASTWNEVNSHSNAQCVSNNRDGRTVNSNCEINNRSAANIRALNVPPSLDCRYNREGEQEIHVAQGEDDEEEEEEAEEEGVSGASLSSHRSSLVDEHPEDAEFEQKINRLMAAKQKLRQLQDLVAMVQDDDAAQGVISASASNLDDFYPAEEDTKQNSNNTRGNANKTQKDTGVNEKAREKFYEAKLQQQQRELKQLQEERKKLIDIQEKIQALQTACPDLQLSAASVGNCPTKKYMPAVTSTPTVNQHETSTSKSVFEPEDSSIVDNELWSEMRRHEMLREELRQRRKQLEALMAEHQRRQGLAETASPVAVSLRSDGSENLCTPQQSRTEKTMATWGGSTQCALDEEGDEDGYLSEGIVRTDEEEEEEQDASSNDNFSVCPSNSVNHNSYNRKETKNTWKNNCPFSADENYRPLAKTRQQNISMQRQENLRWVSELSYVEEKEQWQEQINQLKKQLDFSVSICQTLMQDQQTLSCLLQTLLTGPYSVMPSNVASPQVHFIMHQLNQCYTQLTWQQNNVQRLKQMLNELMRQQNQHPEKPGGKERGSSASHPPSPSLFCPFSFPTQPVNLFNIPGFTNFSSFAPGMNFSPLFPSNFGDFSQNISTPSEQQQPLAQNSSGKTEYMAFPKPFESSSSIGAEKPRNKKLPEEEVESSRTPWLYEQEGEVEKPFIKTGFSVSVEKSTSSNRKNQLDTNGRRRQFDEESLESFSSMPDPVDPTTVTKTFKTRKASAQASLASKDKTPKSKSKKRNSTQLKSRVKNIRYESASMSSTCEPCKSRNRHSAQTEEPVQAKVFSRKNHEQLEKIIKCNRSTEISSETGSDFSMFEALRDTIYSEVATLISQNESRPHFLIELFHELQLLNTDYLRQRALYALQDIVSRHISESHEKGENVKSVNSGTWIASNSELTPSESLATTDDETFEKNFERETHKISEQNDADNASVLSVSSNFEPFATDDLGNTVIHLDQALARMREYERMKTEAESNSNMRCICRIIEDGDGAGAGTTVNNLEETPVIENRSSQQPVSEVSTIPCPRIDTQQLDRQIKAIMKEVIPFLKEHMDEVCSSQLLTSVRRMVLTLTQQNDESKEFVKFFHKQLGSILQDSLAKFAGRKLKDCGEDLLVEISEVLFNELAFFKLMQDLDNNSITVKQRCKRKIEATGVIQSCAKEAKRILEDHGSPAGEIDDEDKDKDETETVKQTQTSEVYDGPKNVRSDISDQEEDEESEGCPVSINLSKAETQALTNYGSGEDENEDEEMEEFEEGPVDVQTSLQANTEATEENEHDEQVLQRDFKKTAESKNVPLEREATSKNDQNNCPVKPCYLNILEDEQPLNSAAHKESPPTVDSTQQPNPLPLRLPEMEPLVPRVKEVKSAQETPESSLAGSPDTESPVLVNDYEAESGNISQKSDEEDFVKVEDLPLKLTIYSEADLRKKMVEEEQKNHLSGEICEMQTEELAGNSETLKEPETVGAQSI

SEQ ID NO: 908911 - protein, 114 aa, Homo sapiens
FAAASTRVENIKTGSDFSMFEALRDTIYSEVATLISQNESRPHFLIELFHELQLLNTDYLRQRALYALQDIVSRHISESHEKGENVKSVNSGTWIASNSELTPSESLATTDDVS

SEQ ID NO: 908912 - protein, 1961 aa, Homo sapiens
MATGGGPFEDGMNDQDLPNWSNENVDDRLNNMDWGAQQKKANRSSEKNKKKFGVESDKRVTNDISPESSPGVGRRRTKTPHTFPHSRYMSQMSVPEQAELEKLKQRINFSDLDQRSIGSDSQGRATAANNKRQLSENRKPFNFLPMQINTNKSKDASTSPPNRETIGSAQCKELFASALSNDLLQNCQVSEEDGRGEPAMESSQIVSRLVQIRDYITKASSMREDLVEKNERSANVERLTHLIDHLKEQEKSYMKFLKKILARDPQQEPMEEIENLKKQHDLLKRMLQQQEQLRALQGRQAALLALQHKAEQAIAVMDDSVVAETAGSLSGVSITSELNEELNDLIQRFHNQLRDSQPPAVPDNRRQAESLSLTREVSQSRKPSASERLPDEKVELFSKMRVLQEKKQKMDKLLGELHTLRDQHLNNSSSSPQRSVDQRSTSAPSASVGLAPVVNGESNSLTSSVPYPTASLVSQNESENEGHLNPSEKLQKLNEVRKRLNELRELVHYYEQTSDMMTDAVNENRKDEETEESEYDSEHENSEPVTNIRNPQVASTWNEVNSHSNAQCVSNNRDGRTVNSNCEINNRSAANIRALNVPPSLDCRYNREGEQEIHVAQGEDDEEEEEEAEEEGVSGASLSSHRSSLVDEHPEDAEFEQKINRLMAAKQKLRQLQDLVAMVQDDDAAQGVISASASNLDDFYPAEEDTKQNSNNTRGNANKTQKDTGVNEKAREKFYEAKLQQQQRELKQLQEERKKLIDIQEKIQALQTACPDLQLSAASVGNCPTKKYMPAVTSTPTVNQHETSTSKSVFEPEDSSIVDNELWSEMRRHEMLREELRQRRKQLEALMAEHQRRQGLAETASPVAVSLRSDGSENLCTPQQSRTEKTMATWGGSTQCALDEEGDEDGYLSEGIVRTDEEEEEEQDASSNDNFSVCPSNSVNHNSYNRKETKNTWKNNCPFSADENYRPLAKTRQQNISMQRQENLRWVSELSYVEEKEQWQEQINQLKKQLDFSVSICQTLMQDQQTLSCLLQTLLTGPYSVMPSNVASPQVHFIMHQLNQCYTQLTWQQNNVQRLKQMLNELMRQQNQHPEKPGGKERGSSASHPPSPSLFCPFSFPTQPVNLFNIPGFTNFSSFAPGMNFSPLFPSNFGDFSQNISTPSEQQQPLAQNSSGKTEYMAFPKPFESSSSIGAEKPRNKKLPEEEVESSRTPWLYEQEGEVEKPFIKTGFSVSVEKSTSSNRKNQLDTNGRRRQFDEESLESFSSMPDPVDPTTVTKTFKTRKASAQASLASKDKTPKSKSKKRNSTQLKSRVKNIKTGSDFSMFEALRDTIYSEVATLISQNESRPHFLIELFHELQLLNTDYLRQRALYALQDIVSRHISESHEKGENVKSVNSGTWIASNSELTPSESLATTDDETFEKNFERETHKISEQNDADNASVLSVSSNFEPFATDDLGNTVIHLDQALARMREYERMKTEAESNSNMRCICRIIEDGDGAGAETPVIENRSSQQPVSEVSTIPCPRIDTQQLDRQIKAIMKEVIPFLKEHMDEVCSSQLLTSVRRMVLTLTQQNDESKEFVKFFHKQLGSILQDSLAKFAGRKLKDCGEDLLVEISEVLFNELAFFKLMQDLDNNSITVKQRCKRKIEATGVIQSCAKEAKRILEDHGSPAGEIDDEDKDKDETETVKQTQTSEVYDGPKNVRSDISDQEEDEESEGCPVSINLSKAETQALTNYGSGEDENEDEEMEEFEEGPVDVQTSLQANTEATEENEHDEQVLQRDFKKTAESKNVPLEREATSKNDQNNCPVKPCYLNILEDEQPLNSAAHKESPPTVDSTQQPNPLPLRLPEMEPLVPRVKEVKSAQETPESSLAGSPDTESPVLVNDYEAESGNISQKSDEEDFVKVEDLPLKLTIYSEADLRKKMVEEEQKNHLSGEICEMQTEELAGNSETLKEPETVGAQSI

SEQ ID NO: 908913 - protein, 1295 aa, Homo sapiens
ALDDPPDFTMSSKRCGNLKQQQRELKQLQEERKKLIDIQEKIQALQTACPDLQLSAASVGNCPTKKYMPAVTSTPTVNQHETSTSKSVFEPEDSSIVDNELWSEMRRHEMLREELRQRRKQLEALMAEHQRRQGLAETASPVAVSLRSDGSENLCTPQQSRTEKTMATWGGSTQCALDEEGDEDGYLSEGIVRTDEEEEEEQDASSNDNFSVCPSNSVNHNSYNRKETKNTWKNNCPFSADENYRPLAKTRQQNISMQRQENLRWVSELSYVEEKEQWQEQINQLKKQLDFSVSICQTLMQDQQTLSCLLQTLLTGPYSVMPSNVASPQVHFIMHQLNQCYTQLTWQQNNVQRLKQMLNELMRQQNQHPEKPGGKERGSSASHPPSPSLFCPFSFPTQPVNLFNIPGFTNFSSFAPGMNFSPLFPSNFGDFSQNISTPSEQQQPLAQNSSGKTEYMAFPKPFESSSSIGAEKPRNKKLPEEEVESSRTPWLYEQEGEVEKPFIKTGFSVSVEKSTSSNRKNQLDTNGRRRQFDEESLESFSSMPDPVDPTTVTKTFKTRKASAQASLASKDKTPKSKSKKRNSTQLKSRVKNIRYESASMSSTCEPCKSRNRHSAQTEEPVQAKVFSRKNHEQLEKIIKCNRSTEISSETGSDFSMFEALRDTIYSEVATLISQNESRPHFLIELFHELQLLNTDYLRQRALYALQDIVSRHISESHEKGENVKSVNSGTWIASNSELTPSESLATTDDETFEKNFERETHKISEQNDADNASVLSVSSNFEPFATDDLGNTVIHLDQALARMREYERMKTEAESNSNMRCICRIIEDGDGAGAETPVIENRSSQQPVSEVSTIPCPRIDTQQLDRQIKAIMKEVIPFLKEHMDEVCSSQLLTSVRRMVLTLTQQNDESKEFVKFFHKQLGSILQDSLAKFAGRKLKDCGEDLLVEISEVLFNELAFFKLMQDLDNNSITVKQRCKRKIEATGVIQSCAKEAKRILEDHGSPAGEIDDEDKDKDETETVKQTQTSEVYDGPKNVRSDISDQEEDEESEGCPVSINLSKAETQALTNYGSGEDENEDEEMEEFEEGPVDVQTSLQANTEATEENEHDEQVLQRDFKKTAESKNVPLEREATSKNDQNNCPVKPCYLNILEDEQPLNSAAHKESPPTVDSTQQPNPLPLRLPEMEPLVPRVKEVKSAQETPESSLAGSPDTESPVLVNDYEAESGNISQKSDEEDFVKVEDLPLKLTIYSEADLRKKMVEEEQKNHLSGEICEMQTEELAGNSETLKEPETVGAQSI

SEQ ID NO: 908914 - protein, 1906 aa, Homo sapiens
MATGGGPFEDGMNDQDLPNWSNENVDDRLNNMDWGAQQKKANRSSEKNKKKFGVESDKRVTNDISPESSPGVGRRRTKTPHTFPHSRYMSQMSVPEQAELEKLKQRINFSDLDQRSIGSDSQGRATAANNKRQLSENRKPFNFLPMQINTNKSKDASTSPPNRETIGSAQCKELFASALSNDLLQNCQVSEEDGRGEPAMESSQIVSRLVQIRDYITKASSMREDLVEKNERSANVERLTHLIDHLKEQEKSYMKFLKKILARDPQQEPMEEIENLKKQHDLLKRMLQQQEQLRALQGRQAALLALQHKAEQAIAVMDDSVVAETAGSLSGVSITSELNEELNDLIQRFHNQLRDSQPPAVPDNRRQAESLSLTREVSQSRKPSASERLPDEKVELFSKMRVLQEKKQKMDKLLGELHTLRDQHLNNSSSSPQRSVDQRSTSAPSASVGLAPVVNGESNSLTSSVPYPTASLVSQNESENEGHLNPSEKLQKLNEVRKRLNELRELVHYYEQTSDMMTDAVNENRKDEETEESEYDSEHENSEPVTNIRNPQVASTWNEVNSHSNAQCVSNNRDGRTVNSNCEINNRSAANIRALNVPPSLDCRYNREGEQEIHVAQGEDDEEEEEEAEEEGVSGASLSSHRSSLVDEHPEDAEFEQKINRLMAAKQKLRQLQDLVAMVQDDDAAQGVISASASNLDDFYPAEEDTKQNSNNTRGNANKTQKDTGVNEKAREKFYEAKLQQQQRELKQLQEERKKLIDIQEKIQALQTACPDLQLSAASVGNCPTKKYMPAVTSTPTVNQHETSTSKSVFEPEDSSIVDNELWSEMRRHEMLREELRQRRKQLEALMAEHQRRQGLAETASPVAVSLRSDGSENLCTPQQSRTEKTMATWGGSTQCALDEEGDEDGYLSEGIVRTDEEEEEEQDASSNDNFSVCPSNSVNHNSYNRKETKNTWKNNCPFSADENYRPLAKTRQQNISMQRQENLRWVSELSYVEEKEQWQEQINQLKKQLDFSVSICQTLMQDQQTLSCLLQTLLTGPYSVMPSNVASPQVHFIMHQLNQCYTQLTWQQNNVQRLKQMLNELMRQQNQHPEKPGGKERGSSASHPPSPSLFCPFSFPTQPVNLFNIPGFTNFSSFAPGMNFSPLFPSNFGDFSQNISTPSEQQQPLAQNSSGKTEYMAFPKPFESSSSIGAEKPRNKKLPEEEVESSRTPWLYEQEGEVEKPFIKTGFSVSVEKSTSSNRKNQLDTNGRRRQFDEESLESFSSMPDPVDPTTVTKTFKTRKASAQASLASKDKTPKSKSKKRNSTQLKSRVKNIRYESASMSSTCEPCKSRNRHSAQTEEPVQAKVFSRKNHEQLEKIIKCNRSTEISSETGSDFSMFEALRDTIYSEVATLISQNESRPHFLIELFHELQLLNTDYLRQRALYALQDIVSRHISESHEKGENVKSVNSGTWIASNSELTPSESLATTDDETFEKNFERETHKISEQNDADNASVLSVSSNFEPFATDDLGNTVIHLDQALARMREYERMKTEAESNSNMRCICRIIEDGDGAGAETPVIENRSSQQPVSEVSTIPCPRIDTQQLDRQIKAIMKEVIPFLKEHMDEVCSSQLLTSVRRMVLTLTQQNDESKEFVKFFHKQLGSILQDSLAKFAGRKLKDCGEDLLVEISEVLFNELAFFKLMQDLDNNSITVKQRCKRKIEATGVIQSCAKEAKRILEDHGSPAGEIDDEDKDKDETETVKQTQTSEVYDGPKNVRSDISDQEEDEESEGCPVSINLSKAETQALTNYGSGEDENEDEEMEEFEEGPVDVQTSLQANTEATEENEHDEQEAESGNISQKSDEEDFVKVEDLPLKLTIYSEADLRKKMVEEEQKNHLSGEICEMQTEELAGNSETLKEPETVGAQSI

SEQ ID NO: 908915 - protein, 1952 aa, Homo sapiens
MATGGGPFEDGMNDQDLPNWSNENVDDRLNNMDWGAQQKKANRSSEKNKKKFGVESDKRVTNDISPESSPGVGRRRTKTPHTFPHSRYMSQMSVPEQAELEKLKQRINFSDLDQRSIGSDSQGRATAANNKRQLSENRKPFNFLPMQINTNKSKDASTSPPNRETIGSAQCKELFASALSNDLLQNCQVSEEDGRGEPAMESSQIVSRLVQIRDYITKASSMREDLVEKNERSANVERLTHLIDHLKEQEKSYMKFLKKILARDPQQEPMEEIENLKKQHDLLKRMLQQQEQLRALQGRQAALLALQHKAEQAIAVMDDSVVAETAGSLSGVSITSELNEELNDLIQRFHNQLRDSQPPAVPDNRRQAESLSLTREVSQSRKPSASERLPDEKVELFSKMRVLQEKKQKMDKLLGELHTLRDQHLNNSSSSPQRSVDQRSTSAPSASVGLAPVVNGESNSLTSSVPYPTASLVSQNESENEGHLNPSEKLQKLNEVRKRLNELRELVHYYEQTSDMMTDAVNENRKDEETEESEYDSEHENSEPVTNIRNPQVASTWNEVNSHSNAQCVSNNRDGRTVNSNCEINNRSAANIRALNVPPSLDCRYNREGEQEIHVAQGEDDEEEEEEAEEEGVSGASLSSHRSSLVDEHPEDAEFEQKINRLMAAKQKLRQLQDLVAMVQDDDAAQGVISASASNLDDFYPAEEDTKQNSNNTRGNANKTQKDTGVNEKAREKFYEAKLQQQQRELKQLQEERKKLIDIQEKIQALQTACPDLQLSAASVGNCPTKKYMPAVTSTPTVNQHETSTSKSVFEPEDSSIVDNELWSEMRRHEMLREELRQRRKQLEALMAEHQRRQGLAETASPVAVSLRSDGSENLCTPQQSRTEKTMATWGGSTQCALDEEGDEDGYLSEGIVRTDEEEEEEQDASSNDNFSVCPSNSVNHNSYNRKETKNTWKNNCPFSADENYRPLAKTRQQNISMQRQENLRWVSELSYVEEKEQWQEQINQLKKQLDFSVSICQTLMQDQQTLSCLLQTLLTGPYSVMPSNVASPQVHFIMHQLNQCYTQLTWQQNNVQRLKQMLNELMRQQNQHPEKPGGKERGSSASHPPSPSLFCPFSFPTQPVNLFNIPGFTNFSSFAPGMNFSPLFPSNFGDFSQNISTPSEQQQPLAQNSSGKTEYMAFPKPFESSSSIGAEKPRNKKLPEEEVESSRTPWLYEQEGEVEKPFIKTGFSVSVEKSTSSNRKNQLDTNGRRRQFDEESLESFSSMPDPVDPTTVTKTFKTRKASAQASLASKDKTPKSKSKKRNSTQLKSRVKNIRYESASMSSTCEPCKSRNRHSAQTEEPVQAKVFSRKNHEQLEKIIKCNRSTEISSETGSDFSMFEALRDTIYSEVATLISQNESRPHFLIELFHELQLLNTDYLRQRALYALQDIVSRHISESHEKGENVKSVNSGTWIASNSELTPSESLATTDDETFEKNFERETHKISEQNDADNASVLSVSSNFEPFATDDLGNTVIHLDQALARMREYERMKTEAESNSNMRCICRIIEDGDGAGAETPVIENRSSQQPVSEVSTIPCPRIDTQQLDRQIKAIMKEVIPFLKEHMDEVCSSQLLTSVRRMVLTLTQQNDESKEFVKFFHKQLGSILQDSLAKFAGRKLKDCGEDLLVEISEVLFNELAFFKLMQDLDNNSITVKQRCKRKIEATGVIQSCAKEAKRILEDHGSPAGEIDDEDKDKDETETVKQTQTSEVYDGPKNVRSDISDQEEDEESEGCPVSINLSKAETQALTNYGSGEDENEDEEMEEFEEGPVDVQTSLQANTEATEENEHDEQVLQRDFKKTAESKNVPLEREATSKNDQNNCPVKPCYLNILEDEQPLNSAAHKESPPTVDSTQQPNPLPLRLPEMEPLVPRVKEVKSAQETPESSLAGSPDTESPVLVNDYVCIIYISKYFYFS

SEQ ID NO: 908916 - protein, 1956 aa, Homo sapiens
MATGGGPFEDGMNDQDLPNWSNENVDDRLNNMDWGAQQKKANRSSEKNKKKFGVESDKRVTNDISPESSPGVGRRRTKTPHTFPHSRYMSQMSVPEQAELEKLKQRINFSDLDQRSIGSDSQGRATAANNKRQLSENRKPFNFLPMQINTNKSKDASTSPPNRETIGSAQCKELFASALSNDLLQNCQVSEEDGRGEPAMESSQIVSRLVQIRDYITKASSMREDLVEKNERSANVERLTHLIDHLKEQEKSYMKFLKKILARDPQQEPMEEIENLKKQHDLLKRMLQQQEQLRALQGRQAALLALQHKAEQAIAVMDDSVVAETAGSLSGVSITSELNEELNDLIQRFHNQLRDSQPPAVPDNRRQAESLSLTREVSQSRKPSASERLPDEKVELFSKMRVLQEKKQKMDKLLGELHTLRDQHLNNSSSSPQRSVDQRSTSAPSASVGLAPVVNGESNSLTSSVPYPTASLVSQNESENEGHLNPSEKLQKLNEVRKRLNELRELVHYYEQTSDMMTDAVNENRKDEETEESEYDSEHENSEPVTNIRNPQVASTWNEVNSHSNAQCVSNNRDGRTVNSNCEINNRSAANIRALNVPPSLDCRYNREGEQEIHVAQGEDDEEEEEEAEEEGVSGASLSSHRSSLVDEHPEDAEFEQKINRLMAAKQKLRQLQDLVAMVQDDDAAQGVISASASNLDDFYPAEEDTKQNSNNTRGNANKTQKDTGVNEKAREKFYEAKLQQQQRELKQLQEERKKLIDIQEKIQALQTACPDLQLSAASVGNCPTKKYMPAVTSTPTVNQHETSTSKSVFEPEDSSIVDNELWSEMRRHEMLREELRQRRKQLEALMAEHQRRQGLAETASPVAVSLRSDGSENLCTPQQSRTEKTMATWGGSTQCALDEEGDEDGYLSEGIVRTDEEEEEEQDASSNDNFSVCPSNSVNHNSYNRKETKNTWKNNCPFSADENYRPLAKTRQQNISMQRQENLRWVSELSYVEEKEQWQEQINQLKKQLDFSVSICQTLMQDQQTLSCLLQTLLTGPYSVMPSNVASPQVHFIMHQLNQCYTQLTWQQNNVQRLKQMLNELMRQQNQHPEKPGGKERGSSASHPPSPSLFCPFSFPTQPVNLFNIPGFTNFSSFAPGMNFSPLFPSNFGDFSQNISTPSEQQQPLAQNSSGKTEYMAFPKPFESSSSIGAEKPRNKKLPEEEVESSRTPWLYEQEGEVEKPFIKTGFSVSVEKSTSSNRKNQLDTNGRRRQFDEESLESFSSMPDPVDPTTVTKTFKTRKASAQASLASKDKTPKSKSKKRNSTQLKSRVKNIRYESASMSSTCEPCKSRNRHSAQTEEPVQAKVFSRKNHEQLEKIIKCNRSTEISSETGSDFSMFEALRDTIYSEVATLISQNESRPHFLIELFHELQLLNTDYLRQRALYALQDIVSRHISESHEKGENVKSVNSGTWIASNSELTPSESLATTDDETFEKNFERETHKISEQNDADNASVLSVSSNFEPFATDDLGNTVIHLDQALARMREYERMKTEAESNSNMRCICRIIEDGDGAGAETPVIENRSSQQPVSEVSTIPCPRIDTQQLDRQIKAIMKEVIPFLKEHMDEVCSSQLLTSVRRMVLTLTQQNDESKEFVKFFHKQLGSILQDSLAKFAGRKLKDCGEDLLVEISEVLFNELAFFKLMQDLDNNSITVKQRCKRKIEATGVIQSCAKEAKRILEDHGSPAGEIDDEDKDKDETETVKQTQTSEVYDGPKNVRSDISDQEEDEESEGCPVSINLSKAETQALTNYGSGEDENEDEEMEEFEEGPVDVQTSLQANTEATEENEHDEQVLQRDFKKTAESKNVPLEREATSKNDQNNCPVKPCYLNILEDEQPLNSAAHKESPPTVDSTQQPNPLPLRLPEMEPLVPRVKEVKSAQETPESSLAGSPDTESPVLVNDYKQNLVIKVKSSVEPSGS

SEQ ID NO: 908917 - protein, 1491 aa, Homo sapiens
MATGGGPFEDGMNDQDLPNWSNENVDDRLNNMDWGAQQKKANRSSEKNKKKFGVESDKRVTNDISPESSPGVGRRRTKTPHTFPHSRYMSQMSVPEQAELEKLKQRINFSDLDQRSIGSDSQGRATAANNKRQLSENRKPFNFLPMQINTNKSKDASTSPPNRETIGSAQCKELFASALSNDLLQNCQVSEEDGRGEPAMESSQIVSRLVQIRDYITKASSMREDLVEKNERSANVERLTHLIDHLKEQEKSYMKFLKKILARDPQQEPMEEIENLKKQHDLLKRMLQQQEQLRALQGRQAALLALQHKAEQAIAVMDDSVVAETAGSLSGVSITSELNEELNDLIQRFHNQLRDSQPPAVPDNRRQAESLSLTREVSQSRKPSASERLPDEKVELFSKMRVLQEKKQKMDKLLGELHTLRDQHLNNSSSSPQRSVDQRSTSAPSASVGLAPVVNGESNSLTSSVPYPTASLVSQNESENEGHLNPSEKLQKLNEVRKRLNELRELVHYYEQTSDMMTDAVNENRKDEETEESEYDSEHENSEPVTNIRNPQVASTWNEVNSHSNAQCVSNNRDGRTVNSNCEINNRSAANIRALNVPPSLDCRYNREGEQEIHVAQGEDDEEEEEEAEEEGVSGASLSSHRSSLVDEHPEDAEFEQKINRLMAAKQKLRQLQDLVAMVQDDDAAQGVISASASNLDDFYPAEEDTKQNSNNTRGNANKTQKDTGVNEKAREKFYEAKLQQQQRELKQLQEERKKLIDIQEKIQALQTACPDLQLSAASVGNCPTKKYMPAVTSTPTVNQHETSTSKSVFEPEDSSIVDNELWSEMRRHEMLREELRQRRKQLEALMAEHQRRQGLAETASPVAVSLRSDGSENLCTPQQSRTEKTMATWGGSTQCALDEEGDEDGYLSEGIVRTDEEEEEEQDASSNDNFSVCPSNSVNHNSYNRKETKNTWKNNCPFSADENYRPLAKTRQQNISMQRQENLRWVSELSYVEEKEQWQEQINQLKKQLDFSVSICQTLMQDQQTLSCLLQTLLTGPYSVMPSNVASPQVHFIMHQLNQCYTQLTWQQNNVQRLKQMLNELMRQQNQHPEKPGGKERGSSASHPPSPSLFCPFSFPTQPVNLFNIPGFTNFSSFAPGMNFSPLFPSNFGDFSQNISTPSEQQQPLAQNSSGKTEYMAFPKPFESSSSIGAEKPRNKKLPEEEVESSRTPWLYEQEGEVEKPFIKTGFSVSVEKSTSSNRKNQLDTNGRRRQFDEESLESFSSMPDPVDPTTVTKTFKTRKASAQASLASKDKTPKSKSKKRNSTQLKSRVKNIRYESASMSSTCEPCKSRNRHSAQTEEPVQAKVFSRKNHEQLEKIIKCNRSTEISSAHARRILQQSNRNACNEAPETGSDFSMFEALRDTIYSEVATLISQNESRPHFLIELFHELQLLNTDYLRQRALYALQDIVSRHISESHEKGENVKSVNSGTWIASNSELTPSESLATTDDVS

SEQ ID NO: 908918 - protein, 311 aa, Homo sapiens
MATGGGPFEDGMNDQDLPNWSNENVDDRLNNMDWGAQQKKANRSSEKNKKKFGVESDKRVTNDISPESSPGVGRRRTKTPHTFPHSRYMSQMSVPEQAELEKLKQRINFSDLDQRSIGSDSQGRATAANNKRQLSENRKPFNFLPMQINTNKSKDASTSPPNRETIGSAQCKELFASALSNDLLQNCQVSEEDGRGEPAMESSQIVSRLVQIRDYITKASSMREDLVEKNERSANVERLTHLIDHLKEQEKSYMKFLKKILARDPQQEPMEEIENLKKQHDLLKRMLQQQEQLKPTEEALVNKARLLSINS

SEQ ID NO: 908919 - protein, 85 aa, Homo sapiens
SPALQDIRHQAKLIKHKKGIVNEQFLLQRLADGAIDLYAMVVVLSRASRSLSEGHPTAQHEKMLCDTWCIEAAARIREGHGRPAV

SEQ ID NO: 908920 - protein, 683 aa, Homo sapiens
GLQGTTAPSMPRGPQPSAARCTVDDESGLGAPGRGRAGRGRAGRQSWVRARASGARRDSEMQAARMAASLGRQLLRLGGGSSRLTALLGQPRPGPARRPYAGGAAQLALDKSDSHPSDALTRKKPAKAESKSFAVGMFKGQLTTDQVFPYPSVLNEEQTQFLKELVEPVSRFFEEVNDPAKNDALEMVEETTWQGLKELGAFGLQVPSELGGVGLCNTQYARLVEIVGMHDLGVGITLGAHQSIGFKGILLFGTKAQKEKYLPKLASGETVAAFCLTEPSSGSDAASIRTSAVPSPCGKYYTLNGSKLWISNGGLADIFTVFAKTPVTDPATGAVKEKITAFVVERGFGGITHGPPEKKMGIKASNTAEVFFDGVRVPSENVLGEVGSGFKVAMHILNNGRFGMAAALAGTMRGIIAKAVDHATNRTQFGEKIHNFGLIQEKLARMVMLQYVTESMAYMVSANMDQGATDFQIEAAISKIFGSEAAWKVTDECIQIMGGMGFMKEPGVERVLRDLRIFRIFEGTNDILRLFVALQGCMDKGKELSGLGSALKNPFGNAGLLLGEAGKQLRRRAGLGSGLSLSGLVHPELSRSGELAVRALEQFATVVEAKLIKHKKGIVNEQFLLQRLADGAIDLYAMVVVLSRASRSLSEGHPTAQHEKMLCDTWCIEAAARIREGHGRPAV

SEQ ID NO: 908921 - protein, 146 aa, Homo sapiens
MDKGKELSGLGSALKNPFGNAGLLLGEAGKQLRRRAGLGSGLSLSGLVHPELSRSGELAVRALEQFATVVEAKLIKHKKGIVNEQFLLQRLADGAIDLYAMVVVLSRASRSLSEGHPTAQHEKMLCDTWCIEAAARIREGHGRPAV

SEQ ID NO: 908922 - protein, 146 aa, Homo sapiens; identical to SEQ ID NO: 908921

SEQ ID NO: 908923 - protein, 143 aa, Homo sapiens
RLCLSAQIISRPWRLSTFLELERKKFPCHVTTDQVCHISRSVASTNLCTHPGIPINESSRERSTDIASLYKEVNDPAKNDALEMVEETTWQGLKELGAFGLQVPSELGGVGLCNTQVRAPYRHIPVCHTPAWQTQLFCHRPRD

SEQ ID NO: 908924 - protein, 146 aa, Homo sapiens; identical to SEQ ID NO: 908921

SEQ ID NO: 908925 - protein, 143 aa, Homo sapiens; identical to SEQ ID NO: 908923

SEQ ID NO: 908926 - protein, 143 aa, Homo sapiens; identical to SEQ ID NO: 908923

SEQ ID NO: 908927 - protein, 146 aa, Homo sapiens; identical to SEQ ID NO: 908921

SEQ ID NO: 908928 - protein, 107 aa, Homo sapiens
MDKGKELSGLGSALKNPFGNAGLLLGEAGKQLRRRAGLGSGLSLSGLVHPELSRSGELAVRALEQFATVVEAKLIKHKKGIVNEQFLLQRLADGAIDLYAMVVVLSR

SEQ ID NO: 908929 - protein, 143 aa, Homo sapiens; identical to SEQ ID NO: 908923

SEQ ID NO: 908930 - protein, 136 aa, Homo sapiens
MDKGKELSGLGSALKNPFGNAGLLLGEAGKQLRRRAGLGSGLSLSGLVHPELSRSGELAVRALEQFATVVEAKLIKHKKGIVNEQFLLQRLADGAIDLYAMVVVLSRASRSLSEGHPTAQHEAAARIREGHGRPAV

SEQ ID NO: 908931 - protein, 146 aa, Homo sapiens; identical to SEQ ID NO: 908921

SEQ ID NO: 908932 - protein, 143 aa, Homo sapiens; identical to SEQ ID NO: 908923

SEQ ID NO: 908933 - protein, 107 aa, Homo sapiens; identical to SEQ ID NO: 908928

SEQ ID NO: 908934 - protein, 165 aa, Homo sapiens
MDKGKELSGLGSALKNPFGNAGLLLGEAGKQLRRRAGLGSGLSLSGLVHPELSRSGELAVRALEQFATVVEAKLIKHKKGIVNEQFLLQRLADGAIDLYAMVVVLSRASRSLSEGHPTAQHEKMLCDTWCIELQLRITRRHARFLSNRALKRVRCSLHPNLFFPS

SEQ ID NO: 908935 - protein, 100 aa, Homo sapiens
MDKGKELSGLGSALKNPFGNAGLLLGEAGKQLRRRAGLGSGLSLSGLVHPELSRSGELAVRALEQFATVVEAKLIKHKKGIVNEQFLLQRRWMQSAALDA

SEQ ID NO: 908936 - protein, 143 aa, Homo sapiens; identical to SEQ ID NO: 908923

SEQ ID NO: 908937 - protein, 143 aa, Homo sapiens; identical to SEQ ID NO: 908923

SEQ ID NO: 908938 - protein, 85 aa, Homo sapiens; identical to SEQ ID NO: 908919

SEQ ID NO: 908939 - protein, 185 aa, Homo sapiens
LVLARDLELGGSAGLYGKGKELSGLGSALKNPFGNAGLLLGEAGKQLRRRAGLGSGLSLSGLVHSEMQAARMAASLGRQLLRLGGGSSRLTALLGQPRPGPARRPYAGGAAQLALDKSDSHPSDALTRKKPAKAESKSFAVGMFKGQLTTDQVFPYPSVLHEEQTQVLKELVVGHQPTWLLSPGR

SEQ ID NO: 908940 - protein, 143 aa, Homo sapiens; identical to SEQ ID NO: 908923

SEQ ID NO: 908941 - protein, 143 aa, Homo sapiens; identical to SEQ ID NO: 908923

SEQ ID NO: 908942 - protein, 146 aa, Homo sapiens; identical to SEQ ID NO: 908921

SEQ ID NO: 908943 - protein, 75 aa, Homo sapiens
YGCENLQKGIVNEQFLLQRLADGAIDLYAMVVVLSRASRSLSEGHPTAQHEKMLCDTWCIEAAARIREGHGRPAV

SEQ ID NO: 908944 - protein, 107 aa, Homo sapiens; identical to SEQ ID NO: 908928

SEQ ID NO: 908945 - protein, 195 aa, Homo sapiens
MHPNHGGYGLHEGFMKEPGVERVLRDLRIFRIFEGTNDILRLFVALQGCMDKGKELSGLGSALKNPFGNAGLLLGEAGKQLRRRAGLGSGLSLSGLVHPELSRSGELAVRALEQFATVVEAKLIKHKKGIVNEQFLLQRLADGAIDLYAMVVVLSRASRSLSEGHPTAQHEKMLCDTWCIEAAARIREGHGRPAV

SEQ ID NO: 908946 - protein, 152 aa, Homo sapiens
MDKGKELSGLGSALKNPFGNAGLLLGEAGKQLRRRAGLGSGLSLSGLVHPELSRSGELAVRALEQFATVVEAKLIKHKKGIVSCSSDPRRAWPPCSLTPGSKSSTATSKASPRPWWSGVVWSPATHLASEYSRPGPVPVMCLPSSQSRSPFP

SEQ ID NO: 908947 - protein, 143 aa, Homo sapiens; identical to SEQ ID NO: 908923

SEQ ID NO: 908948 - protein, 107 aa, Homo sapiens; identical to SEQ ID NO: 908928

SEQ ID NO: 908949 - protein, 143 aa, Homo sapiens; identical to SEQ ID NO: 908923

SEQ ID NO: 908950 - protein, 143 aa, Homo sapiens; identical to SEQ ID NO: 908923

SEQ ID NO: 908951 - protein, 143 aa, Homo sapiens; identical to SEQ ID NO: 908923

SEQ ID NO: 908952 - protein, 76 aa, Homo sapiens
ALEHPPDEEGEEEGSESESRSVKVKIKLGRKEKAQDRLKGGRRRPSRGSRAKPVVSDDDSEEEQEEDRSGSGSEED

SEQ ID NO: 908953 - protein, 1389 aa, Homo sapiens
MSTPDPPLGGTPRPGPSPGPGPSPGAMLGPSPGPSPGSAHSMMGPSPGPPSAGHPIPTQGPGGYPQDNMHQMHKPMESMHEKGMSDDPRYNQMKGMGMRSGGHAGMGPPPSPMDQHSQGYPSPLGGSEHASSPVPASGPSSGPQMSSGPGGAPLDGADPQALGQQNRGPTPFNQNQLHQLRAQIMAYKMLARGQPLPDHLQMAVQGKRPMPGMQQQMPTLPPPSVSATGPGPGPGPGPGPGPGPAPPNYSRPHGMGGPNMPPPGPSGVPPGMPGQPPGGPPKPWPEGPMANAAAPTSTPQKLIPPQPTGRPSPAPPAVPPAASPVMPPQTQSPGQPAQPAPMVPLHQKQSRITPIQKPRGLDPVEILQEREYRLQARIAHRIQELENLPGSLAGDLRTKATIELKALRLLNFQRQLRQEVVVCMRRDTALETALNAKAYKRSKRQSLREARITEKLEKQQKIEQERKRRQKHQEYLNSILQHAKDFKEYHRSVTGKIQKLTKAVATYHANTEREQKKENERIEKERMRRLMAEDEEGYRKLIDQKKDKRLAYLLQQTDEYVANLTELVRQHKAAQVAKEKKKKKKKKKAENAEGQTPAIGPDGEPLDETSQMSDLPVKVIHVESGKILTGTDAPKAGQLEAWLEMNPGYEVAPRSDSEESGSEEEEEEEEEEQPQAAQPPTLPVEEKKKIPDPDSDDVSEVDARHIIENAKQDVDDEYGVSQALARGLQSYYAVAHAVTERVDKQSALMVNGVLKQYQIKGLEWLVSLYNNNLNGILADEMGLGKTIQTIALITYLMEHKRINGPFLIIVPLSTLSNWAYEFDKWAPSVVKVSYKGSPAARRAFVPQLRSGKFNVLLTTYEYIIKDKHILAKIRWKYMIVDEGHRMKNHHCKLTQVLNTHYVAPRRLLLTGTPLQNKLPELWALLNFLLPTIFKSCSTFEQWFNAPFAMTGEKVDLNEEETILIIRRLHKVLRPFLLRRLKKEVEAQLPEKVEYVIKCDMSALQRVLYRHMQAKGVLLTDGSEKDKKGKGGTKTLMNTIMQLRKICNHPYMFQHIEESFSEHLGFTGGIVQGLDLYRASGKFELLDRILPKLRATNHKVLLFCQMTSLMTIMEDYFAYRGFKYLRLDGTTKAEDRGMLLKTFNEPGSEYFIFLLSTRAGGLGLNLQSADTVIIFDSDWNPHQDLQAQDRAHRIGQQNEVRVLRLCTVNSVEEKILAAAKYKLNVDQKVIQAGMFDQKSSSHERRAFLQAILEHEEQDESRHCSTGSGSASFAHTAPPPAGVNPDLEEPPLKEEDEVPDDETVNQMIARHEEEFDLFMRMDLDRRREEARNPKRKPRLMEEDELPSWIIKDDAEVERLTCEEEEEKMFGRGSRHRKEVDYSDSLTEKQWL

SEQ ID NO: 908954 - protein, 1389 aa, Homo sapiens; identical to SEQ ID NO: 908953

SEQ ID NO: 908955 - protein, 1389 aa, Homo sapiens; identical to SEQ ID NO: 908953

SEQ ID NO: 908956 - protein, 1356 aa, Homo sapiens
MSTPDPPLGGTPRPGPSPGPGPSPGAMLGPSPGPSPGSAHSMMGPSPGPPSAGHPIPTQGPGGYPQDNMHQMHKPMESMHEKGMSDDPRYNQMKGMGMRSGGHAGMGPPPSPMDQHSQGYPSPLGGSEHASSPVPASGPSSGPQMSSGPGGAPLDGADPQALGQQNRGPTPFNQNQLHQLRAQIMAYKMLARGQPLPDHLQMAVQGKRPMPGMQQQMPTLPPPSVSATGPGPGPGPGPGPGPGPAPPNYSRPHGMGGPNMPPPGPSGVPPGMPGQPPGGPPKPWPEGPMANAAAPTSTPQKLIPPQPTGRPSPAPPAVPPAASPVMPPQTQSPGQPAQPAPMVPLHQKQSRITPIQKPRGLDPVEILQEREYRLQARIAHRIQELENLPGSLAGDLRTKATIELKALRLLNFQRQLRQEVVVCMRRDTALETALNAKAYKRSKRQSLREARITEKLEKQQKIEQERKRRQKHQEYLNSILQHAKDFKEYHRSVTGKIQKLTKAVATYHANTEREQKKENERIEKERMRRLMAEDEEGYRKLIDQKKDKRLAYLLQQTDEYVANLTELVRQHKAAQVAKEKKKKKKKKKAENAEGQTPAIGPDGEPLDETSQMSDLPVKVIHVESGKILTGTDAPKAGQLEAWLEMNPGYEVAPRSDSEESGSEEEEEEEEEEQPQAAQPPTLPVEEKKKIPDPDSDDVSEVDARHIIENAKQDVDDEYGVSQALARGLQSYYAVAHAVTERVDKQSALMVNGVLKQYQIKGLEWLVSLYNNNLNGILADEMGLGKTIQTIALITYLMEHKRINGPFLIIVPLSTLSNWAYEFDKWAPSVVKVSYKGSPAARRAFVPQLRSGKFNVLLTTYEYIIKDKHILAKIRWKYMIVDEGHRMKNHHCKLTQVLNTHYVAPRRLLLTGTPLQNKLPELWALLNFLLPTIFKSCSTFEQWFNAPFAMTGEKVDLNEEETILIIRRLHKVLRPFLLRRLKKEVEAQLPEKVEYVIKCDMSALQRVLYRHMQAKGVLLTDGSEKDKKGKGGTKTLMNTIMQLRKICNHPYMFQHIEESFSEHLGFTGGIVQGLDLYRASGKFELLDRILPKLRATNHKVLLFCQMTSLMTIMEDYFAYRGFKYLRLDGTTKAEDRGMLLKTFNEPGSEYFIFLLSTRAGGLGLNLQSADTVIIFDSDWNPHQDLQAQDRAHRIGQQNEVRVLRLCTVNSVEEKILAAAKYKLNVDQKVIQAGMFDQKSSSHERRAFLQAILEHEEQDEEEDEVPDDETVNQMIARHEEEFDLFMRMDLDRRREEARNPKRKPRLMEEDELPSWIIKDDAEVERLTCEEEEEKMFGRGSRHRKEVDYSDSLTEKQWL

SEQ ID NO: 908957 - protein, 1497 aa, Homo sapiens
WGRPQCREAVAAAAPAERRGGWGARAAWRPRDPLRARSRRGRRTKLAPLARHPYSRPPNYSGCNNRQALGLFWLRGNGSDPNVAFLAKLRSGLSQTSRYVRRRPDTGISGPLGLADLKCLKNVSFQIFKESRRPLSAAPVKMSTPDPPLGGTPRPGPSPGPGPSPGAMLGPSPGPSPGSAHSMMGPSPGPPSAGHPIPTQGPGGYPQDNMHQMHKPMESMHEKGMSDDPRYNQMKGMGMRSGGHAGMGPPPSPMDQHSQGYPSPLGGSEHASSPVPASGPSSGPQMSSGPGGAPLDGADPQALGQQNRGPTPFNQNQLHQLRAQIMAYKMLARGQPLPDHLQMAVQGKRPMPGMQQQMPTLPPPSVSATGPGPGPGPGPGPGPGPAPPNYSRPHGMGGPNMPPPGPSGVPPGMPGQPPGGPPKPWPEGPMANAAAPTSTPQKLIPPQPTGRPSPAPPAVPPAASPVMPPQTQSPGQPAQPAPMVPLHQKQSRITPIQKPRGLDPVEILQEREYRLQARIAHRIQELENLPGSLAGDLRTKATIELKALRLLNFQRQLRQEVVVCMRRDTALETALNAKAYKRSKRQSLREARITEKLEKQQKIEQERKRRQKHQEYLNSILQHAKDFKEYHRSVTGKIQKLTKAVATYHANTEREQKKENERIEKERMRRLMAEDEEGYRKLIDQKKDKRLAYLLQQTDEYVANLTELVRQHKAAQVAKEKKKKKKKKKAENAEGQTPAIGPDGEPLDETSQMSDLPVKVIHVESGKILTGTDAPKAGQLEAWLEMNPGYEVAPRSDSEESGSEEEEEEEEEEQPQAAQPPTLPVEEKKKIPDPDSDDVSEVDARHIIENAKQDVDDEYGVSQALARGLQSYYAVAHAVTERVDKQSALMVNGVLKQYQIKGLEWLVSLYNNNLNGILADEMGLGKTIQTIALITYLMEHKRINGPFLIIVPLSTLSNWAYEFDKWAPSVVKVSYKGSPAARRAFVPQLRSGKFNVLLTTYEYIIKDKHILAKIRWKYMIVDEGHRMKNHHCKLTQVLNTHYVAPRRLLLTGTPLQNKLPELWALLNFLLPTIFKSCSTFEQWFNAPFAMTGEKVDLNEEETILIIRRLHKVLRPFLLRRLKKEVEAQLPEKVEYVIKCDMSALQRVLYRHMQAKGVLLTDGSEKDKKGKGGTKTLMNTIMQLRKICNHPYMFQHIEESFSEHLGFTGGIVQGLDLYRASGKFELLDRILPKLRATNHKVLLFCQMTSLMTIMEDYFAYRGFKYLRLDGTTKAEDRGMLLKTFNEPGSEYFIFLLSTRAGGLGLNLQSADTVIIFDSDWNPHQDLQAQDRAHRIGQQNEVRVLRLCTVNSVEEKILAAAKYKLNVDQKVIQAGMFDQKSSSHERRAFLQAILEHEEQDEEEDEVPDDETVNQMIARHEEEFDLFMRMDLDRRREEARNPKRKPRLMEEDELPSWIIKDDAEVERLTCEEEEEKMFGRGSRHRKEVDYSDSLTEKQWL

SEQ ID NO: 908958 - protein, 1031 aa, Homo sapiens
MPPQTQSPGQPAQPAPMVPLHQKQSRITPIQKPRGLDPVEILQEREYRLQARIAHRIQELENLPGSLAGDLRTKATIELKALRLLNFQRQLRQEVVVCMRRDTALETALNAKAYKRSKRQSLREARITEKLEKQQKIEQERKRRQKHQEYLNSILQHAKDFKEYHRSVTGKIQKLTKAVATYHANTEREQKKENERIEKERMRRLMAEDEEGYRKLIDQKKDKRLAYLLQQTDEYVANLTELVRQHKAAQVAKEKKKKKKKKKAENAEGQTPAIGPDGEPLDETSQMSDLPVKVIHVESGKILTGTDAPKAGQLEAWLEMNPGYEVAPRSDSEESGSEEEEEEEEEEQPQAAQPPTLPVEEKKKIPDPDSDDVSEVDARHIIENAKQDVDDEYGVSQALARGLQSYYAVAHAVTERVDKQSALMVNGVLKQYQIKGLEWLVSLYNNNLNGILADEMGLGKTIQTIALITYLMEHKRINGPFLIIVPLSTLSNWAYEFDKWAPSVVKVSYKGSPAARRAFVPQLRSGKFNVLLTTYEYIIKDKHILAKIRWKYMIVDEGHRMKNHHCKLTQVLNTHYVAPRRLLLTGTPLQNKLPELWALLNFLLPTIFKSCSTFEQWFNAPFAMTGEKVDLNEEETILIIRRLHKVLRPFLLRRLKKEVEAQLPEKVEYVIKCDMSALQRVLYRHMQAKGVLLTDGSEKDKKGKGGTKTLMNTIMQLRKICNHPYMFQHIEESFSEHLGFTGGIVQGLDLYRASGKFELLDRILPKLRATNHKVLLFCQMTSLMTIMEDYFAYRGFKYLRLDGTTKAEDRGMLLKTFNEPGSEYFIFLLSTRAGGLGLNLQSADTVIIFDSDWNPHQDLQAQDRAHRIGQQNEVRVLRLCTVNSVEEKILAAAKYKLNVDQKVIQAGMFDQKSSSHERRAFLQAILEHEEQDEEEDEVPDDETVNQMIARHEEEFDLFMRMDLDRRREEARNPKRKPRLMEEDELPSWIIKDDAEVERLTCEEEEEKMFGRGSRHRKEVDYSDSLTEKQWL

SEQ ID NO: 908959 - protein, 1004 aa, Homo sapiens
MCTQLITGTRPVEILQEREYRLQARIAHRIQELENLPGSLAGDLRTKATIELKALRLLNFQRQLRQEVVVCMRRDTALETALNAKAYKRSKRQSLREARITEKLEKQQKIEQERKRRQKHQEYLNSILQHAKDFKEYHRSVTGKIQKLTKAVATYHANTEREQKKENERIEKERMRRLMAEDEEGYRKLIDQKKDKRLAYLLQQTDEYVANLTELVRQHKAAQVAKEKKKKKKKKKAENAEGQTPAIGPDGEPLDETSQMSDLPVKVIHVESGKILTGTDAPKAGQLEAWLEMNPGYEVAPRSDSEESGSEEEEEEEEEEQPQAAQPPTLPVEEKKKIPDPDSDDVSEVDARHIIENAKQDVDDEYGVSQALARGLQSYYAVAHAVTERVDKQSALMVNGVLKQYQIKGLEWLVSLYNNNLNGILADEMGLGKTIQTIALITYLMEHKRINGPFLIIVPLSTLSNWAYEFDKWAPSVVKVSYKGSPAARRAFVPQLRSGKFNVLLTTYEYIIKDKHILAKIRWKYMIVDEGHRMKNHHCKLTQVLNTHYVAPRRLLLTGTPLQNKLPELWALLNFLLPTIFKSCSTFEQWFNAPFAMTGEKVDLNEEETILIIRRLHKVLRPFLLRRLKKEVEAQLPEKVEYVIKCDMSALQRVLYRHMQAKGVLLTDGSEKDKKGKGGTKTLMNTIMQLRKICNHPYMFQHIEESFSEHLGFTGGIVQGLDLYRASGKFELLDRILPKLRATNHKVLLFCQMTSLMTIMEDYFAYRGFKYLRLDGTTKAEDRGMLLKTFNEPGSEYFIFLLSTRAGGLGLNLQSADTVIIFDSDWNPHQDLQAQDRAHRIGQQNEVRVLRLCTVNSVEEKILAAAKYKLNVDQKVIQAGMFDQKSSSHERRAFLQAILEHEEQDEEEDEVPDDETVNQMIARHEEEFDLFMRMDLDRRREEARNPKRKPRLMEEDELPSWIIKDDAEVERLTCEEEEEKMFGRGSRHRKEVDYSDSLTEKQWL

SEQ ID NO: 908960 - protein, 1004 aa, Homo sapiens
IRGSHQHWTRPCEILQEREYRLQARIAHRIQELENLPGSLAGDLRTKATIELKALRLLNFQRQLRQEVVVCMRRDTALETALNAKAYKRSKRQSLREARITEKLEKQQKIEQERKRRQKHQEYLNSILQHAKDFKEYHRSVTGKIQKLTKAVATYHANTEREQKKENERIEKERMRRLMAEDEEGYRKLIDQKKDKRLAYLLQQTDEYVANLTELVRQHKAAQVAKEKKKKKKKKKAENAEGQTPAIGPDGEPLDETSQMSDLPVKVIHVESGKILTGTDAPKAGQLEAWLEMNPGYEVAPRSDSEESGSEEEEEEEEEEQPQAAQPPTLPVEEKKKIPDPDSDDVSEVDARHIIENAKQDVDDEYGVSQALARGLQSYYAVAHAVTERVDKQSALMVNGVLKQYQIKGLEWLVSLYNNNLNGILADEMGLGKTIQTIALITYLMEHKRINGPFLIIVPLSTLSNWAYEFDKWAPSVVKVSYKGSPAARRAFVPQLRSGKFNVLLTTYEYIIKDKHILAKIRWKYMIVDEGHRMKNHHCKLTQVLNTHYVAPRRLLLTGTPLQNKLPELWALLNFLLPTIFKSCSTFEQWFNAPFAMTGEKVDLNEEETILIIRRLHKVLRPFLLRRLKKEVEAQLPEKVEYVIKCDMSALQRVLYRHMQAKGVLLTDGSEKDKKGKGGTKTLMNTIMQLRKICNHPYMFQHIEESFSEHLGFTGGIVQGLDLYRASGKFELLDRILPKLRATNHKVLLFCQMTSLMTIMEDYFAYRGFKYLRLDGTTKAEDRGMLLKTFNEPGSEYFIFLLSTRAGGLGLNLQSADTVIIFDSDWNPHQDLQAQDRAHRIGQQNEVRVLRLCTVNSVEEKILAAAKYKLNVDQKVIQAGMFDQKSSSHERRAFLQAILEHEEQDEEEDEVPDDETVNQMIARHEEEFDLFMRMDLDRRREEARNPKRKPRLMEEDELPSWIIKDDAEVERLTCEEEEEKMFGRGSRHRKEVDYSDSLTEKQWL

SEQ ID NO: 908961 - protein, 905 aa, Homo sapiens
MVGLCKKQQKIEQERKRRQKHQEYLNSILQHAKDFKEYHRSVTGKIQKLTKAVATYHANTEREQKKENERIEKERMRRLMAEDEEGYRKLIDQKKDKRLAYLLQQTDEYVANLTELVRQHKAAQVAKEKKKKKKKKKAENAEGQTPAIGPDGEPLDETSQMSDLPVKVIHVESGKILTGTDAPKAGQLEAWLEMNPGYEVAPRSDSEESGSEEEEEEEEEEQPQAAQPPTLPVEEKKKIPDPDSDDVSEVDARHIIENAKQDVDDEYGVSQALARGLQSYYAVAHAVTERVDKQSALMVNGVLKQYQIKGLEWLVSLYNNNLNGILADEMGLGKTIQTIALITYLMEHKRINGPFLIIVPLSTLSNWAYEFDKWAPSVVKVSYKGSPAARRAFVPQLRSGKFNVLLTTYEYIIKDKHILAKIRWKYMIVDEGHRMKNHHCKLTQVLNTHYVAPRRLLLTGTPLQNKLPELWALLNFLLPTIFKSCSTFEQWFNAPFAMTGEKVDLNEEETILIIRRLHKVLRPFLLRRLKKEVEAQLPEKVEYVIKCDMSALQRVLYRHMQAKGVLLTDGSEKDKKGKGGTKTLMNTIMQLRKICNHPYMFQHIEESFSEHLGFTGGIVQGLDLYRASGKFELLDRILPKLRATNHKVLLFCQMTSLMTIMEDYFAYRGFKYLRLDGTTKAEDRGMLLKTFNEPGSEYFIFLLSTRAGGLGLNLQSADTVIIFDSDWNPHQDLQAQDRAHRIGQQNEVRVLRLCTVNSVEEKILAAAKYKLNVDQKVIQAGMFDQKSSSHERRAFLQAILEHEEQDEEEDEVPDDETVNQMIARHEEEFDLFMRMDLDRRREEARNPKRKPRLMEEDELPSWIIKDDAEVERLTCEEEEEKMFGRGSRHRKEVDYSDSLTEKQWL

SEQ ID NO: 908962 - protein, 832 aa, Homo sapiens
  misc_feature (4)..(4): Xaa can be any naturally occurring amino acid
GKTXNTTARYEAWVVSLLAKKKDKRLAYLLQQTDEYVANLTELVRQHKAAQVAKEKKKKKKKKKAENAEGQTPAIGPDGEPLDETSQMSDLPVKVIHVESGKILTGTDAPKAGQLEAWLEMNPGYEVAPRSDSEESGSEEEEEEEEEEQPQAAQPPTLPVEEKKKIPDPDSDDVSEVDARHIIENAKQDVDDEYGVSQALARGLQSYYAVAHAVTERVDKQSALMVNGVLKQYQIKGLEWLVSLYNNNLNGILADEMGLGKTIQTIALITYLMEHKRINGPFLIIVPLSTLSNWAYEFDKWAPSVVKVSYKGSPAARRAFVPQLRSGKFNVLLTTYEYIIKDKHILAKIRWKYMIVDEGHRMKNHHCKLTQVLNTHYVAPRRLLLTGTPLQNKLPELWALLNFLLPTIFKSCSTFEQWFNAPFAMTGEKVDLNEEETILIIRRLHKVLRPFLLRRLKKEVEAQLPEKVEYVIKCDMSALQRVLYRHMQAKGVLLTDGSEKDKKGKGGTKTLMNTIMQLRKICNHPYMFQHIEESFSEHLGFTGGIVQGLDLYRASGKFELLDRILPKLRATNHKVLLFCQMTSLMTIMEDYFAYRGFKYLRLDGTTKAEDRGMLLKTFNEPGSEYFIFLLSTRAGGLGLNLQSADTVIIFDSDWNPHQDLQAQDRAHRIGQQNEVRVLRLCTVNSVEEKILAAAKYKLNVDQKVIQAGMFDQKSSSHERRAFLQAILEHEEQDEEEDEVPDDETVNQMIARHEEEFDLFMRMDLDRRREEARNPKRKPRLMEEDELPSWIIKDDAEVERLTCEEEEEKMFGRGSRHRKEVDYSDSLTEKQWL

SEQ ID NO: 908963 - protein, 1356 aa, Homo sapiens; identical to SEQ ID NO: 908956

SEQ ID NO: 908964 - protein, 482 aa, Homo sapiens
DAIKDLLIWKKKKKKKKKLTQVLNTHYVAPRRLLLTGTPLQNKLPELWALLNFLLPTIFKSCSTFEQWFNAPFAMTGEKVDLNEEETILIIRRLHKVLRPFLLRRLKKEVEAQLPEKVEYVIKCDMSALQRVLYRHMQAKGVLLTDGSEKDKKGKGGTKTLMNTIMQLRKICNHPYMFQHIEESFSEHLGFTGGIVQGLDLYRASGKFELLDRILPKLRATNHKVLLFCQMTSLMTIMEDYFAYRGFKYLRLDGTTKAEDRGMLLKTFNEPGSEYFIFLLSTRAGGLGLNLQSADTVIIFDSDWNPHQDLQAQDRAHRIGQQNEVRVLRLCTVNSVEEKILAAAKYKLNVDQKVIQAGMFDQKSSSHERRAFLQAILEHEEQDEEEDEVPDDETVNQMIARHEEEFDLFMRMDLDRRREEARNPKRKPRLMEEDELPSWIIKDDAEVERLTCEEEEEKMFGRGSRHRKEVDYSDSLTEKQWL

SEQ ID NO: 908965 - protein, 504 aa, Homo sapiens
  misc_feature (4)..(4): Xaa can be any naturally occurring amino acid
GKTXNTTARYEAWVVSLLAKIRWKYMIVDEGHRMKNHHCKLTQVLNTHYVAPRRLLLTGTPLQNKLPELWALLNFLLPTIFKSCSTFEQWFNAPFAMTGEKVDLNEEETILIIRRLHKVLRPFLLRRLKKEVEAQLPEKVEYVIKCDMSALQRVLYRHMQAKGVLLTDGSEKDKKGKGGTKTLMNTIMQLRKICNHPYMFQHIEESFSEHLGFTGGIVQGLDLYRASGKFELLDRILPKLRATNHKVLLFCQMTSLMTIMEDYFAYRGFKYLRLDGTTKAEDRGMLLKTFNEPGSEYFIFLLSTRAGGLGLNLQSADTVIIFDSDWNPHQDLQAQDRAHRIGQQNEVRVLRLCTVNSVEEKILAAAKYKLNVDQKVIQAGMFDQKSSSHERRAFLQAILEHEEQDEEEDEVPDDETVNQMIARHEEEFDLFMRMDLDRRREEARNPKRKPRLMEEDELPSWIIKDDAEVERLTCEEEEEKMFGRGSRHRKEVDYSDSLTEKQWL

SEQ ID NO: 908966 - protein, 380 aa, Homo sapiens
MICYNRNSSASFNNHVLGPRYNLSKASTVNVSDSSAMWLRRNFERRKCQSTGKGGTKTLMNTIMQLRKICNHPYMFQHIEESFSEHLGFTGGIVQGLDLYRASGKFELLDRILPKLRATNHKVLLFCQMTSLMTIMEDYFAYRGFKYLRLDGTTKAEDRGMLLKTFNEPGSEYFIFLLSTRAGGLGLNLQSADTVIIFDSDWNPHQDLQAQDRAHRIGQQNEVRVLRLCTVNSVEEKILAAAKYKLNVDQKVIQAGMFDQKSSSHERRAFLQAILEHEEQDEEEDEVPDDETVNQMIARHEEEFDLFMRMDLDRRREEARNPKRKPRLMEEDELPSWIIKDDAEVERLTCEEEEEKMFGRGSRHRKEVDYSDSLTEKQWL

SEQ ID NO: 908967 - protein, 343 aa, Homo sapiens
NLARYEAGVNSAEGGKGGTKTLMNTIMQLRKICNHPYMFQHIEESFSEHLGFTGGIVQGLDLYRASGKFELLDRILPKLRATNHKVLLFCQMTSLMTIMEDYFAYRGFKYLRLDGTTKAEDRGMLLKTFNEPGSEYFIFLLSTRAGGLGLNLQSADTVIIFDSDWNPHQDLQAQDRAHRIGQQNEVRVLRLCTVNSVEEKILAAAKYKLNVDQKVIQAGMFDQKSSSHERRAFLQAILEHEEQDEEEDEVPDDETVNQMIARHEEEFDLFMRMDLDRRREEARNPKRKPRLMEEDELPSWIIKDDAEVERLTCEEEEEKMFGRGSRHRKEVDYSDSLTEKQWL

SEQ ID NO: 908968 - protein, 1303 aa, Homo sapiens
MSTPDPPLGGTPRPGPSPGPGPSPGAMLGPSPGPSPGSAHSMMGPSPGPPSAGHPIPTQGPGGYPQDNMHQMHKPMESMHEKGMSDDPRYNQMKGMGMRSGGHAGMGPPPSPMDQHSQGYPSPLGGSEHASSPVPASGPSSGPQMSSGPGGAPLDGADPQALGQQNRGPTPFNQNQLHQLRAQIMAYKMLARGQPLPDHLQMAVQGKRPMPGMQQQMPTLPPPSVSATGPGPGPGPGPGPGPGPAPPNYSRPHGMGGPNMPPPGPSGVPPGMPGQPPGGPPKPWPEGPMANAAAPTSTPQKLIPPQPTGRPSPAPPAVPPAASPVMPPQTQSPGQPAQPAPMVPLHQKQSRITPIQKPRGLDPVEILQEREYRLQARIAHRIQELENLPGSLAGDLRTKATIELKALRLLNFQRQLRQEVVVCMRRDTALETALNAKAYKRSKRQSLREARITEKLEKQQKIEQERKRRQKHQEYLNSILQHAKDFKEYHRSVTGKIQKLTKAVATYHANTEREQKKENERIEKERMRRLMAEDEEGYRKLIDQKKDKRLAYLLQQTDEYVANLTELVRQHKAAQVAKEKKKKKKKKKAENAEGQTPAIGPDGEPLDETSQMSDLPVKVIHVESGKILTGTDAPKAGQLEAWLEMNPGYEVAPRSDSEESGSEEEEEEEEEEQPQAAQPPTLPVEEKKKIPDPDSDDVSEVDARHIIENAKQDVDDEYGVSQALARGLQSYYAVAHAVTERVDKQSALMVNGVLKQYQIKGLEWLVSLYNNNLNGILADEMGLGKTIQTIALITYLMEHKRINGPFLIIVPLSTLSNWAYEFDKWAPSVVKVSYKGSPAARRAFVPQLRSGKFNVLLTTYEYIIKDKHILAKIRWKYMIVDEGHRMKNHHCKLTQVLNTHYVAPRRLLLTGTPLQNKLPELWALLNFLLPTIFKSCSTFEQWFNAPFAMTGEKVDLNEEETILIIRRLHKVLRPFLLRRLKKEVEAQLPEKVEYVIKCDMSALQRVLYRHMQAKGVLLTDGSEKDKKGKGGTKTLMNTIMQLRKICNHPYMFQHIEESFSEHLGFTGGIVQGLDLYRASGKFELLDRILPKLRATNHKVLLFCQMTSLMTIMEDYFAYRGFKYLRLDGTTKAEDRGMLLKTFNEPGSEYFIFLLSTRAGGLGLNLQSADTVIIFDSDWNPHQDLQAQDRAHRIGQQNEVRVLRLCTVNSVEEKILAAAKYKLNVDQKVIQAGMFDQKSSSHERRAFLQAILEHEEQDEEEDEVPDDETVNQMIARHEEEFDLFMRMDLERMARRRPAPQLGIL

SEQ ID NO: 908969 - protein, 1282 aa, Homo sapiens
MSTPDPPLGGTPRPGPSPGPGPSPGAMLGPSPGPSPGSAHSMMGPSPGPPSAGHPIPTQGPGGYPQDNMHQMHKPMESMHEKGMSDDPRYNQMKGMGMRSGGHAGMGPPPSPMDQHSQGYPSPLGGSEHASSPVPASGPSSGPQMSSGPGGAPLDGADPQALGQQNRGPTPFNQNQLHQLRAQIMAYKMLARGQPLPDHLQMAVQGKRPMPGMQQQMPTLPPPSVSATGPGPGPGPGPGPGPGPAPPNYSRPHGMGGPNMPPPGPSGVPPGMPGQPPGGPPKPWPEGPMANAAAPTSTPQKLIPPQPTGRPSPAPPAVPPAASPVMPPQTQSPGQPAQPAPMVPLHQKQSRITPIQKPRGLDPVEILQEREYRLQARIAHRIQELENLPGSLAGDLRTKATIELKALRLLNFQRQLRQEVVVCMRRDTALETALNAKAYKRSKRQSLREARITEKLEKQQKIEQERKRRQKHQEYLNSILQHAKDFKEYHRSVTGKIQKLTKAVATYHANTEREQKKENERIEKERMRRLMAEDEEGYRKLIDQKKDKRLAYLLQQTDEYVANLTELVRQHKAAQVAKEKKKKKKKKKAENAEGQTPAIGPDGEPLDETSQMSDLPVKVIHVESGKILTGTDAPKAGQLEAWLEMNPGYEVAPRSDSEESGSEEEEEEEEEEQPQAAQPPTLPVEEKKKIPDPDSDDVSEVDARHIIENAKQDVDDEYGVSQALARGLQSYYAVAHAVTERVDKQSALMVNGVLKQYQIKGLEWLVSLYNNNLNGILADEMGLGKTIQTIALITYLMEHKRINGPFLIIVPLSTLSNWAYEFDKWAPSVVKVSYKGSPAARRAFVPQLRSGKFNVLLTTYEYIIKDKHILAKIRWKYMIVDEGHRMKNHHCKLTQVLNTHYVAPRRLLLTGTPLQNKLPELWALLNFLLPTIFKSCSTFEQWFNAPFAMTGEKVDLNEEETILIIRRLHKVLRPFLLRRLKKEVEAQLPEKVEYVIKCDMSALQRVLYRHMQAKGVLLTDGSEKDKKGKGGTKTLMNTIMQLRKICNHPYMFQHIEESFSEHLGFTGGIVQGLDLYRASGKFELLDRILPKLRATNHKVLLFCQMTSLMTIMEDYFAYRGFKYLRLDGTTKAEDRGMLLKTFNEPGSEYFIFLLSTRAGGLGLNLQSADTVIIFDSDWNPHQDLQAQDRAHRIGQQNEVRVLRLCTVNSVEEKILAAAKYKLNVDQKVIQAGMFDQKSSSHERRAFLQAILEHEEQDELYLAAARIFSSTLLTVQRRSTRTS

SEQ ID NO: 908970 - protein, 186 aa, Homo sapiens
MKKIVDAVIKYKDSSSGRQLSEVFIQLPSRKELPEYYELIRKPVDFKKIKERIRNHKYRSLNDLEKDVMLLCQNAQTFNLEGSLIYEDSIVLQSVFTSVRQKIEKEDDSEGEESEEEEEGEEEGSESESRSVKVKIKLGRKEKAQDRLKGGRRRPSRGSRAKPVVSDDDSEEEQEEDRSGSGSEED

SEQ ID NO: 908971 - protein, 283 aa, Homo sapiens
MTQPAVWHVGYNSSVAFSSAHVRQRKAIEEGTLEEIEEEVRQKKSSRKRKRDSDAGSSTPTTSTRSRDKDDESKKQKKRGRPPAEKLSPNPPNLTKKMKKIVDAVIKYKDSSSGRQLSEVFIQLPSRKELPEYYELIRKPVDFKKIKERIRNHKYRSLNDLEKDVMLLCQNAQTFNLEGSLIYEDSIVLQSVFTSVRQKIEKEDDSEGEESEEEEEGEEEGSESESRSVKVKIKLGRKEKAQDRLKGGRRRPSRGSRAKPVVSDDDSEEEQEEDRSGSGSEED

SEQ ID NO: 908972 - protein, 708 aa, Homo sapiens
MSTPDPPLGGTPRPGPSPGPGPSPGAMLGPSPGPSPGSAHSMMGPSPGPPSAGHPIPTQGPGGYPQDNMHQMHKPMESMHEKGMSDDPRYNQMKGMGMRSGGHAGMGPPPSPMDQHSQGYPSPLGGSEHASSPVPASGPSSGPQMSSGPGGAPLDGADPQALGQQNRGPTPFNQNQLHQLRAQIMAYKMLARGQPLPDHLQMAVQGKRPMPGMQQQMPTLPPPSVSATGPGPGPGPGPGPGPGPAPPNYSRPHGMGGPNMPPPGPSGVPPGMPGQPPGGPPKPWPEGPMANAAAPTSTPQKLIPPQPTGRPSPAPPAVPPAASPVMPPQTQSPGQPAQPAPMVPLHQKQSRITPIQKPRGLDPVEILQEREYRLQARIAHRIQELENLPGSLAGDLRTKATIELKALRLLNFQRQLRQEVVVCMRRDTALETALNAKAYKRSKRQSLREARITEKLEKQQKIEQERKRRQKHQEYLNSILQHAKDFKEYHRSVTGKIQKLTKAVATYHANTEREQKKENERIEKERMRRLMAEDEEGYRKLIDQKKDKRLAYLLQQTDEYVANLTELVRQHKAAQVAKEKKKKKKKKKAENAEGQTPAIGPDGEPLDETSQMSDLPVKVIHVESGKILTGTDAPKAGQLEAWLEMNPGYEVAPRSDSEESGSEEEEEEEEEEQPQAAQPPTLPVEEKKKIPDPDSDDVSEVDARHIIE

SEQ ID NO: 908973 - protein, 51 aa, Homo sapiens
MCPLQVEYVIKCDMSALQRVLYRHMQAKGVLLTDGSEKDKKVGPRVPQLHS

SEQ ID NO: 908974 - protein, 284 aa, Homo sapiens
NLARYEAGVNSAEGPSPGAMLGPSPGPSPGSAHSMMGPSPGPPSAGHPIPTQGPGGYPQDNMHQMHKPMESMHEKGMSDDPRYNQMKGMGMRSGGHAGMGPPPSPMDQHSQGYPSPLGGSEHASSPVPASGPSSGPQMSSGPGGAPLDGADPQALGQQNRGPTPFNQNQLHQLRAQIMAYKMLARGQPLPDHLQMAVQGKRPMPGMQQQMPTLPPPSVSATGPGPGPGPGPGPGPGPAPPNYSRPHGMGGPNASPGPRALPRMQAALEGSSLLRPGMLCPSLKF

SEQ ID NO: 908975 - protein, 1356 aa, Homo sapiens; identical to SEQ ID NO: 908956

SEQ ID NO: 908976 - protein, 1356 aa, Homo sapiens; identical to SEQ ID NO: 908956

SEQ ID NO: 908977 - protein, 1356 aa, Homo sapiens; identical to SEQ ID NO: 908956

SEQ ID NO: 908978 - protein, 1234 aa, Homo sapiens
MSTPDPPLGGTPRPGPSPGPGPSPGAMLGPSPGPSPGSAHSMMGPSPGPPSAGHPIPTQGPGGYPQDNMHQMHKPMESMHEKGMSDDPRYNQMKGMGMRSGGHAGMGPPPSPMDQHSQGYPSPLGGSEHASSPVPASGPSSGPQMSSGPGGAPLDGADPQALGQQNRGPTPFNQNQLHQLRAQIMAYKMLARGQPLPDHLQMAVQGKRPMPGMQQQMPTLPPPSVSATGPGPGPGPGPGPGPGPAPPNYSRPHGMGGPNMPPPGPSGVPPGMPGQPPGGPPKPWPEGPMANAAAPTSTPQKLIPPQPTGRPSPAPPAVPPAASPVMPPQTQSPGQPAQPAPMVPLHQKQSRITPIQKPRGLDPVEILQEREYRLQARIAHRIQELENLPGSLAGDLRTKATIELKALRLLNFQRQLRQEVVVCMRRDTALETALNAKAYKRSKRQSLREARITEKLEKQQKIEQERKRRQKHQEYLNSILQHAKDFKEYHRSVTGKIQKLTKAVATYHANTEREQKKENERIEKERMRRLMAEDEEGYRKLIDQKKDKRLAYLLQQTDEYVANLTELVRQHKAAQVAKEKKKKKKKKKAENAEGQTPAIGPDGEPLDETSQMSDLPVKVIHVESGKILTGTDAPKAGQLEAWLEMNPGYEVAPRSDSEESGSEEEEEEEEEEQPQAAQPPTLPVEEKKKIPDPDSDDVSEVDARHIIENAKQDVDDEYGVSQALARGLQSYYAVAHAVTERVDKQSALMVNGVLKQYQIKGLEWLVSLYNNNLNGILADEMGLGKTIQTIALITYLMEHKRINGPFLIIVPLSTLSNWAYEFDKWAPSVVKVSYKGSPAARRAFVPQLRSGKFNVLLTTYEYIIKDKHILAKIRWKYMIVDEGHRMKNHHCKLTQVLNTHYVAPRRLLLTGTPLQNKLPELWALLNFLLPTIFKSCSTFEQWFNAPFAMTGEKVDLNEEETILIIRRLHKVLRPFLLRRLKKEVEAQLPEKVEYVIKCDMSALQRVLYRHMQAKGVLLTDGSEKDKKGKGGTKTLMNTIMQLRKICNHPYMFQHIEESFSEHLGFTGGIVQGLDLYRASGKFELLDRILPKLRATNHKVLLFCQMTSLMTIMEDYFAYRGFKYLRLDGTTKAEDRGMLLKTFNEPGSEYFIFLLSTRAGGLGLNLQSADTVIIFDSDWNPHQDLQAQDRAHRIGQQNEVERLTCEEEEEKMFGRGSRHRKEVDYSDSLTEKQWL

SEQ ID NO: 908979 - protein, 830 aa, Homo sapiens
MRRLMAEDEEGYRKLIDQKKDKRLAYLLQQTDEYVANLTELVRQHKAAQVAKEKKKKKKKKKAENAEGQTPAIGPDGEPLDETSQMSDLPVKVIHVESGKILTGTDAPKAGQLEAWLEMNPGYEVAPRSDSEESGSEEEEEEEEEEQPQAAQPPTLPVEEKKKIPDPDSDDVSEVDARHIIENAKQDVDDEYGVSQALARGLQSYYAVAHAVTERVDKQSALMVNGVLKQYQIKGLEWLVSLYNNNLNGILADEMGLGKTIQTIALITYLMEHKRINGPFLIIVPLSTLSNWAYEFDKWAPSVVKVSYKGSPAARRAFVPQLRSGKFNVLLTTYEYIIKDKHILAKIRWKYMIVDEGHRMKNHHCKLTQVLNTHYVAPRRLLLTGTPLQNKLPELWALLNFLLPTIFKSCSTFEQWFNAPFAMTGEKVDLNEEETILIIRRLHKVLRPFLLRRLKKEVEAQLPEKVEYVIKCDMSALQRVLYRHMQAKGVLLTDGSEKDKKGKGGTKTLMNTIMQLRKICNHPYMFQHIEESFSEHLGFTGGIVQGLDLYRASGKFELLDRILPKLRATNHKVLLFCQMTSLMTIMEDYFAYRGFKYLRLDGTTKAEDRGMLLKTFNEPGSEYFIFLLSTRAGGLGLNLQSADTVIIFDSDWNPHQDLQAQDRAHRIGQQNEVRVLRLCTVNSVEEKILAAAKYKLNVDQKVIQAGMFDQKSSSHERRAFLQAILEHEEQDEEEDEVPDDETVNQMIARHEEEFDLFMRMDLDRRREEARNPKRKPRLMEEDELPSWIIKDDAEVERLTCEEEEEKMFGRGSRHRKEVDYSDSLTEKQWL

SEQ ID NO: 908980 - protein, 846 aa, Homo sapiens
AAAYYYYYCSEFKLLTMYGDMAEDEEGYRKLIDQKKDKRLAYLLQQTDEYVANLTELVRQHKAAQVAKEKKKKKKKKKAENAEGQTPAIGPDGEPLDETSQMSDLPVKVIHVESGKILTGTDAPKAGQLEAWLEMNPGYEVAPRSDSEESGSEEEEEEEEEEQPQAAQPPTLPVEEKKKIPDPDSDDVSEVDARHIIENAKQDVDDEYGVSQALARGLQSYYAVAHAVTERVDKQSALMVNGVLKQYQIKGLEWLVSLYNNNLNGILADEMGLGKTIQTIALITYLMEHKRINGPFLIIVPLSTLSNWAYEFDKWAPSVVKVSYKGSPAARRAFVPQLRSGKFNVLLTTYEYIIKDKHILAKIRWKYMIVDEGHRMKNHHCKLTQVLNTHYVAPRRLLLTGTPLQNKLPELWALLNFLLPTIFKSCSTFEQWFNAPFAMTGEKVDLNEEETILIIRRLHKVLRPFLLRRLKKEVEAQLPEKVEYVIKCDMSALQRVLYRHMQAKGVLLTDGSEKDKKGKGGTKTLMNTIMQLRKICNHPYMFQHIEESFSEHLGFTGGIVQGLDLYRASGKFELLDRILPKLRATNHKVLLFCQMTSLMTIMEDYFAYRGFKYLRLDGTTKAEDRGMLLKTFNEPGSEYFIFLLSTRAGGLGLNLQSADTVIIFDSDWNPHQDLQAQDRAHRIGQQNEVRVLRLCTVNSVEEKILAAAKYKLNVDQKVIQAGMFDQKSSSHERRAFLQAILEHEEQDEEEDEVPDDETVNQMIARHEEEFDLFMRMDLDRRREEARNPKRKPRLMEEDELPSWIIKDDAEVERLTCEEEEEKMFGRGSRHRKEVDYSDSLTEKQWL

SEQ ID NO: 908981 - protein, 768 aa, Homo sapiens
MACREDTIDHKRCLLVHSLSDSMGHGIVGLQATCMSGKILTGTDAPKAGQLEAWLEMNPGYEVAPRSDSEESGSEEEEEEEEEEQPQAAQPPTLPVEEKKKIPDPDSDDVSEVDARHIIENAKQDVDDEYGVSQALARGLQSYYAVAHAVTERVDKQSALMVNGVLKQYQIKGLEWLVSLYNNNLNGILADEMGLGKTIQTIALITYLMEHKRINGPFLIIVPLSTLSNWAYEFDKWAPSVVKVSYKGSPAARRAFVPQLRSGKFNVLLTTYEYIIKDKHILAKIRWKYMIVDEGHRMKNHHCKLTQVLNTHYVAPRRLLLTGTPLQNKLPELWALLNFLLPTIFKSCSTFEQWFNAPFAMTGEKVDLNEEETILIIRRLHKVLRPFLLRRLKKEVEAQLPEKVEYVIKCDMSALQRVLYRHMQAKGVLLTDGSEKDKKGKGGTKTLMNTIMQLRKICNHPYMFQHIEESFSEHLGFTGGIVQGLDLYRASGKFELLDRILPKLRATNHKVLLFCQMTSLMTIMEDYFAYRGFKYLRLDGTTKAEDRGMLLKTFNEPGSEYFIFLLSTRAGGLGLNLQSADTVIIFDSDWNPHQDLQAQDRAHRIGQQNEVRVLRLCTVNSVEEKILAAAKYKLNVDQKVIQAGMFDQKSSSHERRAFLQAILEHEEQDEEEDEVPDDETVNQMIARHEEEFDLFMRMDLDRRREEARNPKRKPRLMEEDELPSWIIKDDAEVERLTCEEEEEKMFGRGSRHRKEVDYSDSLTEKQWL

SEQ ID NO: 908982 - protein, 564 aa, Homo sapiens
MHMQLLLCREEIYTCCPGWSRTLSNWAYEFDKWAPSVVKVSYKGSPAARRAFVPQLRSGKFNVLLTTYEYIIKDKHILAKIRWKYMIVDEGHRMKNHHCKLTQVLNTHYVAPRRLLLTGTPLQNKLPELWALLNFLLPTIFKSCSTFEQWFNAPFAMTGEKVDLNEEETILIIRRLHKVLRPFLLRRLKKEVEAQLPEKVEYVIKCDMSALQRVLYRHMQAKGVLLTDGSEKDKKGKGGTKTLMNTIMQLRKICNHPYMFQHIEESFSEHLGFTGGIVQGLDLYRASGKFELLDRILPKLRATNHKVLLFCQMTSLMTIMEDYFAYRGFKYLRLDGTTKAEDRGMLLKTFNEPGSEYFIFLLSTRAGGLGLNLQSADTVIIFDSDWNPHQDLQAQDRAHRIGQQNEVRVLRLCTVNSVEEKILAAAKYKLNVDQKVIQAGMFDQKSSSHERRAFLQAILEHEEQDEEEDEVPDDETVNQMIARHEEEFDLFMRMDLDRRREEARNPKRKPRLMEEDELPSWIIKDDAEVERLTCEEEEEKMFGRGSRHRKEVDYSDSLTEKQWL

SEQ ID NO: 908983 - protein, 1356 aa, Homo sapiens; identical to SEQ ID NO: 908956

SEQ ID NO: 908984 - protein, 340 aa, Homo sapiens
PYMFQHIEEWLQIFRSCMMVFIRLLVRKICNHPYMFQHIEESFSEHLGFTGGIVQGLDLYRASGKFELLDRILPKLRATNHKVLLFCQMTSLMTIMEDYFAYRGFKYLRLDGTTKAEDRGMLLKTFNEPGSEYFIFLLSTRAGGLGLNLQSADTVIIFDSDWNPHQDLQAQDRAHRIGQQNEVRVLRLCTVNSVEEKILAAAKYKLNVDQKVIQAGMFDQKSSSHERRAFLQAILEHEEQDEEEDEVPDDETVNQMIARHEEEFDLFMRMDLDRRREEARNPKRKPRLMEEDELPSWIIKDDAEVERLTCEEEEEKMFGRGSRHRKEVDYSDSLTEKQWL

SEQ ID NO: 908985 - protein, 1341 aa, Homo sapiens
  misc_feature (1339)..(1339): Xaa can be any naturally occurring amino acid
MSTPDPPLGGTPRPGPSPGPGPSPGAMLGPSPGPSPGSAHSMMGPSPGPPSAGHPIPTQGPGGYPQDNMHQMHKPMESMHEKGMSDDPRYNQMKGMGMRSGGHAGMGPPPSPMDQHSQGYPSPLGGSEHASSPVPASGPSSGPQMSSGPGGAPLDGADPQALGQQNRGPTPFNQNQLHQLRAQIMAYKMLARGQPLPDHLQMAVQGKRPMPGMQQQMPTLPPPSVSATGPGPGPGPGPGPGPGPAPPNYSRPHGMGGPNMPPPGPSGVPPGMPGQPPGGPPKPWPEGPMANAAAPTSTPQKLIPPQPTGRPSPAPPAVPPAASPVMPPQTQSPGQPAQPAPMVPLHQKQSRITPIQKPRGLDPVEILQEREYRLQARIAHRIQELENLPGSLAGDLRTKATIELKALRLLNFQRQLRQEVVVCMRRDTALETALNAKAYKRSKRQSLREARITEKLEKQQKIEQERKRRQKHQEYLNSILQHAKDFKEYHRSVTGKIQKLTKAVATYHANTEREQKKENERIEKERMRRLMAEDEEGYRKLIDQKKDKRLAYLLQQTDEYVANLTELVRQHKAAQVAKEKKKKKKKKKAENAEGQTPAIGPDGEPLDETSQMSDLPVKVIHVESGKILTGTDAPKAGQLEAWLEMNPGYEVAPRSDSEESGSEEEEEEEEEEQPQAAQPPTLPVEEKKKIPDPDSDDVSEVDARHIIENAKQDVDDEYGVSQALARGLQSYYAVAHAVTERVDKQSALMVNGVLKQYQIKGLEWLVSLYNNNLNGILADEMGLGKTIQTIALITYLMEHKRINGPFLIIVPLSTLSNWAYEFDKWAPSVVKVSYKGSPAARRAFVPQLRSGKFNVLLTTYEYIIKDKHILAKIRWKYMIVDEGHRMKNHHCKLTQVLNTHYVAPRRLLLTGTPLQNKLPELWALLNFLLPTIFKSCSTFEQWFNAPFAMTGEKVDLNEEETILIIRRLHKVLRPFLLRRLKKEVEAQLPEKVEYVIKCDMSALQRVLYRHMQAKGVLLTDGSEKDKKGKGGTKTLMNTIMQLRKICNHPYMFQHIEESFSEHLGFTGGIVQGLDLYRASGKFELLDRILPKLRATNHKVLLFCQMTSLMTIMEDYFAYRGFKYLRLDGTTKAEDRGMLLKTFNEPGSEYFIFLLSTRAGGLGLNLQSADTVIIFDSDWNPHQDLQAQDRAHRIGQQNEVRVLRLCTVNSVEEKILAAAKYKLNVDQKVIQAGMFDQKSSSHERRAFLQAILEHEEQDESRHCSTGSGSASFAHTAPPPAGVNPDLEEPPLKEEDEVPDDETVNQMIARHEEEFDLFMRMTGRSREPHPRTPLKDTPCLXTE

SEQ ID NO: 908986 - protein, 1207 aa, Homo sapiens
MSTPDPPLGGTPRPGPSPGPGPSPGAMLGPSPGPSPGSAHSMMGPSPGPPSAGHPIPTQGPGGYPQDNMHQMHKPMESMHEKGMSDDPRYNQMKGMGMRSGGHAGMGPPPSPMDQHSQGYPSPLGGSEHASSPVPASGPSSGPQMSSGPGGAPLDGADPQALGQQNRGPTPFNQNQLHQLRAQIMAYKMLARGQPLPDHLQMAVQGKRPMPGMQQQMPTLPPPSVSATGPGPGPGPGPGPGPGPAPPNYSRPHGMGGPNMPPPGPSGVPPGMPGQPPGGPPKPWPEGPMANAAAPTSTPQKLIPPQPTGRPSPAPPAVPPAASPVMPPQTQSPGQPAQPAPMVPLHQKQSRITPIQKPRGLDPVEILQEREYRLQARIAHRIQELENLPGSLAGDLRTKATIELKALRLLNFQRQLRQEVVVCMRRDTALETALNAKAYKRSKRQSLREARITEKLEKQQKIEQERKRRQKHQEYLNSILQHAKDFKEYHRSVTGKIQKLTKAVATYHANTEREQKKENERIEKERMRRLMAEDEEGYRKLIDQKKDKRLAYLLQQTDEYVANLTELVRQHKAAQVAKEKKKKKKKKKAENAEGQTPAIGPDGEPLDETSQMSDLPVKVIHVESGKILTGTDAPKAGQLEAWLEMNPGYEVAPRSDSEESGSEEEEEEEEEEQPQAAQPPTLPVEEKKKIPDPDSDDVSEVDARHIIENAKQDVDDEYGVSQALARGLQSYYAVAHAVTERVDKQSALMVNGVLKQYQIKGLEWLVSLYNNNLNGILADEMGLGKTIQTIALITYLMEHKRINGPFLIIVPLSTLSNWAYEFDKWAPSVVKVSYKGSPAARRAFVPQLRSGKFNVLLTTYEYIIKDKHILAKIRWKYMIVDEGHRMKNHHCKLTQVLNTHYVAPRRLLLTGTPLQNKLPELWALLNFLLPTIFKSCSTFEQWFNAPFAMTGEKVDLNEEETILIIRRLHKVLRPFLLRRLKKEVEAQLPEKVEYVIKCDMSALQRVLYRHMQAKGVLLTDGSEKDKKGKGGTKTLMNTIMQLRKICNHPYMFQHIEESFSEHLGFTGGIVQGLDLYRASGKFELLDRILPKLRATNHKVLLFCQMTSLMTIMEDYFAYRGFKYLRLDGTTKAEDRGMLLKTFNEPGSEYFIFLLSTRAGGLGLNLQSADTVIIFDSDWNPHQVKAGRAPGRGEGRGCLQNLEETALA

SEQ ID NO: 908987 - protein, 288 aa, Homo sapiens
MPSQQSPKVLTHSSINSKVQVQSPISDKQWKAIEEGTLEEIEEEVRQKKSSRKRKRDSDAGSSTPTTSTRSRDKDDESKKQKKRGRPPAEKLSPNPPNLTKKMKKIVDAVIKYKDSSSGRQLSEVFIQLPSRKELPEYYELIRKPVDFKKIKERIRNHKYRSLNDLEKDVMLLCQNAQTFNLEGSLIYEDSIVLQSVFTSVRQKIEKEDDSEGEESEEEEEGEEEGSESESRSVKVKIKLGRKEKAQDRLKGGRRRPSRGSRAKPVVSDDDSEEEQEEDRSGSGSEED

SEQ ID NO: 908988 - protein, 73 aa, Homo sapiens
MRSRLPCEGLVARHPRELRVPSVRFWIDWPWVLTDMHIVPPHCSNPHAFVAEDEEGYRKLIDQKKDKRLAYLL

SEQ ID NO: 908989 - protein, 796 aa, Homo sapiens [sequence omitted]

SEQ ID NO: 908990 - protein, 796 aa, Homo sapiens [sequence omitted]

SEQ ID NO: 908991 - protein, 415 aa, Homo sapiens
MFLAPSYIHEVQENAAAGTVVGRVHAKDPDAANSPIRYSIDRHTDLDRFFTINPEDGFIKTTKPLDREETAWLNITVFAAEIHNRHQEAKVPVAIRVLDVNDNAPKFAAPYEGFICESDQTKPLSNQPIVTISADDKDDTANGPRFIFSLPPEIIHNPNFTVRDNRDNTAGVYARRGGFSRQKQDLYLLPIVISDGGIPPMSSTNTLTIKVCGCDVNGALLSCNAEAYILNAGLSTGALIAILACIVILLVIVVLFVTLRRQKKEPLIVFEEEDVRENIITYDDEGGGEEDTEAFDIATLQNPDGINGFIPRKDIKPEYQYMPRPGLRPAPNSVDVDDFINTRIQEADNDPTAPPYDSIQIYGYEGRGSVAGSLSSLESATTDSDLDYDYLQNWGPRFKKLADLYGSKDTFDDDS

SEQ ID NO: 908992 - protein, 856 aa, Homo sapiens
MKENYCLQAALVCLGMLCHSHAFAPERRGHLRPSFHGHHEKGKEGQVLQRSKRGWVWNQFFVIEEYTGPDPVLVGRLHSDIDSGDGNIKYILSGEGAGTIFVIDDKSGNIHATKTLDREERAQYTLMAQAVDRDTNRPLEPPSEFIVKVQDINDNPPEFLHETYHANVPERSNVGTSVIQVTASDADDPTYGNSAKLVYSILEGQPYFSVEAQTGIIRTALPNMDREAKEEYHVVIQAKDMGGHMGGLSGTTKVTITLTDVNDNPPKFPQSVYQMSVSEAAVPGEEVGRVKAKDPDIGENGLVTYNIVDGDGMESFEITTDYETQEGVIKLKKPVDFETKRAYSLKVEAANVHIDPKFISNGPFKDTVTVKIAVEDADEPPMFLAPSYIHEVQENAAAGTVVGRVHAKDPDAANSPIRYSIDRHTDLDRFFTINPEDGFIKTTKPLDREETAWLNITVFAAEIHNRHQEAKVPVAIRVLDVNDNAPKFAAPYEGFICESDQTKPLSNQPIVTISADDKDDTANGPRFIFSLPPEIIHNPNFTVRDNRDNTAGVYARRGGFSRQKQDLYLLPIVISDGGIPPMSSTNTLTIKVCGCDVNGALLSCNAEAYILNAGLSTGALIAILACIVILLGCPSLMEPPSPREDMRLLYLGFQLMLFSYVKVNRRFCLLGVFIKLPFLYVVATESPTITYVIVVLFVTLRRQKKEPLIVFEEEDVRENIITYDDEGGGEEDTEAFDIATLQNPDGINGFIPRKDIKPEYQYMPRPGLRPAPNSVDVDDFINTRIQEADNDPTAPPYDSIQIYGYEGRGSVAGSLSSLESATTDSDLDYDYLQNWGPRFKKLADLYGSKDTFDDDS

SEQ ID NO: 908993 - protein, 796 aa, Homo sapiens [sequence omitted]

SEQ ID NO: 908994 - protein, 106 aa, Homo sapiens
LHSDIDSGDGNIKYILSGEGAGTIFVIDDKSGNIHATKTLDREERAQYTLMAQAVDRDTNRPLEPPSEFIVKVQDINDNPPEFLHETYHANVPERSNVGAYGVGGL

SEQ ID NO: 908995 - protein, 245 aa, Homo sapiens
MEETIKDPPTSAVLLDHCHFSQVIFNSVEKFYIPGGDVTCHYTFTQHFIPRRKDWIGIFRVGWKTTREYYTFMWVTLPIDLNNKSAKQQEVQFKAYYLPKDDEYYQFCYVDEDGVVRGASIPFQFRPENEEDILVVTTQGKVERTIEQEQARSYAHTENPGADRTDWNQASRRPHTPEHARLQLHTASPRREHRNPLPEPSTKTLAPLKQRQRTPQDYRGRQNLLPRGTHHRHSGMSSENPRTLG

SEQ ID NO: 908996 - protein, 128 aa, Homo sapiens
MKKQQELMDENFDLSKRLSENEIICNALQRQKERLEGENDLLKRENSRLLSYMGLDFNSLPYQVPTSDEGGARQNPGLAYGNPYSGIQESSSPSPLSIKKCPICKADDICDHTLERSTVPSSTERSTV

SEQ ID NO: 908997 - protein, 446 aa, Homo sapiens
MEETIKDPPTSAVLLDHCHFSQVIFNSVEKFYIPGGDVTCHYTFTQHFIPRRKDWIGIFRVGWKTTREYYTFMWVTLPIDLNNKSAKQQEVQFKAYYLPKDDEYYQFCYVDEDGVVRGASIPFQFRPENEEDILVVTTQGEVEEIEQHNKELCKENQELKDSCISLQKQNSDMQAELQKKQEELETLQSINKKLELKVKEQKDYWETELLQLKEQNQKMSSENEKMGIRVDQLQAQLSTQEKEMEKLVQGDQDKTEQLEQLKKENDHLFLSLTEQRKDQKKLEQTVEQMKQNETTAMKKQQELMDENFDLSKRLSENEIICNALQRQKERLEGENDLLKRENSRLLSYMGLDFNSLPYQVPTSDEGGARQNPGLAYGNPYSGIQESSSPSPLSIKKCPICKADDICDHTLEQQQMQPLCFNCPICDKIFPATEKQIFEDHVFCHSL

SEQ ID NO: 908998 - protein, 463 aa, Homo sapiens
LTASTSRGKSAEAWTPTMEETIKDPPTSAVLLDHCHFSQVIFNSVEKFYIPGGDVTCHYTFTQHFIPRRKDWIGIFRVGWKTTREYYTFMWVTLPIDLNNKSAKQQEVQFKAYYLPKDDEYYQFCYVDEDGVVRGASIPFQFRPENEEDILVVTTQGEVEEIEQHNKELCKENQELKDSCISLQKQNSDMQAELQKKQEELETLQSINKKLELKVKEQKDYWETELLQLKEQNQKMSSENEKMGIRVDQLQAQLSTQEKEMEKLVQGDQDKTEQLEQLKKENDHLFLSLTEQRKDQKKLEQTVEQMKQNETTAMKKQQELMDENFDLSKRLSENEIICNALQRQKERLEGENDLLKRENSRLLSYMGLDFNSLPYQVPTSDEGGARQNPGLAYGNPYSGIQESSSPSPLSIKKCPICKADDICDHTLEQQQMQPLCFNCPICDKIFPATEKQIFEDHVFCHSL

SEQ ID NO: 908999 - protein, 446 aa, Homo sapiens; identical to SEQ ID NO: 908997

SEQ ID NO: 909000 - protein, 381 aa, Homo sapiens
MEETIKDPPTSAVLLDHCHFSQVIFNSVEKFYIPGGDVTCHYTFTQHFIPRRKDWIGIFRVGWKTTREYYTFMWVTLPIDLNNKSAKQQEVQFKAYYLPKDDEYYQFCYVDEDGVVRGASIPFQFRPENEEDILVVTTQGEVEEIEQHNKELCKENQELKDSCISLQKQNSDMQAELQKKQEELETLQSINKKLELKVKEQKDYWETELLQLKEQNQKMSSENEKMGIRVDQLQAQLSTQEKEMEKLVQGDQDKTEQLEQLKKENDHLFLSLTEQRKDQKKLEQTVEQMKQNETTAMKKQQELMDENFDLSKRLSENEIICNALQRQKERLEGENDLLKRENSRLLSYMGLDFNSLPYQVPTSDEGGARPLHQEMPYLQSR

SEQ ID NO: 909001 - protein, 470 aa, Homo sapiens
MEETIKDPPTSAVLLDHCHFSQVIFNSVEKFYIPGGDVTCHYTFTQHFIPRRKDWIGIFRAFKCFQDKLEQELLKWRSQGQKLQVGWKTTREYYTFMWVTLPIDLNNKSAKQQEVQFKAYYLPKDDEYYQFCYVDEDGVVRGASIPFQFRPENEEDILVVTTQGEVEEIEQHNKELCKENQELKDSCISLQKQNSDMQAELQKKQEELETLQSINKKLELKVKEQKDYWETELLQLKEQNQKMSSENEKMGIRVDQLQAQLSTQEKEMEKLVQGDQDKTEQLEQLKKENDHLFLSLTEQRKDQKKLEQTVEQMKQNETTAMKKQQELMDENFDLSKRLSENEIICNALQRQKERLEGENDLLKRENSRLLSYMGLDFNSLPYQVPTSDEGGARQNPGLAYGNPYSGIQESSSPSPLSIKKCPICKADDICDHTLEQQQMQPLCFNCPICDKIFPATEKQIFEDHVFCHSL

SEQ ID NO: 909002 - protein, 406 aa, Homo sapiens
MDNITYSIIGNTIASKGLYVVGWKTTREYYTFMWVTLPIDLNNKSAKQQEVQFKAYYLPKDDEYYQFCYVDEDGVVRGASIPFQFRPENEEDILVVTTQGEVEEIEQHNKELCKENQELKDSCISLQKQNSDMQAELQKKQEELETLQSINKKLELKVKEQKDYWETELLQLKEQNQKMSSENEKMGIRVDQLQAQLSTQEKEMEKLVQGDQDKTEQLEQLKKENDHLFLSLTEQRKDQKKLEQTVEQMKQNETTAMKKQQELMDENFDLSKRLSENEIICNALQRQKERLEGENDLLKRENSRLLSYMGLDFNSLPYQVPTSDEGGARQNPGLAYGNPYSGIQESSSPSPLSIKKCPICKADDICDHTLEQQQMQPLCFNCPICDKIFPATEKQIFEDHVFCHSL

SEQ ID NO: 909003 - protein, 301 aa, Homo sapiens
EDILVVTTQGEVEEIDSCISLQKQNSDMQAELQKKQEELETLQSINKKLELKVKEQKDYWETELLQLKEQNQKMSSENEKMGIRVDQLQAQLSTQEKEMEKLVQGDQDKTEQLEQLKKENDHLFLSLTEQRKDQKKLEQTVEQMKQNETTAMKKQQELMDENFDLSKRLSENEIICNALQRQKERLEGENDLLKRENSRLLSYMGLDFNSLPYQVPTSDEGGARQNPGLAYGNPYSGIQESSSPSPLSIKKCPICKADDICDHTLEQQQMQPLCFNCPICDKIFPATEKQIFEDHVFCHSL

SEQ ID NO: 909004 - protein, 185 aa, Homo sapiens
IASGARDDYGLTEQRKDQKKLEQTVEQMKQNETTAMKKQQELMDENFDLSKRLSENEIICNALQRQKERLEGENDLLKRENSRLLSYMGLDFNSLPYQVPTSDEGGARQNPGLAYGNPYSGIQESSSPSPLSIKKCPICKADDICDHTLEQQQMQPLCFNCPICDKIFPATEKQIFEDHVFCHSL

SEQ ID NO: 909005 - protein, 446 aa, Homo sapiens; identical to SEQ ID NO: 908997

SEQ ID NO: 909006 - protein, 148 aa, Homo sapiens
  misc_feature (10)..(10): Xaa can be any naturally occurring amino acid
  misc_feature (16)..(16): Xaa can be any naturally occurring amino acid
MDENFEPLSXESNVWXSENEIICNALQRQKERLEGENDLLKRENSRLLSYMGLDFNSLPYQVPTSDEGGARQNPGLAYGNPYSGIQESSSPSPLSIKKCPICKADDICDHTLEQQQMQPLCFNCPICDKIFPATEKQIFEDHVFCHSL

SEQ ID NO: 909007 - protein, 126 aa, Homo sapiens
HNIITATTDLYTRPPRLLGTRRHYMLTIMGLDFNSLPYQVPTSDEGGARQNPGLAYGNPYSGIQESSSPSPLSIKKCPICKADDICDHTLEQQQMQPLCFNCPICDKIFPATEKQIFEDHVFCHSL

SEQ ID NO: 909008 - protein, 70 aa, Homo sapiens
EITTWNSSNNNLLTKLSIKKCPICKADDICDHTLEQQQMQPLCFNCPICDKIFPATEKQIFEDHVFCHSL

SEQ ID NO: 909009 - protein, 317 aa, Homo sapiens
MEETIKDPPTSAVLLDHCHFSQVIFNSVEKFYIPGGDVTCHYTFTQHFIPRRKDWIGIFRVGWKTTREYYTFMWVTLPIDLNNKSAKQQEVQFKAYYLPKDDEYYQFCYVDEDGVVRGASIPFQFRPENEEDILVVTTQGEVEEIEQHNKELCKENQELKDSCISLQKQNSDMQAELQKKQEELETLQSINKKLELKVKEQKDYWETELLQLKEQNQKMSSENEKMGIRVDQLQAQLSTQEKEMEKLVQGDQDKTEQLEQLKKENDHLFLSLTEQRKDQKKLEQTVEQMKQNETTAMKKQQELMACLSLDGYVGGSL

SEQ ID NO: 909010 - protein, 264 aa, Homo sapiens
MEETIKDPPTSAVLLDHCHFSQVIFNSVEKFYIPGGDVTCHYTFTQHFIPRRKDWIGIFRVGWKTTREYYTFMWVTLPIDLNNKSAKQQEVQFKAYYLPKDDEYYQFCYVDEDGVVRGASIPFQFRPENEEDILVVTTQGEVEEIEQHNKELCKENQELKDSCISLQKQNSDMQAELQKKQEELETLQSINKKLELKVKEQKDYWETELLQLKEQNQKMSSENEKMGIRVDQLQVGNAICLSKDIFLALPLLQFGGLERCISLQ

SEQ ID NO: 909011 - protein, 264 aa, Homo sapiens; identical to SEQ ID NO: 909010

SEQ ID NO: 909012 - protein, 446 aa, Homo sapiens; identical to SEQ ID NO: 908997

SEQ ID NO: 909013 - protein, 446 aa, Homo sapiens; identical to SEQ ID NO: 908997

SEQ ID NO: 909014 - protein, 446 aa, Homo sapiens; identical to SEQ ID NO: 908997

SEQ ID NO: 909015 - protein, 446 aa, Homo sapiens; identical to SEQ ID NO: 908997

SEQ ID NO: 909016 - protein, 415 aa, Homo sapiens
MEETIKDPPTSAVLLDHCHFSQVIFNSVEKFYIPGGDVTCHYTFTQHFIPRRKDWIGIFRVGWKTTREYYTFMWVTLPIDLNNKSAKQQEVQFKAYYLPKDDEYYQFCYVDEDGVVRGASIPFQFRPENEEDILVVTTQGEVEEIEQHNKELCKENQELKDSCISLQKQNSDMQAELQKKQEELETLQSINKKLELKVKEQKDYWETELLQLKEQNQKMSSENEKMGIRVDQLQAQLSTQEKEMEKLVQGDQDKTEQLEQLKKENDHLFLSLTEQRKDQKKLEQTVEQMKQNETTAMKKQQELMDENFDLSKRLSENEIICNALQRQKERLEGENDVSKKVLPPARSPSRNALSAKQMIFVITPWSNSRCSPFVSIVQFVTRSSQLQRSRSLKTTCSATLSEYPNLLDVYRDFIE

SEQ ID NO: 909017 - protein, 360 aa, Homo sapiens [sequence omitted]

SEQ ID NO: 909018 - protein, 412 aa, Homo sapiens
GAATSSRIPTQHYIALDRRIGLASLDVGWKTTREYYTFMWVTLPIDLNNKSAKQQEVQFKAYYLPKDDEYYQFCYVDEDGVVRGASIPFQFRPENEEDILVVTTQGEVEEIEQHNKELCKENQELKDSCISLQKQNSDMQAELQKKQEELETLQSINKKLELKVKEQKDYWETELLQLKEQNQKMSSENEKMGIRVDQLQAQLSTQEKEMEKLVQGDQDKTEQLEQLKKENDHLFLSLTEQRKDQKKLEQTVEQMKQNETTAMKKQQELMDENFDLSKRLSENEIICNALQRQKERLEGENDLLKRENSRLLSYMGLDFNSLPYQVPTSDEGGARQNPGLAYGNPYSGIQESSSPSPLSIKKCPICKADDICDHTLEQQQMQPLCFNCPICDKIFPATEKQIFEDHVFCHSL

SEQ ID NO: 909019 - protein, 179 aa, Homo sapiens
STHASPTRRGRVGRLEQTVEQMKQNETTAMKKQQELMDENFDLSKRLSENEIICNALQRQKERLEGENDLLKRENSRLLSYMGLDFNSLPYQVPTSDEGGARQNPGLAYGNPYSGIQESSSPSPLSIKKCPICKADDICDHTLEQQQMQPLCFNCPICDKIFPATEKQIFEDHVFCHSL

SEQ ID NO: 909020 - protein, 150 aa, Homo sapiens
MKKQQELMDENFDLSKRLSENEIICNALQRQKERLEGENDLLKRENSRLLSYMGLDFNSLPYQVPTSDEGGARQNPGLAYGNPYSGIQESSSPSPLSIKKCPICKADDICDHTLEQQQMQPLCFNCPICDKIFPATEKQIFEDHVFCHSL

SEQ ID NO: 909021 - protein, 69 aa, Homo sapiens
GPSLLLNQESLPPALSIKKCPICKADDICDHTLEQQQMQPLCFNCPICDKIFPATEKQIFEDHVFCHSL

SEQ ID NO: 909022 - protein, 339 aa, Homo sapiens
MEETIKDPPTSAVLLDHCHFSQVIFNSVEKFYIPGGDVTCHYTFTQHFIPRRKDWIGIFRVGWKTTREYYTFMWVTLPIDLNNKSAKQQEVQFKAYYLPKDDEYYQFCYVDEDGVVRGASIPFQFRPENEEDILVVTTQGEVEEIEQHNKELCKENQELKDSCISLQKQNSDMQAELQKKQEELETLQSINKKLELKVKEQKDYWETELLQLKEQNQKMSSENEKMGIRVDQLQAQLSTQEKEMEKLVQGDQDKTEQLEQLKKENDHLFLSLTEQRKDQKKLEQTVEQMKQNETTAMKKQQELMDENFDLSKRLSENEIICNALQRQKERLEGENDVSV

SEQ ID NO: 909023 - protein, 278 aa, Homo sapiens
MEETIKDPPTSAVLLDHCHFSQVIFNSVEKFYIPGGDVTCHYTFTQHFIPRRKDWIGIFRVGWKTTREYYTFMWVTLPIDLNNKSAKQQEVQFKAYYLPKDDEYYQFCYVDEDGVVRGASIPFQFRPENEEDILVVTTQGEVEEIEQHNKELCKENQELKDSCISLQKQNSDMQAELQKKQEELETLQSINKKLELKVKEQKDYWETELLQLKEQNQKMSSENEKMGIRVDQLQAQLSTQEKEMEKLVQGDQDKTEQLEQLKKENDHLFLSLTEQVES

SEQ ID NO: 909024 - protein, 375 aa, Homo sapiens
RQGCTVRSFWSSRCILRARPELESPAPPAFRPAMAAVALMPPPLLLLLLLASPPAASAPSARDPFAPQLGDTQNCQLRCRDRDLGPQPSQAGLEGASESPYDRAVLISACERGCRLFSICRFVARSSKPNATQTECEAACVEAYVKEAEQQACSHGCWSQPAEPEPEQKRKVLEAPSGALSLLDLFSTLCNDLVNSAQGFVSSTWTYYLQTDNGKVVVFQTQPIVESLGFQGGRLQRVEVTWRGSHPEALEVHVDPVGPLDKVRKAKIRVKTSSKAKVESEEPQDNDFLSCMSRRSGLPRWILACCLFLSVLVMLWLSCSTLVTAPGQHLKFQPLTLEQHKGFMMEPDWPLYPPPSHACEDSLPPYKLKLDLTKL

SEQ ID NO: 909025 - protein, 342 aa, Homo sapiens
MAAVALMPPPLLLLLLLASPPAASAPSARDPFAPQLGDTQNCQLRCRDRDLGPQPSQAGLEGASESPYDRAVLISACERGCRLFSICRFVARSSKPNATQTECEAACVEAYVKEAEQQACSHGCWSQPAEPEPEQKRKVLEAPSGALSLLDLFSTLCNDLVNSAQGFVSSTWTYYLQTDNGKVVVFQTQPIVESLGFQGGRLQRVEVTWRGSHPEALEVHVDPVGPLDKVRKAKIRVKTSSKAKVESEEPQDNDFLSCMSRRSGLPRWILACCLFLSVLVMLWLSCSTLVTAPGQHLKFQPLTLEQHKGFMMEPDWPLYPPPSHACEDSLPPYKLKLDLTKL

SEQ ID NO: 909026 - protein, 309 aa, Homo sapiens
MAAVALMPPPLLLLLLLASPPAASAPSARDPFAPQLGDTQNCQLRCRDRDLGPQPSQAGLEGASESPYDRAVLISACERGCRLFSICRFVARSSKPNATQTECEAACVEAYVKEAEQQACSHGCWSQPAEPEPEQKRKVLEAPSGALSLLDLFSTLCNDLVNSAQGFVSSTWTYYLQTDNGKVVVFQTQPIVESLGFQGGRLQRVEVTWRGSHPEALEVHVDPVGPLDKVRKAKIRVKTSSKAKALGSASLDPGLLPLPLRAGDAVAELLHPGDRAWPAPQVPASDPGAAQGLHDGARLAPVPAAVPRL

SEQ ID NO: 909027 - protein, 287 aa, Homo sapiens
MAAVALMPPPLLLLLLLASPPAASAPSARDPFAPQLGDTQNCQLRCRDRDLGPQPSQAGLEGASESPYDRAVLISACERGCRLFSICRFVARSSKPNATQTECEAACVEAYVKEAEQQACSHGCWSQPAEPEPEQKRKVLEAPSGALSLLDLFSTLCNDLVNSAQGFVSSTWTYYLQTDNGKVVVFQTQPIVESLGFQGGRLQRVEVTWRGSHPEALEVHVGKVQPRPVFLPWVAPLPQGVGLANRPSRIGISISQVLGSMAHPPGLHGLFPRVPWSTSQGSMVHFS

SEQ ID NO: 909028 - protein, 342 aa, Homo sapiens; identical to SEQ ID NO: 909025

SEQ ID NO: 909029 - protein, 374 aa, Homo sapiens
  misc_feature (8)..(8): Xaa can be any naturally occurring amino acid
RLVRPRCXGCSRCILRARPELESPAPPAFRPAMAAVALMPPPLLLLLLLASPPAASAPSARDPFAPQLGDTQNCQLRCRDRDLGPQPSQAGLEGASESPYDRAVLISACERGCRLFSICRFVARSSKPNATQTECEAACVEAYVKEAEQQACSHGCWSQPAEPEPEQKRKVLEAPSGALSLLDLFSTLCNDLVNSAQGFVSSTWTYYLQTDNGKVVVFQTQPIVESLGFQGGRLQRVEVTWRGSHPEALEVHVDPVGPLDKVRKAKIRVKTSSKAKVESEEPQDNDFLSCMSRRSGLPRWILACCLFLSVLVMLWLSCSTLVTAPGQHLKFQPLTLEQHKGFMMEPDWPLYPPPSHACEDSLPPYKLKLDLTKL

SEQ ID NO: 909030 - protein, 286 aa, Homo sapiens
MAAVALMPPPLLLLLLLASPPAASAPSARDPFAPQLGDTQNCQLRCRDRDLGPQPSQAGLEGASESPYDRAVLISACERGCRLFSICRFVARSSKPNATQTECEAACVEAYVKEAEQQACSHGCWSQPAEPEPEQKRKVLEAPSGALSLLDLFSTLCNDLVNSAQGFVSSTWTYYLQTDNGKVVVFQTQPIVESLGFQGGRLQRVEVTWRGSHPEALEVHVDPVGPLDKVRKAKIRVKTSSKAKVESEEPQDNDFLSCMSRWVAGPWGWEGGGTGGTGLPGPGLGS

SEQ ID NO: 909031 - protein, 104 aa, Homo sapiens
NLGGGGCSELRWRHCTPAWVTERDSLKKRKKIKQSEVGRRQSGLGARPLPVPPLPSSPLFLQPLTLEQHKGFMMEPDWPLYPPPSHACEDSLPPYKLKLDLTKL

SEQ ID NO: 909032 - protein, 110 aa, Homo sapiens
VTVMHVMAASMARGGVSARFCCRLPGHLVEQTWGHFRVGGGGGAGDNQKVSSDRLAPGGRGGRGRPGAARGRGERGVRRPLRPADPSEWQSRGQCSSPGPAPRGGPGRGL

SEQ ID NO: 909033 - protein, 187 aa, Homo sapiens
MALGTQGRLLLDRDSKDTQTRISQKGRRLQPPGTPSAPPQRRPRKQLNPCRGTERVDPGFEGVTLKFQIKPDSSLQIIPTYSLPCSSRSQESPADAVGGPAAHPGGTEAHSAGSEALEPRRCASCRTQRTPLWRDAEDGTPLCNACGIRYKKYGTRCSSCWLVPRKNVQPKRLCGRCGVSLDPIQEG

SEQ ID NO: 909034 - protein, 187 aa, Homo sapiens; identical to SEQ ID NO: 909033

SEQ ID NO: 909035 - protein, 187 aa, Homo sapiens; identical to SEQ ID NO: 909033

SEQ ID NO: 909036 - protein, 67 aa, Homo sapiens
WVSSGGPSGTGPGEIREGAGLGRNGGRANPGLLNASKASGAALSEPGAAGRIPLPGEAEDPRMLQNQ

SEQ ID NO: 909037 - protein, 167 aa, Homo sapiens
ARRSRSPNRVFQARARRERRTRAARSGPGTYSTRALSPSSSSAFALPSVPRVNVVFVDRSGQRIPVSGRVGDNVLHLAQRHGVDLEGACEASLACSTCHVYVSEDHLDLLPPPEEREDDMLDMAPLLQENSRLGCQIVLTPELEGAEFTLPKITRNFYVDGHVPKPH

SEQ ID NO: 909038 - protein, 143 aa, Homo sapiens
GAALGTYSTRALSPSSSSAFALPSVPRVNVVFVDRSGQRIPVSGRVGDNVLHLAQRHGVDLEGACEASLACSTCHVYVSEDHLDLLPPPEEREDDMLDMAPLLQENSRLGCQIVLTPELEGAEFTLPKITRNFYVDGHVPKPH

SEQ ID NO: 909039 - protein, 280 aa, Homo sapiens
VTVMHVMAASMARGGVSARFCCRLPGHLVEQTWGHFRVGGGGGAGDNQKVSSDRLAPGGRGGRGRPGAARGRVSAGGQVPHSSSHGIPLVPILPCSFISRSPFCFALFSTCASSLNSYFLTLDSTRALSPSSSSAFALPSVPRVNVVFVDRSGQRIPVSGRVGDNVLHLAQRHGVDLEGACEASLACSTCHVYVSEDHLDLLPPPEEREDDMLDMAPLLQENSRLGCQIVLTPELEGAEFTLPKITRNFYVDGHVPNPCEGQHPCLGESPMSRLWWGQGP

SEQ ID NO: 909040 - protein, 802 aa, Homo sapiens
MGYLRIFSPHPAKTGDGAQAEDLLLEVDLRDPVLQVEVGKFVSGTEMLHLAVLHSRKLCVYSVSGTLGNVEHGNQCQMKLMYEHNLQRTACNMTYGSFGGVKGRDLICIQSMDGMLMVFEQESYAFGRFLPGFLLPGPLAYSSRTDSFLTVSSCQQVESYKYQVLAFATDADKRQETEQQKLGSGKRLVVDWTLNIGEQALDICIVSFNQSASSVFVLGERNFFCLKDNGQIRFMKKLDWSPSCFLPYCSVSEGTINTLIGNHNNMLHIYQDVTLKWATQLPHIPVAVRVGCLHDLKGVIVTLSDDGHLQCSYLGTDPSLFQAPNVQSRELNYDELDVEMKELQKIIKDVNKSQGVWPMTEREDDLNVSVVVSPNFDSVSQATDVEVGTDLVPSVTVKVTLQNRVILQKAKLSVYVQPPLELTCDQFTFEFMSIPRVIQCKFRLPLKLICLPGQPSKTASHKITIDTNKSPVSLLSLFPGFASQSDDDQVNVMGFHFLGGARITVLASKTSQRYRIQSEQFEDLWLITNELILRLQEYFEKQGVKDFACSFSGSIPLQEYFELIDHHFELRINGEKLEELLSERAVQFRAIQRRLLARFKDKTPAPLQHLDTLLDGTYKQVIALADAVEENQGNLFQSFTRLKSATHLVILLIALWQKLSADQVAILEAAFLPLQEDTQELGWEETVDAAISHLLKTCLSKSSKEQALNLNSQLNIPKDTSQLKKHITLLCDRLSKGGRLCLSTDAAAPQTMVMPGGCTTIPESDLEERSVEQDSTELFTNHRHLTAETPRPEVSPLQGVSE

SEQ ID NO: 909041 - protein, 802 aa, Homo sapiens; identical to SEQ ID NO: 909040

SEQ ID NO: 909042 - protein, 802 aa, Homo sapiens; identical to SEQ ID NO: 909040

SEQ ID NO: 909043 - protein, 407 aa, Homo sapiens
IGKGQAHRDRSSSGFWVSSRTSSTVFQPSGCFKPEGKSIPRVIQCKFRLPLKLICLPGQPSKTASHKITIDTNKSPVSLLSLFPGFASQSDDDQVNVMGFHFLGGARITVLASKTSQRYRIQSEQFEDLWLITNELILRLQEYFEKQGVKDFACSFSGSIPLQEYFELIDHHFELRINGEKLEELLSERAVQFRAIQRRLLARFKDKTPAPLQHLDTLLDGTYKQVIALADAVEENQGNLFQSFTRLKSATHLVILLIALWQKLSADQVAILEAAFLPLQEDTQELGWEETVDAAISHLLKTCLSKSSKEQALNLNSQLNIPKDTSQLKKHITLLCDRLSKGGRLCLSTDAAAPQTMVMPGGCTTIPESDLEERSVEQDSTELFTNHRHLTAETPRPEVSPLQGVSE

SEQ ID NO: 909044 - protein, 887 aa, Homo sapiens
MSLFKARDWWSTILGDKEEFDQGCLCLANVDNSGNGQDKIIVGSFMGYLRIFSPHPAKTGDGAQAEDLLLEVDLRDPVLQVEVGKFVSGTEMLHLAVLHSRKLCVYSVSGTLGNVEHGNQCQMKLMYEHNLQRTACNMTYGSFGGVKGRDLICIQSMDGMLMVFEQESYAFGRFLPGFLLPGPLAYSSRTDSFLTVSSCQQVESYKYQVLAFATDADKRQETEQQKLGSGKRLVVDWTLNIGEQALDICIVSFNQSASSVFVLGERNFFCLKDNGQIRFMKKLDWSPSCFLPYCSVSEGTINTLIGNHNNMLHIYQDVTLKWATQLPHIPVAVRVGCLHDLKGVIVTLSDDGHLQCSYLGTDPSLFQAPNVQSRELNYDELDVEMKELQKIIKDVNKSQGVWPMTEREDDLNVSVVVSPNFDSVSQATDVEVGTDLVPSVTVKVTLQNRVILQKAKLSVYVQPPLELTCDQFTFEFMTPDLTRTVSFSVYLKRSYTPSELEGNAVVSYSRPTDRNPDGIPRVIQCKFRLPLKLICLPGQPSKTASHKITIDTNKSPVSLLSLFPGFASQSDDDQVNVMGFHFLGGARITVLASKTSQRYRIQSEQFEDLWLITNELILRLQEYFEKQGVKDFACSFSGSIPLQEYFELIDHHFELRINGEKLEELLSERAVQFRAIQRRLLARFKDKTPAPLQHLDTLLDGTYKQVIALADAVEENQGNLFQSFTRLKSATHLVILLIALWQKLSADQVAILEAAFLPLQEDTQELGWEETVDAAISHLLKTCLSKSSKEQALNLNSQLNIPKDTSQLKKHITLLCDRLSKGGRLCLSTDAAAPQTMVMPGGCTTIPESDLEERSVEQDSTELFTNHRHLTAETPRPGKRLDGLHKR

SEQ ID NO: 909045 - protein, 945 aa, Homo sapiens
MSLFKARDWWSTILGDKEEFDQGCLCLANVDNSGNGQDKIIVGSFMGYLRIFSPHPAKTGDGAQAEDLLLEVDLRDPVLQVEVGKFVSGTEMLHLAVLHSRKLCVYSVSGTLGNVEHGNQCQMKLMYEHNLQRTACNMTYGSFGGVKGRDLICIQSMDGMLMVFEQESYAFGRFLPGFLLPGPLAYSSRTDSFLTVSSCQQVESYKYQVLAFATDADKRQETEQQKLGSGKRLVVDWTLNIGEQALDICIVSFNQSASSVFVLGERNFFCLKDNGQIRFMKKLDWSPSCFLPYCSVSEGTINTLIGNHNNMLHIYQDVTLKWATQLPHIPVAVRVGCLHDLKGVIVTLSDDGHLQCSYLGTDPSLFQAPNVQSRELNYDELDVEMKELQKIIKDVNKSQGVWPMTEREDDLNVSVVVSPNFDSVSQATDVEVGTDLVPSVTVKVTLQNRVILQKAKLSVYVQPPLELTCDQFTFEFMTPDLTRTVSFSVYLKRSYTPSELEGNAVVSYSRPTDRNPDGIPRVIQCKFRLPLKLICLPGQPSKTASHKITIDTNKSPVSLLSLFPGFASQSDDDQVNVMGFHFLGGARITVLASKTSQRYRIQSEQFEDLWLITNELILRLQEYFEKQGVKDFACSFSGSIPLQEYFELIDHHFELRINGEKLEELLSERAVQFRAIQRRLLARFKDKTPAPLQHLDTLLDGTYKQVIALADAVEENQGNLFQSFTRLKSATHLVILLIALWQKLSADQVAILEAAFLPLQEDTQELVRTCKPVVGTASIIEVSALGRYHMAIRFSKGWEETVDAAISHLLKTCLSKSSKEQALNLNSQLNIPKDTSQLKKHITLLCDRLSKGGRLCLSTDAAAPQTMVMPGGCTTIPESDLEERSVEQDSTELFTNHRHLTAETPRPGGVFLHKLSLLAAIHVRCDLLLLAFHHDCEATPATWNC

SEQ ID NO: 909046 - protein, 704 aa, Homo sapiens
MSLFKARDWWSTILGDKEEFDQGCLCLANVDNSGNGQDKIIVGSFMGYLRIFSPHPAKTGDGAQAEDLLLEVDLRDPVLQVEVGKFVSGTEMLHLAVLHSRKLCVYSVSGTLGNVEHGNQCQMKLMYEHNLQRTACNMTYGSFGGVKGRDLICIQSMDGMLMVFEQESYAFGRFLPGFLLPGPLAYSSRTDSFLTVSSCQQVESYKYQVLAFATDADKRQETEQQKLGSGKRLVVDWTLNIGEQALDICIVSFNQSASSVFVLGERNFFCLKDNGQIRFMKKLDWSPSCFLPYCSVSEGTINTLIGNHNNMLHIYQDVTLKWATQLPHIPVAVRVGCLHDLKGVIVTLSDDGHLQCSYLGTDPSLFQAPNVQSRELNYDELDVEMKELQKIIKDVNKSQGVWPMTEREDDLNVSVVVSPNFDSVSQATDVEVGTDLVPSVTVKVTLQNRVILQKAKLSVYVQPPLELTCDQFTFEFMTPDLTRTVSFSVYLKRSYTPSELEGNAVVSYSRPTDRNPDGIPRVIQCKFRLPLKLICLPGQPSKTASHKITIDTNKSPVSLLSLFPGFASQSDDDQVNVMGFHFLGGARITVLASKTSQRYRIQSEQFEDLWLITNELILRLQEYFEKQGVKDFACSFSGSIPLQEYFELIDHHFELRINGEKLEELLSERAVQFRAIQRRLLARFKDKTPAPLQHLDTLFCQERK

SEQ ID NO: 909047 - protein, 847 aa, Homo sapiens
MSLFKARDWWSTILGDKEEFDQGCLCLANVDNSGNGQDKIIVGSFMGYLRIFSPHPAKTGDGAQAEDLLLEVDLRDPVLQVEVGKFVSGTEMLHLAVLHSRKLCVYSVSGTLGNVEHGNQCQMKLMYEHNLQRTACNMTYGSFGGVKGRDLICIQSMDGMLMVFEQESYAFGRFLPGFLLPGPLAYSSRTDSFLTVSSCQQVESYKYQVLAFATDADKRQETEQQKLGSGKRLVVDWTLNIGEQALDICIVSFNQSASSVFVLGERNFFCLKDNGQIRFMKKLDWSPSCFLPYCSVSEGTINTLIGNHNNMLHIYQDVTLKWATQLPHIPVAVRVGCLHDLKGVIVTLSDDGHLQCSYLGTDPSLFQAPNVQSRELNYDELDVEMKELQKIIKDVNKSQGVWPMTEREDDLNVSVVVSPNFDSVSQATDVEVGTDLVPSVTVKVTLQNRVILQKAKLSVYVQPPLELTCDQFTFEFMSIPRVIQCKFRLPLKLICLPGQPSKTASHKITIDTNKSPVSLLSLFPGFASQSDDDQVNVMGFHFLGGARITVLASKTSQRYRIQSEQFEDLWLITNELILRLQEYFEKQGVKDFACSFSGSIPLQEYFELIDHHFELRINGEKLEELLSERAVQFRAIQRRLLARFKDKTPAPLQHLDTLLDGTYKQVIALADAVEENQGNLFQSFTRLKSATHLVILLIALWQKLSADQVAILEAAFLPLQEDTQELGWEETVDAAISHLLKTCLSKSSKEQALNLNSQLNIPKDTSQLKKHITLLCDRLSKGGRLCLSTDAAAPQTMVMPGGCTTIPESDLEERSVEQDSTELFTNHRHLTAETPRPEVSPLQGVSE

SEQ ID NO: 909048 - protein, 887 aa, Homo sapiens
MSLFKARDWWSTILGDKEEFDQGCLCLANVDNSGNGQDKIIVGSFMGYLRIFSPHPAKTGDGAQAEDLLLEVDLRDPVLQVEVGKFVSGTEMLHLAVLHSRKLCVYSVSGTLGNVEHGNQCQMKLMYEHNLQRTACNMTYGSFGGVKGRDLICIQSMDGMLMVFEQESYAFGRFLPGFLLPGPLAYSSRTDSFLTVSSCQQVESYKYQVLAFATDADKRQETEQQKLGSGKRLVVDWTLNIGEQALDICIVSFNQSASSVFVLGERNFFCLKDNGQIRFMKKLDWSPSCFLPYCSVSEGTINTLIGNHNNMLHIYQDVTLKWATQLPHIPVAVRVGCLHDLKGVIVTLSDDGHLQCSYLGTDPSLFQAPNVQSRELNYDELDVEMKELQKIIKDVNKSQGVWPMTEREDDLNVSVVVSPNFDSVSQATDVEVGTDLVPSVTVKVTLQNRVILQKAKLSVYVQPPLELTCDQFTFEFMTPDLTRTVSFSVYLKRSYTPSELEGNAVVSYSRPTDRNPDGIPRVIQCKFRLPLKLICLPGQPSKTASHKITIDTNKSPVSLLSLFPGFASQSDDDQVNVMGFHFLGGARITVLASKTSQRYRIQSEQFEDLWLITNELILRLQEYFEKQGVKDFACSFSGSIPLQEYFELIDHHFELRINGEKLEELLSERAVQFRAIQRRLLARFKDKTPAPLQHLDTLLDGTYKQVIALADAVEENQGNLFQSFTRLKSATHLVILLIALWQKLSADQVAILEAAFLPLQEDTQELGWEETVDAAISHLLKTCLSKSSKEQALNLNSQLNIPKDTSQLKKHITLLCDRLSKGGRLCLSTDAAAPQTMVMPGGCTTIPESDLEERSVEQDSTELFTNHRHLTAETPRPEVSPLQGVSE

SEQ ID NO: 909049 - protein, 917 aa, Homo sapiens
MSLFKARDWWSTILGDKEEFDQGCLCLANVDNSGNGQDKIIVGSFMGYLRIFSPHPAKTGDGAQAEDLLLEVDLRDPVLQVEVGKFVSGTEMLHLAVLHSRKLCVYSVSGTLGNVEHGNQCQMKLMYEHNLQRTACNMTYGSFGGVKGRDLICIQSMDGMLMVFEQESYAFGRFLPGFLLPGPLAYSSRTDSFLTVSSCQQVESYKYQVLAFATDADKRQETEQQKLGSGKRLVVDWTLNIGEQALDICIVSFNQSASSVFVLGERNFFCLKDNGQIRFMKKLDWSPSCFLPYCSVSEGTINTLIGNHNNMLHIYQDVTLKWATQLPHIPVAVRVGCLHDLKGVIVTLSDDGHLQCSYLGTDPSLFQAPNVQSRELNYDELDVEMKELQKIIKDVNKSQGVWPMTEREDDLNVSVVVSPNFDSVSQATDVEVGTDLVPSVTVKVTLQNRVILQKAKLSVYVQPPLELTCDQFTFEFMTPDLTRTVSFSVYLKRSYTPSELEGNAVVSYSRPTDRNPDGIPRVIQCKFRLPLKLICLPGQPSKTASHKITIDTNKSPVSLLSLFPGFASQSDDDQVNVMGFHFLGGARITVLASKTSQRYRIQSEQFEDLWLITNELILRLQEYFEKQGVKDFACSFSGSIPLQEYFELIDHHFELRINGEKLEELLSERAVQFRAIQRRLLARFKDKTPAPLQHLDTLLDGTYKQVIALADAVEENQGNLFQSFTRLKSATHLVILLIALWQKLSADQVAILEAAFLPLQEDTQELVRTCKPVVGTASIIEVSALGRYHMAIRFSKGWEETVDAAISHLLKTCLSKSSKEQALNLNSQLNIPKDTSQLKKHITLLCDRLSKGGRLCLSTDAAAPQTMVMPGGCTTIPESDLEERSVEQDSTELFTNHRHLTAETPRPEVSPLQGVSE

SEQ ID NO: 909050 - protein, 268 aa, Homo sapiens
TIKVLRDLSSDRSNPGRFLSTSNSSLQKDKRNKAYFTKRPSPVNDIILTNPVLGWVWDFELIDHHFELRINGEKLEELLSERAVQFRAIQRRLLARFKDKTPAPLQHLDTLLDGTYKQVIALADAVEENQGNLFQSFTRLKSATHLVILLIALWQKLSADQVAILEAAFLPLQEDTQELGWEETVDAAISHLLKTCLSKSSKEQALNLNSQLNIPKDTSQLKKHITLLCDRLSKGGRLCLSTDAAAPQTMVMPGGCTTIPESDLEERS

SEQ ID NO: 909051 - protein, 712 aa, Homo sapiens
MSLFKARDWWSTILGDKEEFDQGCLCLANVDNSGNGQDKIIVGSFMGYLRIFSPHPAKTGDGAQAEDLLLEVDLRDPVLQVEVGKFVSGTEMLHLAVLHSRKLCVYSVSGTLGNVEHGNQCQMKLMYEHNLQRTACNMTYGSFGGVKGRDLICIQSMDGMLMVFEQESYAFGRFLPGFLLPGPLAYSSRTDSFLTVSSCQQVESYKYQVLAFATDADKRQETEQQKLGSGKRLVVDWTLNIGEQALDICIVSFNQSASSVFVLGERNFFCLKDNGQIRFMKKLDWSPSCFLPYCSVSEGTINTLIGNHNNMLHIYQDVTLKWATQLPHIPVAVRVGCLHDLKGVIVTLSDDGHLQCSYLGTDPSLFQAPNVQSRELNYDELDVEMKELQKIIKDVNKSQGVWPMTEREDDLNVSVVVSPNFDSVSQATDVEVGTDLVPSVTVKVTLQNRVILQKAKLSVYVQPPLELTCDQFTFEFMTPDLTRTVSFSVYLKRSYTPSELEGNAVVSYSRPTDRNPDGIPRVIQCKFRLPLKLICLPGQPSKTASHKITIDTNKSPVSLLSLFPGFASQSDDDQVNVMGFHFLGGARITVLASKTSQRYRIQSEQFEDLWLITNELILRLQEYFEKQGVKDFACSFSGSIPLQEYFELIDHHFELRINGEKLEELLSERAVQFRAIQRRLLARFKDKTPAPLQHLDTLLDGTYKQTQWWKGI

SEQ ID NO: 909052 - protein, 99 aa, Homo sapiens
  misc_feature (3)..(4): Xaa can be any naturally occurring amino acid
  misc_feature (12)..(12): Xaa can be any naturally occurring amino acid
  misc_feature (16)..(16): Xaa can be any naturally occurring amino acid
  misc_feature (23)..(23): Xaa can be any naturally occurring amino acid
  misc_feature (25)..(25): Xaa can be any naturally occurring amino acid
QRXXRERVWFGXELRXYPTSGRXQXEPQLCGMGTEQGCWIPVSSDKGSCPQVMERSFHMPSYGTQTLEGGVEKPHSLLSANPLWQQRALDPPHQMELTQ

SEQ ID NO: 909053 - protein, 233 aa, Homo sapiens
MSPTAPRRATGTYVITPAPSPEERTPMRGLLPPSRELCQFPTLNWWELRHAGHGQQQKVIVVAVCVVVLVMLLLLSLWGAHYYRTQKLLSKNPKNPYEESSRDVRSRRPADTEDGMSSCPQPWFVVIKEHQDLKNGGQPVAGEDGQAADGSMQPTSWRQEPQLCGMGTEQGCWIPVSSDKGSCPQVMERSFHMPSYGTQTLEGGVEKPHSLLSANPLWQQRALDPPHQMELTQ

SEQ ID NO: 909054 - protein, 1129 aa, Homo sapiens
MDFHYNEKRIYWVDLERQLLQRVFLNGSRQERVCNIEKNVSGMAINWINEEVIWSNQQEGIITVTDMKGNNSHILLSALKYPANVAVDPVERFIFWSSEVAGSLYRADLDGVGVKALLETSEKITAVSLDVLDKRLFWIQYNREGSNSLICSCDYDGGSVHISKHPTQHNLFAMSLFGDRIFYSTWKMKTIWIANKHTGKDMVRINLHSSFVPLGELKVVHPLAQPKAEDDTWEPEQKLCKLRKGNCSSTVCGQDLQSHLCMCAEGYALSRDRKYCEDVNECAFWNHGCTLGCKNTPGSYYCTCPVGFVLLPDGKRCHQLVSCPRNVSECSHDCVLTSEGPLCFCPEGSVLERDGKTCSGCSSPDNGGCSQLCVPLSPVSWECDCFPGYDLQLDEKSCAASGPQPFLLFANSQDIRHMHFDGTDYGTLLSQQMGMVYALDHDPVENKIYFAHTALKWIERANMDGSQRERLIEEGVDVPEGLAVDWIGRRFYWTDRGKSLIGRSDLNGKRSKIITKENISQPRGIAVHPMAKRLFWTDTGINPRIESSSLQGLGRLVIASSDLIWPSGITIDFLTDKLYWCDAKQSVIEMANLDGSKRRRLTQNDVGHPFAVAVFEDYVWFSDWAMPSVIRVNKRTGKDRVRLQGSMLKPSSLVVVHPLAKPGADPCLYQNGGCEHICKKRLGTAWCSCREGFMKASDGKTCLALDGHQLLAGGEVDLKNQVTPLDILSKTRVSEDNITESQHMLVAEIMVSDQDDCAPVGCSMYARCISEGEDATCQCLKGFAGDGKLCSDIDECEMGVPVCPPASSKCINTEGGYVCRCSEGYQGDGIHCLDIDECQLGVHSCGENASCTNTEGGYTCMCAGRLSEPGLICPDSTPPPHLREDDHHYSVRNSDSECPLSHDGYCLHDGVCMYIEALDKYACNCVVGYIGERCQYRDLKWWELRHAGHGQQQKVIVVAVCVVVLVMLLLLSLWGAHYYRTQKLLSKNPKNPYEESSRDVRSRRPADTEDGMSSCPQPWFVVIKEHQDLKNGGQPVAGEDGQAADGSMQPTSWRQEPQLCGMGTEQGCWIPVSSDKGSCPQVMERSFHMPSYGTQTLEGGVEKPHSLLSANPLWQQRALDPPHQMELTQ

SEQ ID NO: 909055 - protein, 877 aa, Homo sapiens
MLLTLIILLPVVSKFSFVSLSAPQHWSCPEGTLAGNGNSTCVGPAPFLIFSHGNSIFRIDTEGTNYEQLVVDAGVSVIMDFHYNEKRIYWVDLERQLLQRVFLNGSRQERVCNIEKNVSGMAINWINEEVIWSNQQEGIITVTDMKGNNSHILLSALKYPANVAVDPVERFIFWSSEVAGSLYRADLDGVGVKALLETSEKITAVSLDVLDKRLFWIQYNREGSNSLICSCDYDGGSVHISKHPTQHNLFAMSLFGDRIFYSTWKMKTIWIANKHTGKDMVRINLHSSFVPLGELKVVHPLAQPKAEDDTWEPEQKLCKLRKGNCSSTVCGQDLQSHLCMCAEGYALSRDRKYCEDVNECAFWNHGCTLGCKNTPGSYYCTCPVGFVLLPDGKRCHQLVSCPRNVSECSHDCVLTSEGPLCFCPEGSVLERDGKTCSGCSSPDNGGCSQLCVPLSPVSWECDCFPGYDLQLDEKSCAASGPQPFLLFANSQDIRHMHFDGTDYGTLLSQQMGMVYALDHDPVENKIYFAHTALKWIERANMDGSQRERLIEEGVDVPEGLAVDWIGRRFYWTDRGKSLIGRSDLNGKRSKIITKENISQPRGIAVHPMAKRLFWTDTGINPRIESSSLQGLGRLVIASSDLIWPSGITIDFLTDKLYWCDAKQSVIEMANLDGSKRRRLTQNDVGHPFAVAVFEDYVWFSDWAMPSVIRVNKRTGKDRVRLQGSMLKPSSLVVVHPLAKPGADPCLYQNGGCEHICKKRLGTAWCSCREGFMKASDGKTCLALDGHQLLAGGEVDLKNQVTPLDILSKTRVSEDNITESQHMLVAEIMVSDQDDCAPVGCSMYARCISEGEDATCQCLKGFAGDGKLCSVIRAPVPR

SEQ ID NO: 909056 - protein, 1133 aa, Homo sapiens
MLLTLIILLPVVSKFSFVSLSAPQHWSCPEGTLAGNGNSTCVGPAPFLIFSHGNSIFRIDTEGTNYEQLVVDAGVSVIMDFHYNEKRIYWVDLERQLLQRVFLNGSRQERVCNIEKNVSGMAINWINEEVIWSNQQEGIITVTDMKGNNSHILLSALKYPANVAVDPVERFIFWSSEVAGSLYRADLDGVGVKALLETSEKITAVSLDVLDKRLFWIQYNREGSNSLICSCDYDGGSVHISKHPTQHNLFAMSLFGDRIFYSTWKMKTIWIANKHTGKDMVRINLHSSFVPLGELKVVHPLAQPKAEDDTWEPEQKLCKLRKGNCSSTVCGQDLQSHLCMCAEGYALSRDRKYCEDVNECAFWNHGCTLGCKNTPGSYYCTCPVGFVLLPDGKRCHQLVSCPRNVSECSHDCVLTSEGPLCFCPEGSVLERDGKTCSGCSSPDNGGCSQLCVPLSPVSWECDCFPGYDLQLDEKSCAASGPQPFLLFANSQDIRHMHFDGTDYGTLLSQQMGMVYALDHDPVENKIYFAHTALKWIERANMDGSQRERLIEEGVDVPEGLAVDWIGRRFYWTDRGKSLIGRSDLNGKRSKIITKENISQPRGIAVHPMAKRLFWTDTGINPRIESSSLQGLGRLVIASSDLIWPSGITIDFLTDKLYWCDAKQSVIEMANLDGSKRRRLTQNDVGHPFAVAVFEDYVWFSDWAMPSVIRVNKRTGKDRVRLQGSMLKPSSLVVVHPLAKPGADPCLYQNGGCEHICKKRLGTAWCSCREGFMKASDGKTCLALDGHQLLAGGEVDLKNQVTPLDILSKTRVSEDNITESQHMLVAEIMVSDQDDCAPVGCSMYARCISEGEDATCQCLKGFAGDGKLCSDIDECEMGVPVCPPASSKCINTEGGYVCRCSEGYQGDGIHCLDIDECQLGVHSCGENASCTNTEGGYTCMCAGRLSEPGLICPDSTPPPHLREDDHHYSVRNSDSECPLSHDGYCLHDGVCMYIEALDKYACNCVVGYIGERCQYRDLKWWELRHAGHGQQQKVIVVAVCVVVLVMLLLLSLWGAHYYRTQKLLSKNPKNPYEESSRDVRSRRPADTEDGMSSCPQPWGQCNQLHGGRSPSYVEWAQSKAAGFQYPVIRAPVPR

SEQ ID NO: 909057 - protein, 1133 aa, Homo sapiens; identical to SEQ ID NO: 909056

SEQ ID NO: 909058 - protein, 1152 aa, Homo sapiens
MLLTLIILLPVVSKFSFVSLSAPQHWSCPEGTLAGNGNSTCVGPAPFLIFSHGNSIFRIDTEGTNYEQLVVDAGVSVIMDFHYNEKRIYWVDLERQLLQRVFLNGSRQERVCNIEKNVSGMAINWINEEVIWSNQQEGIITVTDMKGNNSHILLSALKYPANVAVDPVERFIFWSSEVAGSLYRADLDGVGVKALLETSEKITAVSLDVLDKRLFWIQYNREGSNSLICSCDYDGGSVHISKHPTQHNLFAMSLFGDRIFYSTWKMKTIWIANKHTGKDMVRINLHSSFVPLGELKVVHPLAQPKAEDDTWEPEQKLCKLRKGNCSSTVCGQDLQSHLCMCAEGYALSRDRKYCEDVNECAFWNHGCTLGCKNTPGSYYCTCPVGFVLLPDGKRCHQLVSCPRNVSECSHDCVLTSEGPLCFCPEGSVLERDGKTCSGCSSPDNGGCSQLCVPLSPVSWECDCFPGYDLQLDEKSCAASGPQPFLLFANSQDIRHMHFDGTDYGTLLSQQMGMVYALDHDPVENKIYFAHTALKWIERANMDGSQRERLIEEGVDVPEGLAVDWIGRRFYWTDRGKSLIGRSDLNGKRSKIITKENISQPRGIAVHPMAKRLFWTDTGINPRIESSSLQGLGRLVIASSDLIWPSGITIDFLTDKLYWCDAKQSVIEMANLDGSKRRRLTQNDVGHPFAVAVFEDYVWFSDWAMPSVIRVNKRTGKDRVRLQGSMLKPSSLVVVHPLAKPGADPCLYQNGGCEHICKKRLGTAWCSCREGFMKASDGKTCLALDGHQLLAGGEVDLKNQVTPLDILSKTRVSEDNITESQHMLVAEIMVSDQDDCAPVGCSMYARCISEGEDATCQCLKGFAGDGKLCSDIDECEMGVPVCPPASSKCINTEGGYVCRCSEGYQGDGIHCLDIDECQLGVHSCGENASCTNTEGGYTCMCAGRLSEPGLICPDSTPPPHLREDDHHYSVRNSDSECPLSHDGYCLHDGVCMYIEALDKYACNCVVGYIGERCQYRDLKWWELRHAGHGQQQKVIVVAVCVVVLVMLLLLSLWGAHYYRTQKLLSKNPKNPYEESSRDVRSRRPADTEDGMSSCPQPWGQCNQLHGGRSPSYVEWAQSKAAGFQYPVIRAPVPRIFPLGVIAQNLYVFSVTRL

SEQ ID NO: 909059 - protein, 687 aa, Homo sapiens
MLLTLIILLPVVSKFSFVSLSAPQHWSCPEGTLAGNGNSTCVGPAPFLIFSHGNSIFRIDTEGTNYEQLVVDAGVSVIMDFHYNEKRIYWVDLERQLLQRVFLNGSRQERVCNIEKNVSGMAINWINEEVIWSNQQEGIITVTDMKGNNSHILLSALKYPANVAVDPVERFIFWSSEVAGSLYRADLDGVGVKALLETSEKITAVSLDVLDKRLFWIQYNREGSNSLICSCDYDGGSVHISKHPTQHNLFAMSLFGDRIFYSTWKMKTIWIANKHTGKDMVRINLHSSFVPLGELKVVHPLAQPKAEDDTWEPEQKLCKLRKGNCSSTVCGQDLQSHLCMCAEGYALSRDRKYCEDVNECAFWNHGCTLGCKNTPGSYYCTCPVGFVLLPDGKRCHQLVSCPRNVSECSHDCVLTSEGPLCFCPEGSVLERDGKTCSGCSSPDNGGCSQLCVPLSPVSWECDCFPGYDLQLDEKSCAASGPQPFLLFANSQDIRHMHFDGTDYGTLLSQQMGMVYALDHDPVENKIYFAHTALKWIERANMDGSQRERLIEEGVDVPEGLAVDWIGRRFYWTDRGKSLIGRSDLNGKRSKIITKENISQPRGIAVHPMAKRLFWTDTGINPRIESSSLQGLGRLVIASSDLIWPSGITIDFLTDKLYWCDAKQSVIEMANLDGSKRRRLTQNDVGRS

SEQ ID NO: 909060 - protein, 1207 aa, Homo sapiens
MLLTLIILLPVVSKFSFVSLSAPQHWSCPEGTLAGNGNSTCVGPAPFLIFSHGNSIFRIDTEGTNYEQLVVDAGVSVIMDFHYNEKRIYWVDLERQLLQRVFLNGSRQERVCNIEKNVSGMAINWINEEVIWSNQQEGIITVTDMKGNNSHILLSALKYPANVAVDPVERFIFWSSEVAGSLYRADLDGVGVKALLETSEKITAVSLDVLDKRLFWIQYNREGSNSLICSCDYDGGSVHISKHPTQHNLFAMSLFGDRIFYSTWKMKTIWIANKHTGKDMVRINLHSSFVPLGELKVVHPLAQPKAEDDTWEPEQKLCKLRKGNCSSTVCGQDLQSHLCMCAEGYALSRDRKYCEDVNECAFWNHGCTLGCKNTPGSYYCTCPVGFVLLPDGKRCHQLVSCPRNVSECSHDCVLTSEGPLCFCPEGSVLERDGKTCSGCSSPDNGGCSQLCVPLSPVSWECDCFPGYDLQLDEKSCAASGPQPFLLFANSQDIRHMHFDGTDYGTLLSQQMGMVYALDHDPVENKIYFAHTALKWIERANMDGSQRERLIEEGVDVPEGLAVDWIGRRFYWTDRGKSLIGRSDLNGKRSKIITKENISQPRGIAVHPMAKRLFWTDTGINPRIESSSLQGLGRLVIASSDLIWPSGITIDFLTDKLYWCDAKQSVIEMANLDGSKRRRLTQNDVGHPFAVAVFEDYVWFSDWAMPSVIRVNKRTGKDRVRLQGSMLKPSSLVVVHPLAKPGADPCLYQNGGCEHICKKRLGTAWCSCREGFMKASDGKTCLALDGHQLLAGGEVDLKNQVTPLDILSKTRVSEDNITESQHMLVAEIMVSDQDDCAPVGCSMYARCISEGEDATCQCLKGFAGDGKLCSDIDECEMGVPVCPPASSKCINTEGGYVCRCSEGYQGDGIHCLDIDECQLGVHSCGENASCTNTEGGYTCMCAGRLSEPGLICPDSTPPPHLREDDHHYSVRNSDSECPLSHDGYCLHDGVCMYIEALDKYACNCVVGYIGERCQYRDLKWWELRHAGHGQQQKVIVVAVCVVVLVMLLLLSLWGAHYYRTQKLLSKNPKNPYEESSRDVRSRRPADTEDGMSSCPQPWFVVIKEHQDLKNGGQPVAGEDGQAADGSMQPTSWRQEPQLCGMGTEQGCWIPVSSDKGSCPQVMERSFHMPSYGTQTLEGGVEKPHSLLSANPLWQQRALDPPHQMELTQ

SEQ ID NO: 909061 - protein, 94 aa, Homo sapiens
  misc_feature (20)..(20): Xaa can be any naturally occurring amino acid
QGVLGEISLEGLEVNHLCWXEPQLCGMGTEQGCWIPVSSDKGSCPQVMERSFHMPSYGTQTLEGGVEKPHSLLSANPLWQQRALDPPHQMELTQ

SEQ ID NO: 909062 - protein, 1133 aa, Homo sapiens; identical to SEQ ID NO: 909056

SEQ ID NO: 909063 - protein, 1207 aa, Homo sapiens; identical to SEQ ID NO: 909060

SEQ ID NO: 909064 - protein, 1133 aa, Homo sapiens; identical to SEQ ID NO: 909056

SEQ ID NO: 909065 - protein, 891 aa, Homo sapiens
MLLTLIILLPVVSKFSFVSLSAPQHWSCPEGTLAGNGNSTCVGPAPFLIFSHGNSIFRIDTEGTNYEQLVVDAGVSVIMDFHYNEKRIYWVDLERQLLQRVFLNGSRQERVCNIEKNVSGMAINWINEEVIWSNQQEGIITVTDMKGNNSHILLSALKYPANVAVDPVERFIFWSSEVAGSLYRADLDGVGVKALLETSEKITAVSLDVLDKRLFWIQYNREGSNSLICSCDYDGGSVHISKHPTQHNLFAMSLFGDRIFYSTWKMKTIWIANKHTGKDMVRINLHSSFVPLGELKVVHPLAQPKAEDDTWEPEQKLCKLRKGNCSSTVCGQDLQSHLCMCAEGYALSRDRKYCEDVNECAFWNHGCTLGCKNTPGSYYCTCPVGFVLLPDGKRCHQLVSCPRNVSECSHDCVLTSEGPLCFCPEGSVLERDGKTCSGCSSPDNGGCSQLCVPLSPVSWECDCFPGYDLQLDEKSCAASGPQPFLLFANSQDIRHMHFDGTDYGTLLSQQMGMVYALDHDPVENKIYFAHTALKWIERANMDGSQRERLIEEGVDVPEGLAVDWIGRRFYWTDRGKSLIGRSDLNGKRSKIITKENISQPRGIAVHPMAKRLFWTDTGINPRIESSSLQGLGRLVIASSDLIWPSGITIDFLTDKLYWCDAKQSVIEMANLDGSKRRRLTQNDVGHPFAVAVFEDYVWFSDWAMPSVIRVNKRTGKDRVRLQGSMLKPSSLVVVHPLAKPGADPCLYQNGGCEHICKKRLGTAWCSCREGFMKASDGKTCLALDGHQLLAGGEVDLKNQVTPLDILSKTRVSEDNITESQHMLVAEIMVSDQDDCAPVGCSMYARCISEGEDATCQCLKGFAGDGKLCSDIDECEMGVRLAYAADQHPSLP

SEQ ID NO: 909066 - protein, 611 aa, Homo sapiens
MSCKKQRSRKHSVNEKCNMKIEHYFSPVSKEQQNNCSTSLMRMESRGDPRATTNTQAQRFHSPKKNPEDQTMPQNRTIYVTLKVNHRRNQDMKLKLTHSENSSLYMALNTLQAVRKEIETHQGQEMLVRGTEGIKEYINLGMPLSCFPEGGQVVITFSQSKSKQKEDNHIFGRQDKASTECVKFYIHAIGIGKCKRRIVKCGKLHKKGRKLCVYAFKGETIKDALCKDGRFLSFLENDDWKLIENNDTILESTQPVDELEGRYFQVEVEKRMVPSAAASQNPESEKRNTCVLREQIVAQYPSLKRESEKIIENFKKKMKVKNGETLFELHRTTFGKVTKNSSSIKVVKLLVRLSDSVGYLFWDSATTGYATCFVFKGLFILTCRHVIDSIVGDGIEPSKWATIIGQCVRVTFGYEELKDKETNYFFVEPWFEIHNEELDYAVLKLKENGQQVPMELYNGITPVPLSGLIHIIGHPYGEKKQIDACAVIPQGQRAKKCQERVQSKKAESPEYVHMYTQRSFQKIVHNPDVITYDTEFFFGASGSPVFDSKGSLVAMHAAGFAYTYQNETRSIIEFGSTMESILLDIKQRHKPWYEEVFVNQQDVEMMSDEDL

SEQ ID NO: 909067 - protein, 611 aa, Homo sapiens; identical to SEQ ID NO: 909066

SEQ ID NO: 909068 - protein, 569 aa, Homo sapiens [sequence omitted]

SEQ ID NO: 909069 - protein, 468 aa, Homo sapiens
MSCKKQRSRKHSVNEKCNMKIEHYFSPVSKEQQNNCSTSLMRMESRGDPRATTNTQAQRFHSPKKNPEDQTMPQNRTIYVTLKVNHRRNQDMKLKLTHSENSSLYMALNTLQAVRKEIETHQGQEMLVRGTEGIKEYINLGMPLSCFPEGGQVVITFSQSKSKQKEDNHIFGRQDKASTECVKFYIHAIGIGKCKRRIVKCGKLHKKGRKLCVYAFKGETIKDALCKDGRFLSFLENDDWKLIENNDTILESTQPVDELEGRYFQVEVEKRMVPSAAASQNPESEKRNTCVLREQIVAQYPSLKRESEKIIENFKKKMKVKNGETLFELHRTTFGKVTKNSSSIKVVKLLVRLSDSVGYLFWDSATTGYATCFVFKGLFILTCRHVIDSIVGDGIEPSKWATIIGQCVRVTFGYEELKDKETNYFFVEPWFEISYSHRVFSSFISLPKFICYSAGTKTCSSHDSLHLT

SEQ ID NO: 909070 - protein, 611 aa, Homo sapiens; identical to SEQ ID NO: 909066

SEQ ID NO: 909071 - protein, 611 aa, Homo sapiens; identical to SEQ ID NO: 909066

SEQ ID NO: 909072 - protein, 135 aa, Homo sapiens
QGDYRISLFGGFGYSERAEKCTERVQSKKAESPEYVHMYTQRSFQKIVHNPDVITYDTEFFFGASGSPVFDSKGSLVAMHAAGFAYTYQNETRSIIEFGSTMESILLDIKQRHKPWYEEVFVNQQDVEMMSDEDL

SEQ ID NO: 909073 - protein, 1498 aa, Homo sapiens
MDGASAEQDGLQEDRSHSGPSSLPEAPLKPPGPLVPPDQQDKVQCAEVNRASTEGESPDGPGQGGLCQNGPTPPFPDPPSSLDPTTSPVGPDASPGVAGFHDNLRKSQGTSAEGSVRKEALQSLRLSLPMQETQLCSTDSPLPLEKEEQVRLQARKWLEEQLKQYRVKRQQERSSQPATKTRLFSTLDPELMLNPENLPRASTLAMTKEYSFLRTSVPRGPKVGSLGLPAHPREKKTSKSSKIRSLADYRTEDSNAGNSGGNVPAPDSTKGSLKQNRSSAASVVSEISLSPDTDDRLENTSLAGDSVSEVDGNDSDSSSYSSASTRGTYGILSKTVGTQDTPYMVNGQEIPADTLGQFPSIKDVLQAAAAEHQDQGQEVNGEVRSRRDSICSSVSLESSAAETQEEMLQVLKEKMRLEGQLEALSLEASQALKEKAELQAQLAALSTKLQAQVECSHSSQQRQDSLSSEVDTLKQSCWDLERAMTDLQNMLEAKNASLASSNNDLQVAEEQYQRLMAKVEDMQRSMLSKDNTVHDLRQQMTALQSQLQQVQLERTTLTSKLKASQAEISSLQSVRQWYQQQLALAQEARVRLQGEMAHIQVGQMTQAGILEHLKLENVSLSQQLTETQHRSMKEKGRIAAQLQGIEADMLDQEAAFMQIQEAKTMVEEDLQRRLEEFEGERERLQRMADSAASLEQQLEQVKLTLLQRDQQLEALQQEHLDLMKQLTLTQEALQSREQSLDALQTHYDELQARLGELQGEAASREDTICLLQNEKIILEAALQAAKSGKEELDRGARRLEEGTEETSETLEKLREELAIKSGQVEHLQQETAALKKQMQKIKEQFLQQKVMVEAYRRDATSKDQLISELKATRKRLDSELKELRQELMQVHGEKRTAEAELSRLHREVAQVRQHMADLEGHLQSAQKERDEMETHLQSLQFDKEQMVAVTEANEALKKQIEELQQEARKAITEQKQKMRRLGSDLTSAQKEMKTKHKAYENAVGILSRRLQEALAAKEAADAELGQLRAQGGSSDSSLALHERIQALEAELQAVSHSKTLLEKELQEVIALTSQELEESREKVLELEDELQESRGFRKKIKRLEESNKKLALELEHEKGKLTGLGQSNAALREHNSILETALAKREADLVQLNLQVQAVLQRKEEEDRQMKHLVQALQASLEKEKEKVNSLKEQVAAAKVEAGHNRRHFKAASLELSEVKKELQAKEHLVQKLQAEADDLQIREGKHSQEIAQFQAELAEARAQLQLLQKQLDEQLSKQPVGNQEMENLKWEVDQKEREIQSLKQQLDLTEQQGRKELEGLQQLLQNVKSELEMAQEDLSMTQKDKFMLQAKVSELKNNMKTLLQQNQQLKLDLRRGAAKTRKEPKGEASSSNPATPIKIPDCPVPASLLEELLRPPPAVSKEPLKNLNSCLQQLKQEMDSLQRQMEEHALTVHESLSSWTPLEPATASPVPPGGHAGPRGDPQRHSQSRASKEGPGE

SEQ ID NO: 909074 - protein, 729 aa, Homo sapiens
EQGRFRTGDSAALQAAKSGKEELDRGARRLEEGTEETSETLEKLREELAIKSGQVEHLQQETAALKKQMQKIKEQFLQQKVMVEAYRRDATSKDQLISELKATRKRLDSELKELRQELMQVHGEKRTAEAELSRLHREVAQVRQHMADLEGHLQSAQKERDEMETHLQSLQFDKEQMVAVTEANEALKKQIEELQQEARKAITEQKQKMRRLGSDLTSAQKEMKTKHKAYENAVGILSRRLQEALAAKEAADAELGQLRAQGGSSDSSLALHERIQALEAELQAVSHSKTLLEKELQEVIALTSQELEESREKVLELEDELQESRGFRKKIKRLEESNKKLALELEHEKGKLTGLGQSNAALREHNSILETALAKREADLVQLNLQVQAVLQRKEEEDRQMKHLVQALQASLEKEKEKVNSLKEQVAAAKVEAGHNRRHFKAASLELSEVKKELQAKEHLVQKLQAEADDLQIREGKHSQEIAQFQAELAEARAQLQLLQKQLDEQLSKQPVGNQEMENLKWEVDQKEREIQSLKQQLDLTEQQGRKELEGLQQLLQNVKSELEMAQEDLSMTQKDKFMLQAKVSELKNNMKTLLQQNQQLKLDLRRGAAKTRKEPKGEASSSNPATPIKIPDCPVPASLLEELLRPPPAVSKEPLKNLNSCLQQLKQEMDSLQRQMEEHALTVHESLSSWTPLEPATASPVPPGGHAGPRGDPQRHSQSRASKEGPGE

SEQ ID NO: 909075 - protein, 1458 aa, Homo sapiens
MDGASAEQDGLQEDRSHSGPSSLPEAPLKPPGPLVPPDQQDKVQCAEVNRASTEGESPDGPGQGGLCQNGPTPPFPDPPSSLDPTTSPVGPDASPGSTDSPLPLEKEEQVRLQARKWLEEQLKQYRVKRQQERSSQPATKTRLFSTLDPELMLNPENLPRASTLAMTKEYSFLRTSVPRGPKVGSLGLPAHPREKKTSKSSKIRSLADYRTEDSNAGNSGGNVPAPDSTKGSLKQNRSSAASVVSEISLSPDTDDRLENTSLAGDSVSEVDGNDSDSSSYSSASTRGTYGILSKTVGTQDTPYMVNGQEIPADTLGQFPSIKDVLQAAAAEHQDQGQEVNGEVRSRRDSICSSVSLESSAAETQEEMLQVLKEKMRLEGQLEALSLEASQALKEKAELQAQLAALSTKLQAQVECSHSSQQRQDSLSSEVDTLKQSCWDLERAMTDLQNMLEAKNASLASSNNDLQVAEEQYQRLMAKVEDMQRSMLSKDNTVHDLRQQMTALQSQLQQVQLERTTLTSKLKASQAEISSLQSVRQWYQQQLALAQEARVRLQGEMAHIQVGQMTQAGILEHLKLENVSLSQQLTETQHRSMKEKGRIAAQLQGIEADMLDQEAAFMQIQEAKTMVEEDLQRRLEEFEGERERLQRMADSAASLEQQLEQVKLTLLQRDQQLEALQQEHLDLMKQLTLTQEALQSREQSLDALQTHYDELQARLGELQGEAASREDTICLLQNEKIILEAALQAAKSGKEELDRGARRLEEGTEETSETLEKLREELAIKSGQVEHLQQETAALKKQMQKIKEQFLQQKVMVEAYRRDATSKDQLISELKATRKRLDSELKELRQELMQVHGEKRTAEAELSRLHREVAQVRQHMADLEGHLQSAQKERDEMETHLQSLQFDKEQMVAVTEANEALKKQIEELQQEARKAITEQKQKMRRLGSDLTSAQKEMKTKHKAYENAVGILSRRLQEALAAKEAADAELGQLRAQGGSSDSSLALHERIQALEAELQAVSHSKTLLEKELQEVIALTSQELEESREKVLELEDELQESRGFRKKIKRLEESNKKLALELEHEKGKLTGLGQSNAALREHNSILETALAKREADLVQLNLQVQAVLQRKEEEDRQMKHLVQALQASLEKEKEKVNSLKEQVAAAKVEAGHNRRHFKAASLELSEVKKELQAKEHLVQKLQAEADDLQIREGKHSQEIAQFQAELAEARAQLQLLQKQLDEQLSKQPVGNQEMENLKWEVDQKEREIQSLKQQLDLTEQQGRKELEGLQQLLQNVKSELEMAQEDLSMTQKDKFMLQAKVSELKNNMKTLLQQNQQLKLDLRRGAAKTRKEPKGEASSSNPATPIKIPDCPVPASLLEELLRPPPAVSKEPLKNLNSCLQQLKQEMDSLQRQMEEHALTVHESLSSWTPLEPATASPVPPGGHAGPRGDPQRHSQSRASKEGPGE

SEQ ID NO: 909076 - protein, 1480 aa, Homo sapiens
VQGDRTTQLELTLRGYTSEPWTSLASAISNSQELLEGESPDGPGQGGLCQNGPTPPFPDPPSSLDPTTSPVGPDASPGVAGFHDNLRKSQGTSAEGSVRKEALQSLRLSLPMQETQLCSTDSPLPLEKEEQVRLQARKWLEEQLKQYRVKRQQERSSQPATKTRLFSTLDPELMLNPENLPRASTLAMTKEYSFLRTSVPRGPKVGSLGLPAHPREKKTSKSSKIRSLADYRTEDSNAGNSGGNVPAPDSTKGSLKQNRSSAASVVSEISLSPDTDDRLENTSLAGDSVSEVDGNDSDSSSYSSASTRGTYGILSKTVGTQDTPYMVNGQEIPADTLGQFPSIKDVLQAAAAEHQDQGQEVNGEVRSRRDSICSSVSLESSAAETQEEMLQVLKEKMRLEGQLEALSLEASQALKEKAELQAQLAALSTKLQAQVECSHSSQQRQDSLSSEVDTLKQSCWDLERAMTDLQNMLEAKNASLASSNNDLQVAEEQYQRLMAKVEDMQRSMLSKDNTVHDLRQQMTALQSQLQQVQLERTTLTSKLKASQAEISSLQSVRQWYQQQLALAQEARVRLQGEMAHIQVGQMTQAGILEHLKLENVSLSQQLTETQHRSMKEKGRIAAQLQGIEADMLDQEAAFMQIQEAKTMVEEDLQRRLEEFEGERERLQRMADSAASLEQQLEQVKLTLLQRDQQLEALQQEHLDLMKQLTLTQEALQSREQSLDALQTHYDELQARLGELQGEAASREDTICLLQNEKIILEAALQAAKSGKEELDRGARRLEEGTEETSETLEKLREELAIKSGQVEHLQQETAALKKQMQKIKEQFLQQKVMVEAYRRDATSKDQLISELKATRKRLDSELKELRQELMQVHGEKRTAEAELSRLHREVAQVRQHMADLEGHLQSAQKERDEMETHLQSLQFDKEQMVAVTEANEALKKQIEELQQEARKAITEQKQKMRRLGSDLTSAQKEMKTKHKAYENAVGILSRRLQEALAAKEAADAELGQLRAQGGSSDSSLALHERIQALEAELQAVSHSKTLLEKELQEVIALTSQELEESREKVLELEDELQESRGFRKKIKRLEESNKKLALELEHEKGKLTGLGQSNAALREHNSILETALAKREADLVQLNLQVQAVLQRKEEEDRQMKHLVQALQASLEKEKEKVNSLKEQVAAAKVEAGHNRRHFKAASLELSEVKKELQAKEHLVQKLQAEADDLQIREGKHSQEIAQFQAELAEARAQLQLLQKQLDEQLSKQPVGNQEMENLKWEVDQKEREIQSLKQQLDLTEQQGRKELEGLQQLLQNVKSELEMAQEDLSMTQKDKFMLQAKVSELKNNMKTLLQQNQQLKLDLRRGAAKTRKEPKGEASSSNPATPIKIPDCPVPASLLEELLRPPPAVSKEPLKNLNSCLQQLKQEMDSLQRQMEEHALTVHESLSSWTPLEPATASPVPPGGHAGPRGDPQRHSQSRASKEGPGE

SEQ ID NO: 909077 - protein, 109 aa, Homo sapiens
  misc_feature (5)..(5): Xaa can be any naturally occurring amino acid
  misc_feature (12)..(12): Xaa can be any naturally occurring amino acid
DFSLXMGSPQVXDVHHVFFFLLGQTNSENTEGKVALCSHPGFPVLLQSSRSPGSFVVTPASCGKQRRLPEETGRHREEGGCALPGVSETDALFKISTTCVRSSVSYPKS

SEQ ID NO: 909078 - protein, 313 aa, Homo sapiens
LRGRAATNSVAAAKVEAGHNRRHFKAASLELSEVKKELQAKEHLVQKLQAEADDLQIREGKHSQEIAQFQAELAEARAQLQLLQKQLDEQLSKQPVGNQEMENLKWEVDQKEREIQSLKQQLDLTEQQGRKELEGLQQLLQNVKSELEMAQEDLSMTQKDKFMLQAKVSELKNNMKTLLQQNQQLKLDLRRGAAKTRKEPKGEASSSNPATPIKIPDCPVPASLLEELLRPPPAVSKEPLKNLNSCLQQLKQEMDSLQRQMEEHALTVHESLSSWTPLEPATASPVPPGGHAGPRGDPQRHSQSRASKEGPGE

SEQ ID NO: 909079 - protein, 308 aa, Homo sapiens
FPGALSVTSVRMCPLLELSVTFVQMCSPPGGFSVTSVQTDSPLQAEADDLQIREGKHSQEIAQFQAELAEARAQLQLLQKQLDEQLSKQPVGNQEMENLKWEVDQKEREIQSLKQQLDLTEQQGRKELEGLQQLLQNVKSELEMAQEDLSMTQKDKFMLQAKVSELKNNMKTLLQQNQQLKLDLRRGAAKTRKEPKGEASSSNPATPIKIPDCPVPASLLEELLRPPPAVSKEPLKNLNSCLQQLKQEMDSLQRQMEEHALTVHESLSSWTPLEPATASPVPPGGHAGPRGDPQRHSQSRASKEGPGE

SEQ ID NO: 909080 - protein, 1196 aa, Homo sapiens
MDGASAEQDGLQEDRSHSGPSSLPEAPLKPPGPLVPPDQQDKVQCAEVNRASTEGESPDGPGQGGLCQNGPTPPFPDPPSSLDPTTSPVGPDASPGSTDSPLPLEKEEQVRLQARKWLEEQLKQYRVKRQQERSSQPATKTRLFSTLDPELMLNPENLPRASTLAMTKEYSFLRTSVPRGPKVGSLGLPAHPREKKTSKSSKIRSLADYRTEDSNAGNSGGNVPAPDSTKGSLKQNRSSAASVVSEISLSPDTDDRLENTSLAGDSVSEVDGNDSDSSSYSSASTRGTYGILSKTVGTQDTPYMVNGQEIPADTLGQFPSIKDVLQAAAAEHQDQGQEVNGEVRSRRDSICSSVSLESSAAETQEEMLQVLKEKMRLEGQLEALSLEASQALKEKAELQAQLAALSTKLQAQVECSHSSQQRQDSLSSEVDTLKQSCWDLERAMTDLQNMLEAKNASLASSNNDLQVAEEQYQRLMAKVEDMQRSMLSKDNTVHDLRQQMTALQSQLQQVQLERTTLTSKLKASQAEISSLQSVRQWYQQQLALAQEARVRLQGEMAHIQVGQMTQAGILEHLKLENVSLSQQLTETQHRSMKEKGRIAAQLQGIEADMLDQEAAFMQIQEAKTMVEEDLQRRLEEFEGERERLQRMADSAASLEQQLEQVKLTLLQRDQQLEALQQEHLDLMKQLTLTQEALQSREQSLDALQTHYDELQARLGELQGEAASREDTICLLQNEKIILEAALQAAKSGKEELDRGARRLEEGTEETSETLEKLREELAIKSGQVEHLQQETAALKKQMQKIKEQFLQQKVMVEAYRRDATSKDQLISELKATRKRLDSELKELRQELMQVHGEKRTAEAELSRLHREVAQVRQHMADLEGHLQSAQKERDEMETHLQSLQFDKEQMVAVTEANEALKKQIEELQQEARKAITEQKQKMRRLGSDLTSAQKEMKTKHKAYENAVGILSRRLQEALAAKEAADAELGQLRAQGGSSDSSLALHERIQALEAELQAVSHSKTLLEKELQEVIALTSQELEESREKVLELEDELQESRGFRKKIKRLEESNKKLALELEHEKGKLTGLGQSNAALREHNSILETALAKREADLVQLNLQVQAVLQRKSHATSRTKSHTRGPEVPHHEPRKEPPNERRLVVAGCPRWNLSSTLNLPKEPHEEPREEPRHEPREEPPNAPRM

SEQ ID NO: 909081 - protein, 78 aa, Homo sapiens
RLRRSIRAGRPPGLPEQQETGCVAVLPRLVWNSWPQAILPPQPPKVLVLQAVYLKWQEGNKSSDITQIEEELFFPRLP

SEQ ID NO: 909082 - protein, 105 aa, Homo sapiens
  misc_feature (5)..(5): Xaa can be any naturally occurring amino acid
  misc_feature (12)..(12): Xaa can be any naturally occurring amino acid
DFSLXMGSPQVXDVHHVFFFLLGQTNSENTEGKVALCSHPGFPVLLQSSRSPGSFVVTPASCGKQRRLPEETGRHREEGGCALPGVSETDALFKISTTCVRRDLS

SEQ ID NO: 909083 - protein, 198 aa, Homo sapiens
HGRLLRIKLMFGPTSVPRGPKVGSLGLPAHPREKKTSKSSKIRSLADYRTEDSNAGNSGGNVPAPDSTKGSLKQNRSSAASVVSEISLSPDTDDRLENTSLAGDSVSEVDGNDSDSSSYSSASTRGTYGILSKTVGTQDTPYMVNGQEIPADTLGQFPSIKDVLQAAAAEHQDQGQEVNGEVRSRRDSICSRWWGQQR

SEQ ID NO: 909084 - protein, 1369 aa, Homo sapiens
MQETQLCSTDSPLPLEKEEQVRLQARKWLEEQLKQYRVKRQQERSSQPATKTRLFSTLDPELMLNPENLPRASTLAMTKEYSFLRTSVPRGPKVGSLGLPAHPREKKTSKSSKIRSLADYRTEDSNAGNSGGNVPAPDSTKGSLKQNRSSAASVVSEISLSPDTDDRLENTSLAGDSVSEVDGNDSDSSSYSSASTRGTYGILSKTVGTQDTPYMVNGQEIPADTLGQFPSIKDVLQAAAAEHQDQGQEVNGEVRSRRDSICSSVSLESSAAETQEEMLQVLKEKMRLEGQLEALSLEASQALKEKAELQAQLAALSTKLQAQVECSHSSQQRQDSLSSEVDTLKQSCWDLERAMTDLQNMLEAKNASLASSNNDLQVAEEQYQRLMAKVEDMQRSMLSKDNTVHDLRQQMTALQSQLQQVQLERTTLTSKLKASQAEISSLQSVRQWYQQQLALAQEARVRLQGEMAHIQVGQMTQAGILEHLKLENVSLSQQLTETQHRSMKEKGRIAAQLQGIEADMLDQEAAFMQIQEAKTMVEEDLQRRLEEFEGERERLQRMADSAASLEQQLEQVKLTLLQRDQQLEALQQEHLDLMKQLTLTQEALQSREQSLDALQTHYDELQARLGELQGEAASREDTICLLQNEKIILEAALQAAKSGKEELDRGARRLEEGTEETSETLEKLREELAIKSGQVEHLQQETAALKKQMQKIKEQFLQQKVMVEAYRRDATSKDQLISELKATRKRLDSELKELRQELMQVHGEKRTAEAELSRLHREVAQVRQHMADLEGHLQSAQKERDEMETHLQSLQFDKEQMVAVTEANEALKKQIEELQQEARKAITEQKQKMRRLGSDLTSAQKEMKTKHKAYENAVGILSRRLQEALAAKEAADAELGQLRAQGGSSDSSLALHERIQALEAELQAVSHSKTLLEKELQEVIALTSQELEESREKVLELEDELQESRGFRKKIKRLEESNKKLALELEHEKGKLTGLGQSNAALREHNSILETALAKREADLVQLNLQVQAVLQRKEEEDRQMKHLVQALQASLEKEKEKVNSLKEQVAAAKVEAGHNRRHFKAASLELSEVKKELQAKEHLVQKLQAEADDLQIREGKHSQEIAQFQAELAEARAQLQLLQKQLDEQLSKQPVGNQEMENLKWEVDQKEREIQSLKQQLDLTEQQGRKELEGLQQLLQNVKSELEMAQEDLSMTQKDKFMLQAKVSELKNNMKTLLQQNQQLKLDLRRGAAKTRKEPKGEASSSNPATPIKIPDCPVPASLLEELLRPPPAVSKEPLKNLNSCLQQLKQEMDSLQRQMEEHALTVHESLSSWTPLEPATASPVPPGGHAGPRGDPQRHSQSRASKEGPGE

SEQ ID NO: 909085 - protein, 661 aa, Homo sapiens
MQKIKEQFLQQKVMVEAYRRDATSKDQLISELKATRKRLDSELKELRQELMQVHGEKRTAEAELSRLHREVAQVRQHMADLEGHLQSAQKERDEMETHLQSLQFDKEQMVAVTEANEALKKQIEELQQEARKAITEQKQKMRRLGSDLTSAQKEMKTKHKAYENAVGILSRRLQEALAAKEAADAELGQLRAQGGSSDSSLALHERIQALEAELQAVSHSKTLLEKELQEVIALTSQELEESREKVLELEDELQESRGFRKKIKRLEESNKKLALELEHEKGKLTGLGQSNAALREHNSILETALAKREADLVQLNLQVQAVLQRKEEEDRQMKHLVQALQASLEKEKEKVNSLKEQVAAAKVEAGHNRRHFKAASLELSEVKKELQAKEHLVQKLQAEADDLQIREGKHSQEIAQFQAELAEARAQLQLLQKQLDEQLSKQPVGNQEMENLKWEVDQKEREIQSLKQQLDLTEQQGRKELEGLQQLLQNVKSELEMAQEDLSMTQKDKFMLQAKVSELKNNMKTLLQQNQQLKLDLRRGAAKTRKEPKGEASSSNPATPIKIPDCPVPASLLEELLRPPPAVSKEPLKNLNSCLQQLKQEMDSLQRQMEEHALTVHESLSSWTPLEPATASPVPPGGHAGPRGDPQRHSQSRASKEGPGE

SEQ ID NO: 909086 - protein, 1262 aa, Homo sapiens
MDGASAEQDGLQEDRSHSGPSSLPEAPLKPPGPLVPPDQQDKVQCAEVNRASTEGESPDGPGQGGLCQNGPTPPFPDPPSSLDPTTSPVGPDASPGSTDSPLPLEKEEQVRLQARKWLEEQLKQYRVKRQQERSSQPATKTRLFSTLDPELMLNPENLPRASTLAMTKEYSFLRTSVPRGPKVGSLGLPAHPREKKTSKSSKIRSLADYRTEDSNAGNSGGNVPAPDSTKGSLKQNRSSAASVVSEISLSPDTDDRLENTSLAGDSVSEVDGNDSDSSSYSSASTRGTYGILSKTVGTQDTPYMVNGQEIPADTLGQFPSIKDVLQAAAAEHQDQGQEVNGEVRSRRDSICSSVSLESSAAETQEEMLQVLKEKMRLEGQLEALSLEASQALKEKAELQAQLAALSTKLQAQVECSHSSQQRQDSLSSEVDTLKQSCWDLERAMTDLQNMLEAKNASLASSNNDLQVAEEQYQRLMAKVEDMQRSMLSKDNTVHDLRQQMTALQSQLQQVQLERTTLTSKLKASQAEISSLQSVRQWYQQQLALAQEARVRLQGEMAHIQVGQMTQAGILEHLKLENVSLSQQLTETQHRSMKEKGRIAAQLQGIEADMLDQEAAFMQIQEAKTMVEEDLQRRLEEFEGERERLQRMADSAASLEQQLEQVKLTLLQRDQQLEALQQEHLDLMKQLTLTQEALQSREQSLDALQTHYDELQARLGELQGEAASREDTICLLQNEKIILEAALQAAKSGKEELDRGARRLEEGTEETSETLEKLREELAIKSGQVEHLQQETAALKKQMQKIKEQFLQQKVMVEAYRRDATSKDQLISELKATRKRLDSELKELRQELMQVHGEKRTAEAELSRLHREVAQVRQHMADLEGHLQSAQKERDEMETHLQSLQFDKEQMVAVTEANEALKKQIEELQQEARKAITEQKQKMRRLGSDLTSAQKEMKTKHKAYENAVGILSRRLQEALAAKEAADAELGQLRAQGGSSDSSLALHERIQALEAELQAVSHSKTLLEKELQEVIALTSQELEESREKVLELEDELQESRGFRKKIKRLEESNKKLALELEHEKGKLTGLGQSNAALREHNSILETALAKREADLVQLNLQVQAVLQRKEEEDRQMKHLVQALQASLEKEKEKVNSLKEQVAAAKVEAGHNRRHFKAASLELSEVKKELQAKEHLVQKLQAEADDLQIREGKHSQEIAQFQAELAEARAQLQLLQKQLDEQLSKQPVGNQEMENLKWEVDQKERERQV

SEQ ID NO: 909087 - protein, 729 aa, Homo sapiens; identical to SEQ ID NO: 909074

SEQ ID NO: 909088 - protein, 165 aa, Homo sapiens
MDGASAEQDGLQEDRSHSGPSSLPEAPLKPPGPLVPPDQQDKVQCAEVNRASTEGESPDGPGQGGLCQNGPTPPFPDPPSSLDPTTSPVGPDASPGSTDSPLPLEKEEQVRLQARKWLEEQLKQYRVKRQQERVSLPLPNKLMESFLCQRQLLVPHNPGTCHWLL

SEQ ID NO: 909089 - protein, 107 aa, Homo sapiens
LQRKEEEDRQMKHLVQALQASLEKEKEKVNSLKEQVRATFRLTGRSRGRSSAKKSMQGPSHTSLLPAVTQSKGVLQLLVTEAAEHLLWSVEGGVRLNGSAAVRAWGQ

SEQ ID NO: 909090 - protein, 268 aa, Homo sapiens
RRIRHEGSRGGWAGEMAASGESGTSGGGGSTEEAFMTFYSEVKQIEKRDSVLTSKNQIERLTRPGSSYFNLNPFEVLQIDPEVTDEEIKKRFRQLSILVHPDKNQDDADRAQKAFEAVDKAYKLLLDQEQKKRALDVIQAGKEYVEHTVKERKKQLKKEGKPTIVEEDDPELFKQAVYKQTMKLFAELEIKRKEREAKEMHERKRQREEEIEAQEKAKREREWQKNFEESRDGRVDSWRNFQANTKGKKEKKNRTFLRPPKVKMEQRE

SEQ ID NO: 909091 - protein, 256 aa, Homo sapiens
RRIRHEGSRGGWAGEMAASGESGTSGGGGSTEEAFMTFYSEVKQIEKRDSVLTSKNQIERLTRPGSSYFNLNPFEVLQIDPEVTDEEIKKRFRQLSILVHPDKNQDDADRAQKAFEAVDKAYKLLLDQEQKKRALDVIQAGKEYVEHTKKKKKERTTKKKKTKKKNFWGVGPERRVFKNHFRGGAAAPLVYVNTVPRHLVPRGNTGGQEQRRGLSSTNIKKTPGENTETVREQIPKGPAKPRGGPTPETPGTRIKE

SEQ ID NO: 909092 - protein, 109 aa, Homo sapiens
MCVGRAEGPPREEFRKRPIAWGRAGAPGGKGDNGDISGAAQGKPGDQDTGRGIAHTNIKKTARGGQNGTVCREHNPQMGESRGAQYRGTPKQRRESQRELRRSPIYSPA

SEQ ID NO: 909093 - protein, 268 aa, Homo sapiens; identical to SEQ ID NO: 909090

SEQ ID NO: 909094 - protein, 268 aa, Homo sapiens; identical to SEQ ID NO: 909090

SEQ ID NO: 909095 - protein, 268 aa, Homo sapiens; identical to SEQ ID NO: 909090

SEQ ID NO: 909096 - protein, 180 aa, Homo sapiens
RRIRHEGSRGGWAGEMAASGESGTSGGGGSTEEAFMTFYSEVKQIEKRDSVLTSKNQIERLTRPGSSYFNLNPFEVLQIDPEVTDEEIKKRFRQLSILVHPDKNQDDADRAQKAFEAVDKAYKLLLDQEQKKRALDVIQAGKEYVEHTVKERKKQLKKEGKPTIVEEDDPELETTKGRRD

SEQ ID NO: 909097 - protein, 133 aa, Homo sapiens
LIKPPQERIVEHTVKERKKQLKKEGKPTIVEEDDPELFKQAVYKQTMKLFAELEIKRKEREAKEMHERKRQREEEIEAQEKAKREREWQKNFEESRDGRVDSWRNFQANTKGKKEKKNRTFLRPPKVKMEQRE

SEQ ID NO: 909098 - protein, 111 aa, Homo sapiens
RRIRHEGSRGGWAGEMAASGESGTSGGGGSTEEAFMTFYSESWKLKGKREKPKRCMKGNDKGKKRLKLKKKPNGKESGRKTLRKVEMVVWTAGETSKPIRRGRKRRKIGPS

SEQ ID NO: 909099 - protein, 268 aa, Homo sapiens; identical to SEQ ID NO: 909090

SEQ ID NO: 909100 - protein, 114 aa, Homo sapiens
MMLTEHKRLLKVKERKKQLKKEGKPTIVEEDDPELFKQAVYKQTMKLFAELEIKRKEREAKEMHERKRQREEEIEAQEKAKREREWQKNFEGKCPRWSGMMVRNFVDSLWKSSN

SEQ ID NO: 909101 - protein, 139 aa, Homo sapiens
RRIRHEGSRGGWAGEMAASGESGTSGGGGSTEEAFMTFYSEVKQIEKRDSVLTSKNQIERLTRPGSSYFNLNPFEVLQIDPEVTDEEIKKRFRQLSILVHPDKNQDDADRAQKAFEAVDKAYKLLLDQEQKKRALEGAP

SEQ ID NO: 909102 - protein, 256 aa, Homo sapiens
RRIRHEGSRGGWAGEMAASGESGTSGGGGSTEEAFMTFYSEVKQIEKRDSVLTSKNQIERLTRPGSSYFNLNPFEVLQIDPEVTDEEIKKRFRQLSILVHPDKNQDDADRAQKAFEAVDKAYKLLLDQEQKKRALDVIQAGKEYVEHTVKERKKQLKKEGKPTIVEEDDPELFKQAVYKQTMKLFAELEIKRKEREAKEMHERKRQREEEIEAQEKAKREREWQKNFEESRDGRVDSWRNFQANTKGKKEKKIGPF

SEQ ID NO: 909103 - protein, 133 aa, Homo sapiens; identical to SEQ ID NO: 909097

SEQ ID NO: 909104 - protein, 268 aa, Homo sapiens; identical to SEQ ID NO: 909090

SEQ ID NO: 909105 - protein, 268 aa, Homo sapiens; identical to SEQ ID NO: 909090

SEQ ID NO: 909106 - protein, 268 aa, Homo sapiens; identical to SEQ ID NO: 909090

SEQ ID NO: 909107 - protein, 268 aa, Homo sapiens; identical to SEQ ID NO: 909090

SEQ ID NO: 909108 - protein, 249 aa, Homo sapiens
RRIRHEGSRGGWAGEMAASGESGTSGGGGSTEEAFMTFYSEVLQIDPEVTDEEIKKRFRQLSILVHPDKNQDDADRAQKAFEAVDKAYKLLLDQEQKKRALDVIQAGKEYVEHTVKERKKQLKKEGKPTIVEEDDPELFKQAVYKQTMKLFAELEIKRKEREAKEMHERKRQREEEIEAQEKAKREREWQKNFEESRDGRVDSWRNFQANTKGKKEKTPKVTGTEPFPCYLPSCFEGLILSSHFHPNIE

SEQ ID NO: 909109 - protein, 251 aa, Homo sapiens
RRIRHEGSRGGWAGEMAASGESGTSGGGGSTEEAFMTFYSEVKQIEKRDSVLTSKNQIERLTRPGSSYFNLNPFEVLQIDPEVTDEEIKKRFRQLSILVHPDKNQDDADRAQKAFEAVDKAYKLLLDQEQKKRALDVIQAGKEYVEHTVKERKKQLKKEGKPTIVEEDDPELFKQAVYKQTMKLFAELEIKRKEREAKEMHERKRQREEEIEAQEKAKREREWQKNFEGKCPRWSGMMVRNFVDSLWKSSN

SEQ ID NO: 909110 - protein, 177 aa, Homo sapiens
ALCFAVSRSLLLTCLVPAALLGLRYYYSRKVIRAYLECALHTDMADIEQYYMKPPGSCFWVAVLDGNVVGIVAARAHEEDNTVELLRMSVDSRFRGKGIAKALGRKVLEFAVVHNYSAVVLGTTAVKVAAHKLYESLGFRHMGASDHYVLPGMTLSLAERLFFQVRYHRYRLQLREE

SEQ ID NO: 909111 - protein, 177 aa, Homo sapiens; identical to SEQ ID NO: 909110

SEQ ID NO: 909112 - protein, 177 aa, Homo sapiens; identical to SEQ ID NO: 909110

SEQ ID NO: 909113 - protein, 68 aa, Homo sapiens
HEARALAHHAPRAARPDRGLSRARHGKAEPPKGVMINDLMINLDASSHASGHPTGNDTPAPGIRLSST

SEQ ID NO: 909114 - protein, 171 aa, Homo sapiens
MATQRKHLVKDFNPYITCYICKGYLIKPTTVTECLHTFCKTCIVQHFEDSNDCPRCGNQVHETNPLEMLRLDNTLEEIIFKLVPGLREQELERESEFWKKNKPQENGQDDTSKADKPKVDEEGDENEDDKDYHRSDPQIAICLDCLRNNGQSGDNVVKGLTDTKFLRCSNT

SEQ ID NO: 909115 - protein, 100 aa, Homo sapiens
RVGGVALGGGTGPGPRGPPRPVGPEPSGPTEPARSRLQGESRRGAGTGQAAAGAVSVSLSFTLRPARWRARSGGGGGRWTWESGTTKRSDDQRSHDKSGC

SEQ ID NO: 909116 - protein, 171 aa, Homo sapiens; identical to SEQ ID NO: 909114

SEQ ID NO: 909117 - protein, 66 aa, Homo sapiens
DTSKADKPKVDEEGDENEDDKDYHRSDPQIAICLDCLRNNGQSGDNVVKVSEQVLWYFYDQFIVNP

SEQ ID NO: 909118 - protein, 100 aa, Homo sapiens; identical to SEQ ID NO: 909115

SEQ ID NO: 909119 - protein, 100 aa, Homo sapiens; identical to SEQ ID NO: 909115

SEQ ID NO: 909120 - protein, 85 aa, Homo sapiens
GKLVKGFTIAARNGAEYRDPRAPRLGLVLTLIAPLVSSLCYCSHSDSYYISPKPLQHILNCVQVVIIKNSLLSLSLSLLTHPKIS

SEQ ID NO: 909121 - protein, 150 aa, Homo sapiens
CRKHRLLLEEDNKMLVNELNHSKEKECQYEKEKAEREVAVRQLQQKRDDVLNKGSATKALLDASSRHCTYLENGMQDSRKKLDQMRSQFQEIQDQLTATIRCTKEMEGDTQKLEVEHVMMRKIIKKQDDQIERLEKILQHSSLMLQVFES

SEQ ID NO: 909122 - protein, 150 aa, Homo sapiens; identical to SEQ ID NO: 909121

SEQ ID NO: 909123 - protein, 112 aa, Homo sapiens
CRKHRLLLEEDNKMLVNELNHSKEKECQYEKEKAEREVAVRQLQQKRDDVLNKGSATKALLDASSRHCTYLENGMQDSRKKLDQMRSQFQEIQDQLTATIRCTKEMEGDTQK

SEQ ID NO: 909124 - protein, 101 aa, Homo sapiens
CRKHRLLLEEDNKMLVNELNHSKEKECQYEKEKAEREVAVRQLQQKRDDVLNKGSATKALLDASSRHCTYLENGMQDSRKKLDQMRSQVCMQLCTPTTVNL

SEQ ID NO: 909125 - protein, 118 aa, Homo sapiens
MQQITQLIEVMLVGRGGDQAVGQATLGIDTNVGLHAKVPLIAFLGLMHLRIALLLFVLGRAGCLNDGGIDQGALSHHDACFGQPAIDGLEQLAGQLMLLQQVAEIHDGGAVRQGAIQG

SEQ ID NO: 909126 - protein, 503 aa, Homo sapiens
MEEHGVTQTEHMATIEAHAVAQQVQQVHVATYTEHSMLSADEDSPSSPEDTSYDDSDILNSTAADEVTAHLAAAGPVGMAAAAAVATGKKRKRPHVFESNPSIRKRQQTRLLRKLRATLDEYTTRVGQQAIVLCISPSKPNPVFKVFGAAPLENVVRKYKSMILEDLESALAEHAPAPQEVNSELPPLTIDGIPVSVDKMTQAQLRAFIPEMLKYSTGRGKPGWGKESCKPIWWPEDIPWANVRSDVRTEEQKQRVSWTQALRTIVKNCYKQHGREDLLYAFEDQQTQTQATATHSIAHLVPSQTVVQTFSNPDGTVSLIQVGTGATVATLADASELPTTVTVAQVNYSAVADGEVEQNWATLQGGEMTIQTTQASEATQAVASLAEAAVAASQEMQQGATVTMALNSEAAAHAVATLAEATLQGGGQIVLSGETAAAVGALTGVQDANGLVQIPVSMYQTVVTSLAQGNGPVQVAMAPVTTRISDSAVTMDGQAVEVVTLEQ

SEQ ID NO: 909127 - protein, 503 aa, Homo sapiens; identical to SEQ ID NO: 909126

SEQ ID NO: 909128 - protein, 503 aa, Homo sapiens; identical to SEQ ID NO: 909126

SEQ ID NO: 909129 - protein, 503 aa, Homo sapiens; identical to SEQ ID NO: 909126

SEQ ID NO: 909130 - protein, 416 aa, Homo sapiens [sequence omitted]

SEQ ID NO: 909131 - protein, 503 aa, Homo sapiens; identical to SEQ ID NO: 909126

SEQ ID NO: 909132 - protein, 503 aa, Homo sapiens; identical to SEQ ID NO: 909126

SEQ ID NO: 909133 - protein, 503 aa, Homo sapiens; identical to SEQ ID NO: 909126

SEQ ID NO: 909134 - protein, 451 aa, Homo sapiens
MEEHGVTQTEHMATIEAHAVAQQVQQVHVATYTEHSMLSADEDSPSSPEDTSYDDSDILNSTAADEVTAHLAAAGPVGMAAAAAVATGKKRKRPHVFESNPSIRKRQQTRLLRKLRATLDEYTTRVGQQAIVLCISPSKPNPVFKVFGAAPLENVVRKYKSMILEDLESALAEHAPAPQEVNSELPPLTIDGIPVSVDKMTQAQLRAFIPEMLKYSTGRGKPGWGKESCKPIWWPEDIPWANVRSDVRTEEQKQRVSWTQALRTIVKNCYKQHGREDLLYAFEDQQTQTQATATHSIAHLVPSQTVVQTFSNPDGTVSLIQVGTGATVATLADASELPTTVTVAQVNYSAVADGEVEQNWATLQGGEMTIQTTQASEATQAVASLAEAAVAASQEMQQGATVTMALNSEAAAHAVATLAEATLQGGGQIVLSGETAAAVGALTGVQDANGY

SEQ ID NO: 909135 - protein, 76 aa, Homo sapiens
MAETDPKTVQDLTSVVQTLLQQMQDKFQTMSDQIIGRIDDMSSRIDDLEKNIADLMTQAGVEELESENKIPATQKS

SEQ ID NO: 909136 - protein, 76 aa, Homo sapiens; identical to SEQ ID NO: 909135

SEQ ID NO: 909137 - protein, 76 aa, Homo sapiens; identical to SEQ ID NO: 909135

SEQ ID NO: 909138 - protein, 76 aa, Homo sapiens; identical to SEQ ID NO: 909135

SEQ ID NO: 909139 - protein, 104 aa, Homo sapiens
ARTTAAEKTNRRGPTEEHDITAKLGIGEMAETDPKTVQDLTSVVQTLLQQMQDKFQTMSDQIIGRIDDMSSRIDDLEKNIADLMTQAGVEELESENKIPATQKS

SEQ ID NO: 909140 - protein, 76 aa, Homo sapiens; identical to SEQ ID NO: 909135

SEQ ID NO: 909141 - protein, 76 aa, Homo sapiens; identical to SEQ ID NO: 909135

SEQ ID NO: 909142 - protein, 45 aa, Homo sapiens
MAETDPKTVQDLTSVVRDGCEGRRPRPSRAAPGQALLDRGAPTAA

SEQ ID NO: 909143 - protein, 104 aa, Homo sapiens; identical to SEQ ID NO: 909139

SEQ ID NO: 909144 - protein, 104 aa, Homo sapiens; identical to SEQ ID NO: 909139

SEQ ID NO: 909145 - protein, 76 aa, Homo sapiens; identical to SEQ ID NO: 909135

SEQ ID NO: 909146 - protein, 76 aa, Homo sapiens; identical to SEQ ID NO: 909135

SEQ ID NO: 909147 - protein, 76 aa, Homo sapiens; identical to SEQ ID NO: 909135

SEQ ID NO: 909148 - protein, 76 aa, Homo sapiens; identical to SEQ ID NO: 909135

SEQ ID NO: 909149 - protein, 76 aa, Homo sapiens; identical to SEQ ID NO: 909135

SEQ ID NO: 909150 - protein, 308 aa, Homo sapiens
MVSDEDELNLLVIVVDANPIWWGKQALKESQFTLSKCIDAVMVLGNSHLFMNRSNKLAVIASHIQESRFLYPGKNGRLGDFFGDPGNPPEFNPSGSKDGKYELLTSANEVIVEEIKDLMTKSDIKGQHTETLLAGSLAKALCYIHRMNKEVKDNQEMKSRILVIKAAEDSALQYMNFMNVIFAAQKQNILIDACVLDSDSGLLQQACDITGGLYLKVPQMPSLLQYLLWVFLPDQDQRSQLILPPPVHVDYRAACFCHRNLIEIGYVCSVCLSIFCNFSPICTTCETAFKISLPPVLKAKKKKLKVSA

SEQ ID NO: 909151 - protein, 310 aa, Homo sapiens
LGGAGRWAAQDLRRSPDHHLLCAEVLGQPWFQTFTLSKCIDAVMVLGNSHLFMNRSNKLAVIASHIQESRFLYPGKNGRLGDFFGDPGNPPEFNPSGSKDGKYELLTSANEVIVEEIKDLMTKSDIKGQHTETLLAGSLAKALCYIHRMNKEVKDNQEMKSRILVIKAAEDSALQYMNFMNVIFAAQKQNILIDACVLDSDSGLLQQACDITGGLYLKVPQMPSLLQYLLWVFLPDQDQRSQLILPPPVHVDYRAACFCHRNLIEIGYVCSVCLSIFCNFSPICTTCETAFKISLPPVLKAKKKKLKVSA

SEQ ID NO: 909152 - protein, 162 aa, Homo sapiens
MNKEVKDNQEMKSRILVIKAAEDSALQYMNFMNVIFAAQKQNILIDACVLDSDSGLLQQACDITGGLYLKVPQMPSLLQYLLWVFLPDQDQRSQLILPPPVHVDYRAACFCHRNLIEIGYVCSVCLSIFCNFSPICTTCETAFKISLPPVLKAKKKKLKVSA

SEQ ID NO: 909153 - protein, 265 aa, Homo sapiens
MVSDEDELNLLVIVVDANPIWWGKQALKESQFTLSKCIDAVMVLGNSHLFMNRSNKLAVIASHIQESRFLYPGKNGRLGDFFGDPGNPPEFNPSGSKDGKYELLTSANEVIVEEIKDLMTKSDIKGQHTETLLAGSLAKALCYIHRMNKEVKDNQEMKSRILACDITGGLYLKVPQMPSLLQYLLWVFLPDQDQRSQLILPPPVHVDYRAACFCHRNLIEIGYVCSVCLSIFCNFSPICTTCETAFKISLPPVLKAKKKKLKVSA

SEQ ID NO: 909154 - protein, 241 aa, Homo sapiens
MVSDEDELNLLVIVVDANPIWWGKQALKESQFTLSKCIDAVMVLGNSHLFMNRSNKLAVIASHIQESRFLYPGKNGRLGDFFGDPGNPPEFNPSGSKDGKYELLTSANEVIVEEIKDLMTKSDIKGQHTETLLAGSLAKALCYIHRMNKEVKDNQEMKSRILACDITGGLYLKVPQMPSLLQYLLWVFLPDQDQRSQLILPPPVHVDYRAACFCHRNLIEIGYVCSVCLSIFCNFSPICTT

SEQ ID NO: 909155 - protein, 147 aa, Homo sapiens
MVSDEDELNLLVIVVDANPIWWGKQALKESQFTLSKCIDAVMVLGNSHLFMNRSNKLAVIASHIQESRFLYPGKNGRLGDFFGDPGNPPEFNPSGSKDGKYELLTSANEVIVEEIKDLMTKSDIKGQHTETLLAGSLAKALCCILGV

SEQ ID NO: 909156 - protein, 308 aa, Homo sapiens; identical to SEQ ID NO: 909150

SEQ ID NO: 909157 - protein, 308 aa, Homo sapiens; identical to SEQ ID NO: 909150

SEQ ID NO: 909158 - protein, 241 aa, Homo sapiens [sequence omitted]

SEQ ID NO: 909159 - protein, 224 aa, Homo sapiens
MVLGNSHLFMNRSNKLAVIASHIQESRFLYPGKNGRLGDFFGDPGNPPEFNPSGSKDGKYELLTSANEVIVEEIKDLMTKSDIKGQHTETLLAGSLAKALCYIHRMNKEVKDNQEMKSRILACDITGGLYLKVPQMPSLLQYLLWVFLPDQDQRSQLILPPPVHVDYRAACFCHRNLIEIGYVCSVCLSIFCNFSPICTTCETAFKISLPPVLKAKKKKLKVSA

SEQ ID NO: 909160 - protein, 197 aa, Homo sapiens
MVSDEDELNLLVIVVDANPIWWGKQALKESQFTLSKCIDAVMVLGNSHLFMNRSNKLAVIASHIQESRFLYPGKNGRLGDFFGDPGNPPEFNPSGSKDGKYELLTSANEVIVEEIKDLMTKSDIKGQHTETLLAGSLAKALCYIHRMNKEVKDNQEMKSRILACDITGGLYLKVPQMPSLLQYLLWVFLPDQDQRSR

SEQ ID NO: 909161 - protein, 69 aa, Homo sapiens
AVVSTQSAHYGGAAGTRVGWRLPDVGSLLGRVLRPCLPLYFSTLGHDAAVPDLGGVQPRCRESFTSLTL

SEQ ID NO: 909162 - protein, 69 aa, Homo sapiens; identical to SEQ ID NO: 909161

SEQ ID NO: 909163 - protein, 69 aa, Homo sapiens; identical to SEQ ID NO: 909161

SEQ ID NO: 909164 - protein, 69 aa, Homo sapiens; identical to SEQ ID NO: 909161

SEQ ID NO: 909165 - protein, 69 aa, Homo sapiens; identical to SEQ ID NO: 909161

SEQ ID NO: 909166 - protein, 69 aa, Homo sapiens; identical to SEQ ID NO: 909161

SEQ ID NO: 909167 - protein, 69 aa, Homo sapiens; identical to SEQ ID NO: 909161

SEQ ID NO: 909168 - protein, 69 aa, Homo sapiens; identical to SEQ ID NO: 909161

SEQ ID NO: 909169 - protein, 69 aa, Homo sapiens; identical to SEQ ID NO: 909161

SEQ ID NO: 909170 - protein, 69 aa, Homo sapiens; identical to SEQ ID NO: 909161

SEQ ID NO: 909171 - protein, 69 aa, Homo sapiens; identical to SEQ ID NO: 909161

SEQ ID NO: 909172 - protein, 69 aa, Homo sapiens; identical to SEQ ID NO: 909161

SEQ ID NO: 909173 - protein, 69 aa, Homo sapiens; identical to SEQ ID NO: 909161

SEQ ID NO: 909174 - protein, 69 aa, Homo sapiens; identical to SEQ ID NO: 909161

SEQ ID NO: 909175 - protein, 69 aa, Homo sapiens; identical to SEQ ID NO: 909161

SEQ ID NO: 909176 - protein, 69 aa, Homo sapiens; identical to SEQ ID NO: 909161

SEQ ID NO: 909177 - protein, 69 aa, Homo sapiens; identical to SEQ ID NO: 909161

SEQ ID NO: 909178 - protein, 69 aa, Homo sapiens; identical to SEQ ID NO: 909161

SEQ ID NO: 909179 - protein, 69 aa, Homo sapiens; identical to SEQ ID NO: 909161

SEQ ID NO: 909180 - protein, 69 aa, Homo sapiens; identical to SEQ ID NO: 909161

SEQ ID NO: 909181 - protein, 69 aa, Homo sapiens; identical to SEQ ID NO: 909161

SEQ ID NO: 909182 - protein, 69 aa, Homo sapiens; identical to SEQ ID NO: 909161

SEQ ID NO: 909183 - protein, 69 aa, Homo sapiens; identical to SEQ ID NO: 909161

SEQ ID NO: 909184 - protein, 69 aa, Homo sapiens; identical to SEQ ID NO: 909161

SEQ ID NO: 909185 - protein, 69 aa, Homo sapiens; identical to SEQ ID NO: 909161

SEQ ID NO: 909186 - protein, 69 aa, Homo sapiens; identical to SEQ ID NO: 909161

SEQ ID NO: 909187 - protein, 69 aa, Homo sapiens; identical to SEQ ID NO: 909161

SEQ ID NO: 909188 - protein, 69 aa, Homo sapiens; identical to SEQ ID NO: 909161

SEQ ID NO: 909189 - protein, 69 aa, Homo sapiens; identical to SEQ ID NO: 909161

SEQ ID NO: 909190 - protein, 42 aa, Homo sapiens
MGTVCVQHVTDDLVCLVYYAHLVIHADHSSGVSQKFAGIQQV

SEQ ID NO: 909191 - protein, 725 aa, Homo sapiens
MADEDLIFRLEGVDGGQSPRAGHDGDSDGDSDDEEGYFICPITDDPSSNQNVNSKVNKYYSNLTKSERYSSSGSPANSFHFKEAWKHAIQKAKHMPDPWAEFHLEDIATERATRHRYNAVTGEWLDDEVLIKMASQPFGRGAMRECFRTKKLSNFLHAQQWKGASNYVAKRYIEPVDRDVYFEDVRLQMEAKLWGEEYNRHKPPKQVDIMQMCIIELKDRPGKPLFHLEHYIEGKYIKYNSNSGFVRDDNIRLTPQAFSHFTFERSGHQLIVVDIQGVGDLYTDPQIHTETGTDFGDGNLGVRGMALFFYSHACNRICESMGLAPFDLSPRERDAVNQNTKLLQSAKTILRGTEEKCGSPRVRTLSGSRPPLLRPLSENSGDENMSDVTFDSLPSSPSSATPHSQKLDHLHWPVFSDLDNMASRDHDHLDNHRESENSGDSGYPSEKRGELDDPEPREHGHSYSNRKYESDEDSLGSSGRVCVEKWNLLNSSRLHLPRASAVALEVQRLNALDLEKKIGKSILGKVHLAMVRYHEGGRFCEKGEEWDQESAVFHLEHAANLGELEAIVGLGLMYSQLPHHILADVSLKETEENKTKGFDYLLKAAEAGDRQSMILVARAFDSGQNLSPDRCQDWLEALHWYNTALEMTDCDEGGEYDGMQDEPRYMMLAREAEMLFTGGYGLEKDPQRSGDLYTQAAEAAMEAMKGRLANQYYQKAEEAWAQMEE

SEQ ID NO: 909192 - protein, 725 aa, Homo sapiens; identical to SEQ ID NO: 909191

SEQ ID NO: 909193 - protein, 725 aa, Homo sapiens; identical to SEQ ID NO: 909191

SEQ ID NO: 909194 - protein, 725 aa, Homo sapiens; identical to SEQ ID NO: 909191

SEQ ID NO: 909195 - protein, 725 aa, Homo sapiens; identical to SEQ ID NO: 909191

SEQ ID NO: 909196 - protein, 730 aa, Homo sapiens
MADEDLIFRLEGVDGGQSPRAGHDGDSDGDSDDEEGYFICPITDDPSSNQNVNSKVNKYYSNLTKSERYSSSGSPANSFHFKEAWKHAIQKAKHMPDPWAEFHLEDIATERATRHRYNAVTGEWLDDEVLIKMASQPFGRGAMRECFRTKKLSNFLHAQQWKGASNYVAKRYIEPVDRDVYFEDVRLQMEAKLWGEEYNRHKPPKQVDIMQMCIIELKDRPGKPLFHLEHYIEGKYIKYNSNSGFVRDDNIRLTPQAFSHFTFERSGHQLIVVDIQGVGDLYTDPQIHTETGTDFGDGNLGVRGMALFFYSHACNRICESMGLAPFDLSPRERDAVNQNTKLLQSAKTILRGTEEKCGSPRVRTLSGSRPPLLRPLSENSGDENMSDVTFDSLPSSPSSATPHSQKLDHLHWPVFSDLDNMASRDHDHLDNHRESENSGDSGYPSEKRGELDDPEPREHGHSYSNRKYESDEDSLGSSGRVCVEKWNLLNSSRLHLPRASAVALEVQRLNALDLEKKIGKSILGKVHLAMVRYHEGGRFCEKGEEWDQESAVFHLEHAANLGELEAIVGLGLMYSQLPHHILADVSLKETEENKTKGFDYLLKAAEAGDRQSMILVARAFDSGQNLSPDRCQDWLEALHWYNTALEMTDCDEGGEYDGMQDEPRYMMLAREAEMLFTGGYGLEKDPQRSGDLYTQAAEAAMEAMKAVPPPLVHLIEQSWLFLITPLYSAW

SEQ ID NO: 909197 - protein, 280 aa, Homo sapiens [sequence omitted]

SEQ ID NO: 909198 - protein, 725 aa, Homo sapiens; identical to SEQ ID NO: 909191

SEQ ID NO: 909199 - protein, 725 aa, Homo sapiens; identical to SEQ ID NO: 909191

SEQ ID NO: 909200 - protein, 725 aa, Homo sapiens; identical to SEQ ID NO: 909191

SEQ ID NO: 909201 - protein, 725 aa, Homo sapiens; identical to SEQ ID NO: 909191

SEQ ID NO: 909202 - protein, 71 aa, Homo sapiens
NAGHAKNLTQNPGHSSPTGTISETIFKCKKQVKAQEIGRARIIIQYFHFTNGETEVLPARFFFTVSLLASH

SEQ ID NO: 909203 - protein, 493 aa, Homo sapiens
MADEDLIFRLEGVDGGQSPRAGHDGDSDGDSDDEEGYFICPITDDPSSNQNVNSKVNKYYSNLTKSERYSSSGSPANSFHFKEAWKHAIQKAKHMPDPWAEFHLEDIATERATRHRYNAVTGEWLDDEVLIKMASQPFGRGAMRECFRTKKLSNFLHAQQWKGASNYVAKRYIEPVDRDVYFEDVRLQMEAKLWGEEYNRHKPPKQVDIMQMCIIELKDRPGKPLFHLEHYIEGKYIKYNSNSGFVRDDNIRLTPQAFSHFTFERSGHQLIVVDIQGVGDLYTDPQIHTETGTDFGDGNLGVRGMALFFYSHACNRICESMGLAPFDLSPRERDAVNQNTKLLQSAKTILRGTEEKCGSPRVRTLSGSRPPLLRPLSENSGDENMSDVTFDSLPSSPSSATPHSQKLDHLHWPVFSDLDNMASRDHDHLDNHRESENSGDSGYPSEKRGELDDPEPREHVRNPQEMRPVSPVALFILQENENSPSWRGNMSGS

SEQ ID NO: 909204 - protein, 350 aa, Homo sapiens
MGSKKLKRVGLSQELCDRLSRHQILTCQDFLCLSPLELMKVTGLSYRGVHELLCMVSRACAPKMQTAYGIKAQRSADFSPAFLSTTLSALDEALHGGVACGSLTEITGPPGCGKTQFCIMMSILATLPTNMGGLEGAVVYIDTESAFSAERLVEIAESRFPRYFNTEEKLLLTSSKVHLYRELTCDEVLQRIESLEEEIISKGIKLVILDSVASVVRKEFDAQLQGNLKERNKFLAREASSLKYLAEEFSIPVILTNQITTHLSGALASQADLVSPADDLSLSEGTSGSSCVIAALGNTWSHSVNTRLILQYLDSERRQILIAKSPLAPFTSFVYTIKEEGLVLQAYGNS

SEQ ID NO: 909205 - protein, 350 aa, Homo sapiens
MGSKKLKRVGLSQELCDRLSRHQILTCQDFLCLSPLELMKVTGLSYRGVHELLCMVSRACAPKMQTAYGIKAQRSADFSPAFLSTTLSALDEALHGGVACGSLTEITGPPGCGKTQFCIMMSILATLPTNMGGLEGAVVYIDTESAFSAERLVEIAESRFPRYFNTEEKLLLTSSKVHLYRELTCDEVLQRIESLEEEIISKGIKLVILDSVASVVRKEFDAQLQGNLKERNKFLAREASSLKYLAEEFSIPVILTNQITTHLSGALASQADLVSPADDLSLSEGTSGSSCVIAALGNTWSHSVNTRLILQYLDSERRQILIAKSPLAPFTSFVYTIKEEGLVLQGQEKP

SEQ ID NO: 909206 - protein, 348 aa, Homo sapiens
MGSKKLKRVGLSQELCDRLSRHQILTCQDFLCLSPLELMKVTGLSYRGVHELLCMVSRACAPKMQTAYGIKAQRSADFSPAFLSTTLSALDEALHGGVACGSLTEITGPPGCGKTQFCIMMSILATLPTNMGGLEGAVVYIDTESAFSAERLVEIAESRFPRYFNTEEKLLLTSSKVHLYRELTCDEVLQRIESLEEEIISKGIKLVILDSVASVVRKEFDAQLQGNLKERNKFLAREASSLKYLAEEFSIPVILTNQITTHLSGALASQADLVSPADDLSLSEGTSGSSCVIAALGNTWSHSVNTRLILQYLDSERRQILIAKSPLAPFTSFVYTIKEEGLVLQAGK

SEQ ID NO: 909207 - protein, 220 aa, Homo sapiens
MGGLEGAVVYIDTESAFSAERLVEIAESRFPRYFNTEEKLLLTSSKVHLYRELTCDEVLQRIESLEEEIISKGIKLVILDSVASVVRKEFDAQLQGNLKERNKFLAREASSLKYLAEEFSIPVILTNQITTHLSGALASQADLVSPADDLSLSEGTSGSSCVIAALGNTWSHSVNTRLILQYLDSERRQILIAKSPLAPFTSFVYTIKEEGLVLQAYGNS

SEQ ID NO: 909208 - protein, 350 aa, Homo sapiens; identical to SEQ ID NO: 909204

SEQ ID NO: 909209 - protein, 279 aa, Homo sapiens
MGSKKLKRVGLSQELCDRLSRHQILTCQDFLCLSPLELMKVTGLSYRGVHELLCMVSRACAPKMQTAYGIKAQRSADFSPAFLSTTLSALDEALHGGVACGSLTEITGPPGCGKTQFCIMMSILATLPTNMGGLEGAVVYIDTESAFSAERLVEIAESRFPRYFNTEEKLLLTSSKVHLYRELTCDEVLQRIESLEEEIISKGIKLVILDSVASVVRKEFDAQLQGNLKERNKFLAREASSLKYLAEEFSIPVSFSFFLFFLFLSFVSFILHSLTYGIK

SEQ ID NO: 909210 - protein, 350 aa, Homo sapiens; identical to SEQ ID NO: 909204

SEQ ID NO: 909211 - protein, 88 aa, Homo sapiens
GARCIAAIMGDTHDGLKDSYCQVPSGSLHLICLHHQGGRPGSSSWKMKTLTLIQDFENCRNPLVGHEVELMNHNQHLKTERERRQKKE

SEQ ID NO: 909212 - protein, 384 aa, Homo sapiens
MGSKKLKRVGLSQELCDRLSRHQILTCQDFLCLSPLELMKVTGLSYRGVHELLCMVSRACAPKMQTAYGIKAQRSADFSPAFLSTTLSALDEALHGGVACGSLTEITGPPGCGKTQFCIMMSILATLPTNMGGLEGAVVYIDTESAFSAERLVEIAESRFPRYFNTEEKLLLTSSKVHLYRELTCDEVLQRIESLEEEIISKGIKLVILDSVASVVRKEFDAQLQGNLKERNKFLAREASSLKYLAEEFSIPVILTNQITTHLSGALASQADLVSPADDLSLSEGTSGSSCVIAALGNTWSHSVNTRLILQYLDSERRQILIAKSPLAPFTSFVYTIKEEGLVLQETTFCSVTQAELNWAPEILPPQPPEQLGLQMCHHTQLIF

SEQ ID NO: 909213 - protein, 359 aa, Homo sapiens
LLFFAGSGGMGSKKLKRVGLSQELCDRLSRHQILTCQDFLCLSPLELMKVTGLSYRGVHELLCMVSRACAPKMQTAYGIKAQRSADFSPAFLSTTLSALDEALHGGVACGSLTEITGPPGCGKTQFCIMMSILATLPTNMGGLEGAVVYIDTESAFSAERLVEIAESRFPRYFNTEEKLLLTSSKVHLYRELTCDEVLQRIESLEEEIISKGIKLVILDSVASVVRKEFDAQLQGNLKERNKFLAREASSLKYLAEEFSIPVILTNQITTHLSGALASQADLVSPADDLSLSEGTSGSSCVIAALGNTWSHSVNTRLILQYLDSERRQILIAKSPLAPFTSFVYTIKEEGLVLQAYGNS

SEQ ID NO: 909214 - protein, 277 aa, Homo sapiens
MSAPAAKVSKKELNSNHDGADETSEKEQQEAIEHIDEVQNEIDRLNEQASEEILKVEQKYNKLRQPFFQKRSELIAKIPNFWVTTFVNHPQVSALLGEEDEEALHYLTRVEVTEFEDIKSGYRIDFYFDENPYFENKVLSKEFHLNESGDPSSKSTEIKWKSGKDLTKRSSQTQNKASRKRQHEEPESFFTWFTDHSDAGADELGEVIKDDIWPNPLQYYLVPDMDDEEGEGEEDDDDDEEEEGLEDIDEEGDEDEGEEDEDDDEGEEGEEDEGEDD

SEQ ID NO: 909215 - protein, 354 aa, Homo sapiens
TSLFFHIVMQLGFSALCFLYPCVRSSYYDQMIILSRIGCPDQNGDRVERCDSKALDEGHSPSLLSPSPLPPRPRSSTMSAPAAKVSKKELNSNHDGADETSEKEQQEAIEHIDEVQNEIDRLNEQASEEILKVEQKYNKLRQPFFQKRSELIAKIPNFWVTTFVNHPQVSALLGEEDEEALHYLTRVEVTEFEDIKSGYRIDFYFDENPYFENKVLSKEFHLNESGDPSSKSTEIKWKSGKDLTKRSSQTQNKASRKRQHEEPESFFTWFTDHSDAGADELGEVIKDDIWPNPLQYYLVPDMDDEEGEGEEDDDDDEEEEGLEDIDEEGDEDEGEEDEDDDEGEEGEEDEGEDD

SEQ ID NO: 909216 - protein, 277 aa, Homo sapiens; identical to SEQ ID NO: 909214

SEQ ID NO: 909217 - protein, 316 aa, Homo sapiens
AAAPSRQRAEKPGAATSVSGVLEMAKKAGLCLGGSRQGGCQSGMVTGNEPRDLALSHPLSFVGEKEQQEAIEHIDEVQNEIDRLNEQASEEILKVEQKYNKLRQPFFQKRSELIAKIPNFWVTTFVNHPQVSALLGEEDEEALHYLTRVEVTEFEDIKSGYRIDFYFDENPYFENKVLSKEFHLNESGDPSSKSTEIKWKSGKDLTKRSSQTQNKASRKRQHEEPESFFTWFTDHSDAGADELGEVIKDDIWPNPLQYYLVPDMDDEEGEGEEDDDDDEEEEGLEDIDEEGDEDEGEEDEDDDEGEEGEEDEGEDD

SEQ ID NO: 909218 - protein, 277 aa, Homo sapiens; identical to SEQ ID NO: 909214

SEQ ID NO: 909219 - protein, 247 aa, Homo sapiens
SSGRPGGAQNEIDRLNEQASEEILKVEQKYNKLRQPFFQKRSELIAKIPNFWVTTFVNHPQVSALLGEEDEEALHYLTRVEVTEFEDIKSGYRIDFYFDENPYFENKVLSKEFHLNESGDPSSKSTEIKWKSGKDLTKRSSQTQNKASRKRQHEEPESFFTWFTDHSDAGADELGEVIKDDIWPNPLQYYLVPDMDDEEGEGEEDDDDDEEEEGLEDIDEEGDEDEGEEDEDDDEGEEGEEDEGEDD

SEQ ID NO: 909220 - protein, 196 aa, Homo sapiens
MNLVPDMDDEEGEGEEDEDEEALHYLTRVEVTEFEDIKSGYRIDFYFDENPYFENKVLSKEFHLNESGDPSSKSTEIKWKSGKDLTKRSSQTQNKASRKRQHEEPESFFTWFTDHSDAGADELGEVIKDDIWPNPLQYYLVPDMDDEEGEGEEDDDDDEEEEGLEDIDEEGDEDEGEEDEDDDEGEEGEEDEGEDD

SEQ ID NO: 909221 - protein, 120 aa, Homo sapiens
LFRYSFKDLTKRSSQTQNKASRKRQHEEPESFFTWFTDHSDAGADELGEVIKDDIWPNPLQYYLVPDMDDEEGEGEEDDDDDEEEEGLEDIDEEGDEDEGEEDEDDDEGEEGEEDEGEDD

SEQ ID NO: 909222 - protein, 277 aa, Homo sapiens; identical to SEQ ID NO: 909214

SEQ ID NO: 909223 - protein, 277 aa, Homo sapiens; identical to SEQ ID NO: 909214

SEQ ID NO: 909224 - protein, 277 aa, Homo sapiens; identical to SEQ ID NO: 909214

SEQ ID NO: 909225 - protein, 277 aa, Homo sapiens; identical to SEQ ID NO: 909214

SEQ ID NO: 909226 - protein, 277 aa, Homo sapiens; identical to SEQ ID NO: 909214

SEQ ID NO: 909227 - protein, 277 aa, Homo sapiens; identical to SEQ ID NO: 909214

SEQ ID NO: 909228 - protein, 277 aa, Homo sapiens; identical to SEQ ID NO: 909214

SEQ ID NO: 909229 - protein, 279 aa, Homo sapiens
MSAPAAKVSKKELNSNHDGADETSEKEQQEAIEHIDEVQNEIDRLNEQASEEILKVEQKYNKLRQPFFQKRSELIAKIPNFWVTTFVNHPQVSALLGEEDEEALHYLTRVEVTEFEDIKSGYRIDFYFDENPYFENKVLSKEFHLNESGDPSSKSTEIKWKSGKDLTKRSSQTQNKASRKRQHEEPESFFTWFTDHSDAGADELGEVIKDDIWPNPLQYYLVPDMDDEEGEGEEDDDDDEEEEGYSRPLVKKVEEDEAGGRFVAFSGEGQSLRKKGRKP

SEQ ID NO: 909230 - protein, 236 aa, Homo sapiens
MSAPAAKVSKKELNSNHDGADETSEKEQQEAIEHIDEVQNEIDRLNEQASEEILKVEQKYNKLRQPFFQKRSELIAKIPNFWVTTFVNHPQVSALLGEEDEEALHYLTRVEVTEFEDIKSGYRIDFYFDENPYFENKVLSKEFHLNESGDPSSKSTEIKWKSGKDLTKRSSQTQNKASRKRQHEEPESFFTWFTDHSDAGADELGEVIKDDIWPNPLQYYLVLDMDDEASSEGREL

SEQ ID NO: 909231 - protein, 243 aa, Homo sapiens
MSAPAAKVSKKELNSNHDGADETSEKEQQEAIEHIDEVQNEIDRLNEQASEEILKVEQKYNKLRQPFFQKRSELIAKIPNFWVTTFVNHPQVSALLGEEDEEALHYLTRVEVTEFEDIKSGYRIDFYFDENPYFENKVLSKEFHLNESGDPSSKSTEIKWKSGKDLTKRSSQTQNKASRKRQHEEPESFFTWFTDHSDAGADELGEVIKDDIWPLSVHTCKAKTLLQTRMSTEPAGRSGIHHA

SEQ ID NO: 909232 - protein, 190 aa, Homo sapiens
MSAPAAKVSKKELNSNHDGADETSEKEQQEAIEHIDEVQNEIDRLNEQASEEILKVEQKYNKLRQPFFQKRSELIAKIPNFWVTTFVNHPQVSALLGEEDEEALHYLTRVEVTEFEDIKSGYRIDFYFDENPYFENKVLSKEFHLNESGDPSSKSTEIKWKSGKDLTKRSSQTQNKASRKRQLVNFCFTV

SEQ ID NO: 909233 - protein, 116 aa, Homo sapiens
VCVPLSCKYPFQAGRLQCRFKPLAPGAVSVFSLLPDGRGDSWSGSGTSLTAWPLNASLHSRLKRRNQDHLLLWDRRRHRPLQACRRREVRFCAKFYWRFKGFARIDSLIFTPQSLL

SEQ ID NO: 909234 - protein, 290 aa, Homo sapiens
MAPKRQSPLPPQKKKPRPPPALGPEETSASAGLPKKGEKEQQEAIEHIDEVQNEIDRLNEQASEEILKVEQKYNKLRQPFFQKRSELIAKIPNFWVTTFVNHPQVSALLGEEDEEALHYLTRVEVTEFEDIKSGYRIDFYFDENPYFENKVLSKEFHLNESGDPSSKSTEIKWKSGKDLTKRSSQTQNKASRKRQHEEPESFFTWFTDHSDAGADELGEVIKDDIWPNPLQYYLVPDMDDEEGEGEEDDDDDEEEEGLEDIDEEGDEDEGEEDEDDDEGEEGEEDEGEDD

SEQ ID NO: 909235 - protein, 255 aa, Homo sapiens
MKEKEQQEAIEHIDEVQNEIDRLNEQASEEILKVEQKYNKLRQPFFQKRSELIAKIPNFWVTTFVNHPQVSALLGEEDEEALHYLTRVEVTEFEDIKSGYRIDFYFDENPYFENKVLSKEFHLNESGDPSSKSTEIKWKSGKDLTKRSSQTQNKASRKRQHEEPESFFTWFTDHSDAGADELGEVIKDDIWPNPLQYYLVPDMDDEEGEGEEDDDDDEEEEGLEDIDEEGDEDEGEEDEDDDEGEEGEEDEGEDD

SEQ ID NO: 909236 - protein, 273 aa, Homo sapiens
RGSPPFFKFSPTTDGADETSEKEQQEAIEHIDEVQNEIDRLNEQASEEILKVEQKYNKLRQPFFQKRSELIAKIPNFWVTTFVNHPQVSALLGEEDEEALHYLTRVEVTEFEDIKSGYRIDFYFDENPYFENKVLSKEFHLNESGDPSSKSTEIKWKSGKDLTKRSSQTQNKASRKRQHEEPESFFTWFTDHSDAGADELGEVIKDDIWPNPLQYYLVPDMDDEEGEGEEDDDDDEEEEGLEDIDEEGDEDEGEEDEDDDEGEEGEEDEGEDD

SEQ ID NO: 909237 - protein, 277 aa, Homo sapiens; identical to SEQ ID NO: 909214

SEQ ID NO: 909238 - protein, 164 aa, Homo sapiens
KYQREYTAYRIDFYFDENPYFENKVLSKEFHLNESGDPSSKSTEIKWKSGKDLTKRSSQTQNKASRKRQHEEPESFFTWFTDHSDAGADELGEVIKDDIWPNPLQYYLVPDMDDEEGEGEEDDDDDEEEEGLEDIDEEGDEDEGEEDEDDDEGEEGEEDEGEDD

SEQ ID NO: 909239 - protein, 277 aa, Homo sapiens; identical to SEQ ID NO: 909214

SEQ ID NO: 909240 - protein, 277 aa, Homo sapiens; identical to SEQ ID NO: 909214

SEQ ID NO: 909241 - protein, 277 aa, Homo sapiens; identical to SEQ ID NO: 909214

SEQ ID NO: 909242 - protein, 277 aa, Homo sapiens; identical to SEQ ID NO: 909214

SEQ ID NO: 909243 - protein, 277 aa, Homo sapiens; identical to SEQ ID NO: 909214

SEQ ID NO: 909244 - protein, 283 aa, Homo sapiens
MSAPAAKVSKKELNSNHDGADETSEKEQQEAIEHIDEVQNEIDRLNEQASEEILKVEQKYNKLRQPFFQKRSELIAKIPNFWVTTFVNHPQVSALLGEEDEEALHYLTRVEVTEFEDIKSGYRIDFYFDENPYFENKVLSKEFHLNESGDPSSKSTEIKWKSGKDLTKRSSQTQNKASRKRQHEEPESFFTWFTDHSDAGADELGEVIKDDIWPNPLQYYLVPDMDDEEGEGEEDDDDDEEEEGLEDIDEEGDEDEGEEDEEALHYLTRVEVTEFEDIKSGTE

SEQ ID NO: 909245 - protein, 274 aa, Homo sapiens
MSAPAAKVSKKELNSNHDGADETSEKEQQEAIEHIDEVQNEIDRLNEQASEEILKVEQKYNKLRQPFFQKRSELIAKIPNFWVTTFVNHPQVSALLGEEDEEALHYLTRVEVTEFEDIKSGYRIDFYFDENPYFENKVLSKEFHLNESGDPSSKSTEIKWKSGKDLTKRSSQTQNKASRKRQHEEPESFFTWFTDHSDAGADELGEVIKDDIWPNPLQYYLVPDMDDEEGEGEEDDDDDEEEEGCLKSQMMTWDSAFLIKFLLPCKIKAFLHIK

SEQ ID NO: 909246 - protein, 218 aa, Homo sapiens
MSAPAAKVSKKELNSNHDGADETSEKEQQEAIEHIDEVQNEIDRLNEQASEEILKVEQKYNKLRQPFFQKRSELIAKIPNFWVTTFVNHPQVSALLGEEDEEALHYLTRVEVTEFEDIKSGYRIDFYFDENPYFENKVLSKEFHLNESGDPSSKSTEIKWKSGKDLTKRSSQTQNKASRKRQHEEPESFFTWFTDHSDAGADYLWLVPSPSLNKILKC

SEQ ID NO: 909247 - protein, 1414 aa, Homo sapiens
SKNSVSLSWQQPAFDGGSKITGYIVERRDLPDGRWTKASFTNVTETQFIISGLTQNSQYEFRVFARNAVGSISNPSEVVGPITCIDSYGGPVIDLPLEYTEVVKYRAGTSVKLRAGISGKPAPTIEWYKDDKELQTNALVCVENTTDLASILIKDADRLNSGCYELKLRNAMGSASATIRVQILDKPGPPGGPIEFKTVTAEKITLLWRPPADDGGAKITHYIVEKRETSRVVWSMVSEHLEECIITTTKIIKGNEYIFRVRAVNKYGIGEPLESDSVVAKNAFVTPGPPGIPEVTKITKNSMTVVWSRPIADGGSDISGYFLEKRDKKSLGWFKVLKETIRDTRQKVTGLTENSDYQYRVCAVNAAGQGPFSEPSEFYKAADPIDPPGPPAKIRIADSTKSSITLGWSKPVYDGGSAVTGYVVEIRQGEEEEWTTVSTKGEVRTTEYVVSNLKPGVNYYFRVSAVNCAGQGEPIEMNEPVQAKDILEAPEIDLDVALRTSVIAKAGEDVQVLIPFKGRPPPTVTWRKDEKNLGSDADTALKTLIHPHYSPFLKLLSNDTGKYILTIENGVGEPKSSTVSVKVLDTPAACQKLQVKHVSRGTVTLLWDPPLIDGGSPIINYVIEKRDATKRTWSVVSHKCSSTSFKLIDLSEKTPFFFRVLAENEIGIGEPCETTEPVKAAEVPAPIRDLSMKDSTKTSVILSWTKPDFDGGSVITEYVVERKGKGEQTWSHAGISKTCEIEVSQLKEQSVLEFRVFAKNEKGLSDPVTIGPITVKELIITPEVDLSDIPGAQVTVRIGHNVHLELPYKGKPKPSISWLKDGLPLKESEFVRFSKTENKITLSIKNAKKEHGGKYTVILDNAVCRIAVPITVITLGPPSKPKGPIRFDEIKADSVILSWDVPEDNGGGEITCYSIEKRETSQTNWKMVCSSVARTTFKVPNLVKDAEYQFRVRAENRYGVSQPLVSSIIVAKHQFRIPGPPGKPVIYNVTSDGMSLTWDAPVYDGGSEVTGFHVEKKERNSILWQKVNTSPISGREYRATGLVEGLDYQFRVYAENSAGLSSPSDPSKFTLAVSPVDPPGTPDYIDVTRETITLKWNPPLRDGGSKIVGYSIEKRQGNERWVRCNFTDVSECQYTVTGLSPGDRYEFRIIARNAVGTISPPSQSSGIIMTRDENVPPIVEFGPEYFDGLIIKSGESLRIKALVQGRPVPRVTWFKDGVEIEKRMNMEITDVLGSTSLFVRDATRDHRGVYTVEAKNASGSAKAEIKVKVQDTPGKVVGPIRFTNITGEKMTLWWDAPLNDGCAPITHYIIEKRETSRLAWALIEDKCEAQSYTAIKLINGNEYQFRVSAVNKFGVGRPLDSDPVVAQIQYTVPDAPGIPEPSNITGNSITLTWARPESDGGSEIQQYIHHDGPE

SEQ ID NO: 909248 - protein, 1214 aa, Homo sapiens
SKNSVSLSWQQPAFDGGSKITGYIVERRDLPDGRWTKASFTNVTETQFIISGLTQNSQYEFRVFARNAVGSISNPSEVVGPITCIDSYGGPVIDLPLEYTEVVKYRAGTSVKLRAGISGKPAPTIEWYKDDKELQTNALVCVENTTDLASILIKDADRLNSGCYELKLRNAMGSASATIRVQILDKPGPPGGPIEFKTVTAEKITLLWRPPADDGGAKITHYIVEKRETSRVVWSMVSEHLEECIITTTKIIKGNEYIFRVRAVNKYGIGEPLESDSVVAKNAFVTPGPPGIPEVTKITKNSMTVVWSRPIADGGSDISGYFLEKRDKKSLGWFKVLKETIRDTRQKVTGLTENSDYQYRVCAVNAAGQGPFSEPSEFYKAADPIDPPGPPAKIRIADSTKSSITLGWSKPVYDGGSAVTGYVVEIRQGEEEEWTTVSTKGEVRTTEYVVSNLKPGVNYYFRVSAVNCAGQGEPIEMNEPVQAKDILEAPEIDLDVALRTSVIAKAGEDVQVLIPFKGRPPPTVTWRKDEKNLGSDADTALKTLIHPHYSPFLKLLSNDTGKYILTIENGVGEPKSSTVSVKVLDTPAACQKLQVKHVSRGTVTLLWDPPLIDGGSPIINYVIEKRDATKRTWSVVSHKCSSTSFKLIDLSEKTPFFFRVLAENEIGIGEPCETTEPVKAAEVPAPIRDLSMKDSTKTSVILSWTKPDFDGGSVITEYVVERKGKGEQTWSHAGISKTCEIEVSQLKEQSVLEFRVFAKNEKGLSDPVTIGPITVKELIITPEVDLSDIPGAQVTVRIGHNVHLELPYKGKPKPSISWLKDGLPLKESEFVRFSKTENKITLSIKNAKKEHGGKYTVILDNAVCRIAVPITVITLGPPSKPKGPIRFDEIKADSVILSWDVPEDNGGGEITCYSIEKRETSQTNWKMVCSSVARTTFKVPNLVKDAEYQFRVRAENRYGVSQPLVSSIIVAKHQFRIPGPPGKPVIYNVTSDGMSLTWDAPVYDGGSEVTGFHVEKKERNSILWQKVNTSPISGREYRATGLVEGLDYQFRVYAENSAGLSSPSDPSKFTLAVSPVDPPGTPDYIDVTRETITLKWNPPLRDGGSKIVGYSIEKRQGNERWVRCNFTDVSECQYTVTGLSPGDRYEFRIIARNAVGTISPPSQSSGIIMTRDENGKHLQLISNETKSIHIFKKHIWPLARKMVTETNYPRLLSG

SEQ ID NO: 909249 - protein, 890 aa, Homo sapiens
SKNSVSLSWQQPAFDGGSKITGYIVERRDLPDGRWTKASFTNVTETQFIISGLTQNSQYEFRVFARNAVGSISNPSEVVGPITCIDSYGGPVIDLPLEYTEVVKYRAGTSVKLRAGISGKPAPTIEWYKDDKELQTNALVCVENTTDLASILIKDADRLNSGCYELKLRNAMGSASATIRVQILDKPGPPGGPIEFKTVTAEKITLLWRPPADDGGAKITHYIVEKRETSRVVWSMVSEHLEECIITTTKIIKGNEYIFRVRAVNKYGIGEPLESDSVVAKNAFVTPGPPGIPEVTKITKNSMTVVWSRPIADGGSDISGYFLEKRDKKSLGWFKVLKETIRDTRQKVTGLTENSDYQYRVCAVNAAGQGPFSEPSEFYKAADPIDPPGPPAKIRIADSTKSSITLGWSKPVYDGGSAVTGYVVEIRQGEEEEWTTVSTKGEVRTTEYVVSNLKPGVNYYFRVSAVNCAGQGEPIEMNEPVQAKDILEAPEIDLDVALRTSVIAKAGEDVQVLIPFKGRPPPTVTWRKDEKNLGSDADTALKTLIHPHYSPFLKLLSNDTGKYILTIENGVGEPKSSTVSVKVLDTPAACQKLQVKHVSRGTVTLLWDPPLIDGGSPIINYVIEKRDATKRTWSVVSHKCSSTSFKLIDLSEKTPFFFRVLAENEIGIGEPCETTEPVKAAEVPAPIRDLSMKDSTKTSVILSWTKPDFDGGSVITEYVVERKGKGEQTWSHAGISKTCEIEVSQLKEQSVLEFRVFAKNEKGLSDPVTIGPITVKELIITPEVDLSDIPGAQVTVRIGHNVHLELPYKGKPKPSISWLKDGLPLKESEFVRFSKTENKITLSIKNAKKEHGGKYTVILDNAVCRIAVPNSNFIFCKDSEEGWSLLRQIY

SEQ ID NO: 909250 - protein, 1988 aa, Homo sapiens
SKNSVSLSWQQPAFDGGSKITGYIVERRDLPDGRWTKASFTNVTETQFIISGLTQNSQYEFRVFARNAVGSISNPSEVVGPITCIDSYGGPVIDLPLEYTEVVKYRAGTSVKLRAGISGKPAPTIEWYKDDKELQTNALVCVENTTDLASILIKDADRLNSGCYELKLRNAMGSASATIRVQILDKPGPPGGPIEFKTVTAEKITLLWRPPADDGGAKITHYIVEKRETSRVVWSMVSEHLEECIITTTKIIKGNEYIFRVRAVNKYGIGEPLESDSVVAKNAFVTPGPPGIPEVTKITKNSMTVVWSRPIADGGSDISGYFLEKRDKKSLGWFKVLKETIRDTRQKVTGLTENSDYQYRVCAVNAAGQGPFSEPSEFYKAADPIDPPGPPAKIRIADSTKSSITLGWSKPVYDGGSAVTGYVVEIRQGEEEEWTTVSTKGEVRTTEYVVSNLKPGVNYYFRVSAVNCAGQGEPIEMNEPVQAKDILEAPEIDLDVALRTSVIAKAGEDVQVLIPFKGRPPPTVTWRKDEKNLGSDADTALKTLIHPHYSPFLKLLSNDTGKYILTIENGVGEPKSSTVSVKVLDTPAACQKLQVKHVSRGTVTLLWDPPLIDGGSPIINYVIEKRDATKRTWSVVSHKCSSTSFKLIDLSEKTPFFFRVLAENEIGIGEPCETTEPVKAAEVPAPIRDLSMKDSTKTSVILSWTKPDFDGGSVITEYVVERKGKGEQTWSHAGISKTCEIEVSQLKEQSVLEFRVFAKNEKGLSDPVTIGPITVKELIITPEVDLSDIPGAQVTVRIGHNVHLELPYKGKPKPSISWLKDGLPLKESEFVRFSKTENKITLSIKNAKKEHGGKYTVILDNAVCRIAVPITVITLGPPSKPKGPIRFDEIKADSVILSWDVPEDNGGGEITCYSIEKRETSQTNWKMVCSSVARTTFKVPNLVKDAEYQFRVRAENRYGVSQPLVSSIIVAKHQFRIPGPPGKPVIYNVTSDGMSLTWDAPVYDGGSEVTGFHVEKKERNSILWQKVNTSPISGREYRATGLVEGLDYQFRVYAENSAGLSSPSDPSKFTLAVSPVDPPGTPDYIDVTRETITLKWNPPLRDGGSKIVGYSIEKRQGNERWVRCNFTDVSECQYTVTGLSPGDRYEFRIIARNAVGTISPPSQSSGIIMTRDENVPPIVEFGPEYFDGLIIKSGESLRIKALVQGRPVPRVTWFKDGVEIEKRMNMEITDVLGSTSLFVRDATRDHRGVYTVEAKNASGSAKAEIKVKVQDTPGKVVGPIRFTNITGEKMTLWWDAPLNDGCAPITHYIIEKRETSRLAWALIEDKCEAQSYTAIKLINGNEYQFRVSAVNKFGVGRPLDSDPVVAQIQYTVPDAPGIPEPSNITGNSITLTWARPESDGGSEIQQYILERREKKSTRWVKVISKRPISETRFKVTGLTEGNEYEFHVMAENAAGVGPASGISRLIKCREPVNPPGPPTVVKVTDTSKTTVSLEWSKPVFDGGMEIIGYIIEMCKADLGDWHKVNAEACVKTRYTVTDLQAGEEYKFRVSAINGAGKGDSCEVTGTIKAVDRLTAPELDIDANFKQTHVVRAGASIRLFIAYQGRPTPTAVWSKPDSNLSLRADIHTTDSFSTLTVENCNRNDAGKYTLTVENNSGSKSITFTVKVLDTPGPPGPITFKDVTRGSATLMWDAPLLDGGARIHHYVVEKREASRRSWQVISEKCTRQIFKVNDLAEGVPYYFRVSAVNEYGVGEPYEMPEPIVATEQPAPPRRLDVVDTSKSSAVLAWLKPDHDGGSRITGYLLEMRQKGSDFWVEAGHTKQLTFTVERLVEKTEYEFRVKAKNDAGYSEPREAFSSVIIKEPQIEPTADLTGITNQLITCKAGSPFTIDVPISGRPAPKVTWKLEEMRLKETDRVSITTTKDRTTLTVKDSMRGDSGRYFLTLENTAGVKTFSVTVVVIGRPGPVTGPIEVSSVSAESCVLSWGEPKD

SEQ ID NO: 909251 - protein, 1309 aa, Homo sapiens
QLRMTDVFVESFIEEITYRSWYFSWTKPDFDGGSVITEYVVERKGKGEQTWSHAGISKTCEIEVSQLKEQSVLEFRVFAKNEKGLSDPVTIGPITVKELIITPEVDLSDIPGAQVTVRIGHNVHLELPYKGKPKPSISWLKDGLPLKESEFVRFSKTENKITLSIKNAKKEHGGKYTVILDNAVCRIAVPITVITLGPPSKPKGPIRFDEIKADSVILSWDVPEDNGGGEITCYSIEKRETSQTNWKMVCSSVARTTFKVPNLVKDAEYQFRVRAENRYGVSQPLVSSIIVAKHQFRIPGPPGKPVIYNVTSDGMSLTWDAPVYDGGSEVTGFHVEKKERNSILWQKVNTSPISGREYRATGLVEGLDYQFRVYAENSAGLSSPSDPSKFTLAVSPVDPPGTPDYIDVTRETITLKWNPPLRDGGSKIVGYSIEKRQGNERWVRCNFTDVSECQYTVTGLSPGDRYEFRIIARNAVGTISPPSQSSGIIMTRDENVPPIVEFGPEYFDGLIIKSGESLRIKALVQGRPVPRVTWFKDGVEIEKRMNMEITDVLGSTSLFVRDATRDHRGVYTVEAKNASGSAKAEIKVKVQDTPGKVVGPIRFTNITGEKMTLWWDAPLNDGCAPITHYIIEKRETSRLAWALIEDKCEAQSYTAIKLINGNEYQFRVSAVNKFGVGRPLDSDPVVAQIQYTVPDAPGIPEPSNITGNSITLTWARPESDGGSEIQQYILERREKKSTRWVKVISKRPISETRFKVTGLTEGNEYEFHVMAENAAGVGPASGISRLIKCREPVNPPGPPTVVKVTDTSKTTVSLEWSKPVFDGGMEIIGYIIEMCKADLGDWHKVNAEACVKTRYTVTDLQAGEEYKFRVSAINGAGKGDSCEVTGTIKAVDRLTAPELDIDANFKQTHVVRAGASIRLFIAYQGRPTPTAVWSKPDSNLSLRADIHTTDSFSTLTVENCNRNDAGKYTLTVENNSGSKSITFTVKVLDTPGPPGPITFKDVTRGSATLMWDAPLLDGGARIHHYVVEKREASRRSWQVISEKCTRQIFKVNDLAEGVPYYFRVSAVNEYGVGEPYEMPEPIVATEQPAPPRRLDVVDTSKSSAVLAWLKPDHDGGSRITGYLLEMRQKGSDFWVEAGHTKQLTFTVERLVEKTEYEFRVKAKNDAGYSEPREAFSSVIIKEPQIEPTADLTGITNQLITCKAGSPFTIDVPISGRPAPKVTWKLEEMRLKETDRVSITTTKDRTTLTVKDSMRGDSGRYFLTLENTAGVKTFSVTVVVIGRPGPVTGPIEVSSVSAESCVLSWGEPKD

SEQ ID NO: 909252 - protein, 149 aa, Homo sapiens
MNKNQVPKLQPQITMIPPSAQPPRTQTPPLGQTPQLGLKTNPPLIQEKPAKTSKKPPPSKEELLKLTETVVTEYLNSGNANEAVNGVREMRAPKHFLPEMLSKVIILSLDRSDEDKEKASSLISLLKQEGIATSDNFMQLGGESLVNSR

SEQ ID NO: 909253 - protein, 86 aa, Homo sapiens
TQPSSRQRSAPLTPLAQPQRLREYGFAHCGGAAPQPSSALWLLLAALRGLVADGNRAADWAAKEPFGETLVGSAAPRVISSASDTP

SEQ ID NO: 909254 - protein, 701 aa, Homo sapiens
MLGNIKFIGELGKLDLIHESILHKCIKTLLEKKKRVQLKDMGEDLECLCQIMRTVGPRLDHERAKSLMDQYFARMCSLMLSKELPARIRFLLQDTVELREHHWVPRKAFLDNGPKTINQIRQDAVKDLGVFIPAPMAQGMRSDFFLEGPFMPPRMKMDRDPLGGLADMFGQMPGSGIGTGPGVIQDRFSPTMGRHRSNQLFNGHGGHIMPPTQSQFGEMGGKFMKSQGLSQLYHNQSQGLLSQLQGQSKDMPPRFSKKGQLNADEISLRPAQSFLMNKNQVPKLQPQITMIPPSAQPPRTQTPPLGQTPQLGLKTNPPLIQEKPAKTSKKPPPSKEELLKLTETVVTEYLNSGNANEAVNGVREMRAPKHFLPEMLSKVIILSLDRSDEDKEKASSLISLLKQEGIATSDNFMQAFLNVLDQCPKLEVDIPLVKSYLAQFAARAIISELVSISELAQPLESGTHFPLFLLCLQQLAKLQDREWLTELFQQSKVNMQKMLPEIDQNKDRMLEILEGKGLSFLFPLLKLEKELLKQIKLDPSPQTIYKWIKDNISPKLHVDKGFVNILMTSFLQYISSEVNPPSDETDSSSAPSKEQLEQEKQLLLSFKPVMQKFLHDHVDLQVSALYALQVHCYNSNFPKGMLLRFFVHFYDMEIIEEEAFLAWKEDITQEFPGKGKALFQVNQWLTWLETAEEEESEEEAD

SEQ ID NO: 909255 - protein, 169 aa, Homo sapiens
VQNGGRRRSRVGRPFFSISSALQTPGKSWLLFSLPVADGVEGKRQCWPGRRAVMAGWPTPAGTRPWRTEARLCSDGEGAWLGPLAPWREARGPAGKARPLARDQGTAGVPEPGLPAGRCVGPGVGRGCPSSGRKERVMISAPFVSRGGRGEAVVSPGGIYGAGGGPLGG

SEQ ID NO: 909256 - protein, 451 aa, Homo sapiens
MPPRFSKKGQLNADEISLRPAQSFLMNKNQVPKLQPQITMIPPSAQPPRTQTPPLGQTPQLGLKTNPPLIQEKPAKTSKKPPPSKEELLKLTETVVTEYLNSGNANEAVNGVREMRAPKHFLPEMLSKVIILSLDRSDEDKEKASSLISLLKQEGIATSDNFMQAFLNVLDQCPKLEVDIPLVKSYLAQFAARAIISELVSISELAQPLESGTHFPLFLLCLQQLAKLQDREWLTELFQQSKVNMQKMLPEIDQNKDRMLEILEGKGLSFLFPLLKLEKELLKQIKLDPSPQTIYKWIKDNISPKLHVDKGFVNILMTSFLQYISSEVNPPSDETDSSSAPSKEQLEQEKQLLLSFKPVMQKFLHDHVDLQVSALYALQVHCYNSNFPKGMLLRFFVHFYDMEIIEEEAFLAWKEDITQEFPGKGKALFQVNQWLTWLETAEEEESEEEAD

SEQ ID NO: 909257 - protein, 625 aa, Homo sapiens
TTYFRTTYFRKTINQIRQDAVKDLGVFIPAPMAQGMRSDFFLEGPFMPPRMKMDRDPLGGLADMFGQMPGSGIGTGPGVIQDRFSPTMGRHRSNQLFNGHGGHIMPPTQSQFGEMGGKFMKSQGLSQLYHNQSQGLLSQLQGQSKDMPPRFSKKGQLNADEISLRPAQSFLMNKNQVPKLQPQITMIPPSAQPPRTQTPPLGQTPQLGLKTNPPLIQEKPAKTSKKPPPSKEELLKLTVSFKYPIFSVIEPVFEIENTLKILVFSQETVVTEYLNSGNANEAVNGVREMRAPKHFLPEMLSKVIILSLDRSDEDKEKASSLISLLKQEGIATSDNFMQAFLNVLDQCPKLEVDIPLVKSYLAQFAARAIISELVSISELAQPLESGTHFPLFLLCLQQLAKLQDREWLTELFQQSKVNMQKMLPEIDQNKDRMLEILEGKGLSFLFPLLKLEKELLKQIKLDPSPQTIYKWIKDNISPKLHVDKGFVNILMTSFLQYISSEVNPPSDETDSSSAPSKEQLEQEKQLLLSFKPVMQKFLHDHVDLQVSALYALQVHCYNSNFPKGMLLRFFVHFYDMEIIEEEAFLAWKEDITQEFPGKGKALFQVNQWLTWLETAEEEESEEEAD

SEQ ID NO: 909258 - protein, 427 aa, Homo sapiens
TTYFRTTYFRKTINQIRQDAVKDLGVFIPAPMAQGMRSDFFLEGPFMPPRMKMDRDPLGGLADMFGQMPGSGIGTGPGVIQDRFSPTMGRHRSNQLFNGHGGHIMPPTQSQFGEMGGKFMKSQGLSQLYHNQSQGLLSQLQGQSKDMPPRFSKKGQLNADEISLRPAQSFLMNKNQVPKLQPQITMIPPSAQPPRTQTPPLGQTPQLGLKTNPPLIQEKPAKTSKKPPPSKEELLKLTETVVTEYLNSGNANEAVNGVREMRAPKHFLPEMLSKVIILSLDRSDEDKEKASSLISLLKQEGIATSDNFMQAFLNVLDQCPKLEVDIPLVKSYLAQFAARAIISELVSISELAQPLESGTHFPLFLLCLQQLAKLQDREWLTELFQQSKVNMQKMLPGKRMLTCLFCFFNIISRDFRYLEWIYVGQTV

SEQ ID NO: 909259 - protein, 291 aa, Homo sapiens
TTYFRTTYFRKTINQIRQDAVKDLGVFIPAPMAQGMRSDFFLEGPFMPPRMKMDRDPLGGLADMFGQMPGSGIGTGPGVIQDRFSPTMGRHRSNQLFNGHGGHIMPPTQSQFGEMGGKFMKSQGLSQLYHNQSQGLLSQLQGQSKDMPPRFSKKGQLNADEISLRPAQSFLMNKNQVPKLQPQITMIPPSAQPPRTQTPPLGQTPQLGLKTNPPLIQEKPAKTSKKPPPSKEELLKLTETVVTEYLNSGNANEAVNGVREMRAPKHFLPEMLSKVIILSLDRSDEDKEKLS

SEQ ID NO: 909260 - protein, 616 aa, Homo sapiens
TTYFRTTYFRKTINQIRQDAVKDLGVFIPAPMAQGMRSDFFLEGPFMPPRMKMDRDPLGGLADMFGQMPGSGIGTGPGVIQDRFSPTMGRHRSNQLFNGHGGHIMPPTQSQFGEMGGKFMKSQGLSQLYHNQSQGLLSQLQGQSKDMPPRFSKKGQLNADEISLRPAQSFLMNKNQVPKLQPQITMIPPSAQPPRTQTPPLGQTPQLGLKTNPPLIQEKPAKTSKKPPPSKEELLKLTETVVTEYLNSGNANEAVNGVREMRAPKHFLPEMLSKVIILSLDRSDEDKEKASSLISLLKQEGIATSDNFMQAFLNVLDQCPKLEVDIPLVKSYLAQFAARAIISELVSISELAQPLESGTHFPLFLLCLQQLAKLQDREWLTELFQQSKVNMQKMLPEIDQNKDRMLEILEGKGLSFLFPLLKLEKELLKQIKLDPSPQTIYKWIKDNISPKLHVDKGFVNILMTSFLQYISSEVNPPSDETDSSSALTVLWKEQRMNLFHRWVGFTSKEQLEQEKQLLLSFKPVMQKFLHDHVDLQVSALYALQVHCYNSNFPKGMLLRFFVHFYDMEIIEEEAFLAWKEDITQEFPGKGKALFQVNQWLTWLETAEEEESEEEAD

SEQ ID NO: 909261 - protein, 404 aa, Homo sapiens
TTYFRTTYFRKTINQIRQDAVKDLGVFIPAPMAQGMRSDFFLEGPFMPPRMKMDRDPLGGLADMFGQMPGSGIGTGPGVIQDRFSPTMGRHRSNQLFNGHGGHIMPPTQSQFGEMGGKFMKSQGLSQLYHNQSQGLLSQLQGQSKDMPPRFSKKGQLNADEISLRPAQSFLMNKNQVPKLQPQITMIPPSAQPPRTQTPPLGQTPQLGLKTNPPLIQEKPAKTSKKPPPSKEELLKLTETVVTEYLNSGNANEAVNGVREMRAPKHFLPEMLSKVIILSLDRSDEDKEKASSLISLLKQEGIATSDNFMQAFLNVLDQCPKLEVDIPLVKSYLAQFAARAIISELVSISELAQPLESGTHFPLFLLCLQQLAKLQDREWLTELFQQSKVNMQKMLPVTSLPNFM

SEQ ID NO: 909262 - protein, 597 aa, Homo sapiens
TTYFRTTYFRKTINQIRQDAVKDLGVFIPAPMAQGMRSDFFLEGPFMPPRMKMDRDPLGGLADMFGQMPGSGIGTGPGVIQDRFSPTMGRHRSNQLFNGHGGHIMPPTQSQFGEMGGKFMKSQGLSQLYHNQSQGLLSQLQGQSKDMPPRFSKKGQLNADEISLRPAQSFLMNKNQVPKLQPQITMIPPSAQPPRTQTPPLGQTPQLGLKTNPPLIQEKPAKTSKKPPPSKEELLKLTETVVTEYLNSGNANEAVNGVREMRAPKHFLPEMLSKVIILSLDRSDEDKEKASSLISLLKQEGIATSDNFMQAFLNVLDQCPKLEVDIPLVKSYLAQFAARAIISELVSISELAQPLESGTHFPLFLLCLQQLAKLQDREWLTELFQQSKVNMQKMLPEIDQNKDRMLEILEGKGLSFLFPLLKLEKELLKQIKLDPSPQTIYKWIKDNISPKLHVDKGFVNILMTSFLQYISSEVNPPSDETDSSSAPSKEQLEQEKQLLLSFKPVMQKFLHDHVDLQVSALYALQVHCYNSNFPKGMLLRFFVHFYDMEIIEEEAFLAWKEDITQEFPGKGKALFQVNQWLTWLETAEEEESEEEAD

SEQ ID NO: 909263 - protein, 597 aa, Homo sapiens; identical to SEQ ID NO: 909262

SEQ ID NO: 909264 - protein, 597 aa, Homo sapiens; identical to SEQ ID NO: 909262

SEQ ID NO: 909265 - protein, 597 aa, Homo sapiens; identical to SEQ ID NO: 909262

SEQ ID NO: 909266 - protein, 597 aa, Homo sapiens; identical to SEQ ID NO: 909262

SEQ ID NO: 909267 - protein, 597 aa, Homo sapiens; identical to SEQ ID NO: 909262

SEQ ID NO: 909268 - protein, 80 aa, Homo sapiens
TTYFRTTYFRKTINQIRQDAVKDLGVFIPAPMAQGMRSDFFLEGPFMPPRMKMDRDPLGGLADMFGQMPGESVANLVRNC

SEQ ID NO: 909269 - protein, 851 aa, Homo sapiens
TTYFRTTYFRKTINQIRQDAVKDLGVFIPAPMAQGMRSDFFLEGPFMPPRMKMDRDPLGGLADMFGQMPGSGIGTGPGVIQDRFSPTMGRHRSNQLFNGHGGHIMPPTQSQFGEMGGKFMKSQGLSQLYHNQSQGLLSQLQGQSKDMPPRFSKKGQLNADEISLRPAQSFLMNKNQVPKLQPQITMIPPSAQPPRTQTPPLGQTPQLGLKTNPPLIQEKPAKTSKKPPPSKEELLKLTETVVTEYLNSGNANEAVNGVREMRAPKHFLPEMLSKVIILSLDRSDEDKEKASSLISLLKQEGIATSDNFMQAFLNVLDQCPKLEVDIPLVKSYLAQFAARAIISELVSISELAQPLESGTHFPLFLLCLQQLAKLQDREWLTELFQQSKVNMQKMLPEIDQNKDRMLEILEGKGLSFLFPLLKLEKELLKQIKLDPSPQTIYKWIKDNISPKLHVDKGFVNILMTSFLQYISSEVNPPSDETDSSSAPSKEQLEQEKQLLLSFKPVMQKFLHDHVDLQVSALYALQVHCYNSNFPKACHFAYLCTSMTWKHYPTSKKLYLGLWPRQNTNPTDVTRRNKAKGYRYPELHIQLGLTPWVQPTLVCTAHKYNITKRRANAWHIHPKPQGQTSALTHFGWPQNPYRGHGLELTLVKTLARLKEILQNPTMAVNHTIHTIPRTGLNIDKQPSKKSNIYINKTYAKTATGYTTPTPCNISPPYSIGQLTAVTINLSALTTRINIGFPYHHYPNITTFLNTPTINKPPHSHNRSTLTPNSQPLSYTPQIYPHFHSHTPSTTGYKPPKPSHTLTPEPNTTDSTAKRGTQQECHKTTVNSGAQKDTPLYPLRGLRRHKRKC

SEQ ID NO: 909270 - protein, 447 aa, Homo sapiens
TTYFRTTYFRKTINQIRQDAVKDLGVFIPAPMAQGMRSDFFLEGPFMPPRMKMDRDPLGGLADMFGQMPGSGIGTGPGVIQDRFSPTMGRHRSNQLFNGHGGHIMPPTQSQFGEMGGKFMKSQGLSQLYHNQSQGLLSQLQGQSKDMPPRFSKKGQLNADEISLRPAQSFLMNKNQVPKLQPQITMIPPSAQPPRTQTPPLGQTPQLGLKTNPPLIQEKPAKTSKKPPPSKEELLKLTETVVTEYLNSGNANEAVNGVREMRAPKHFLPEMLSKVIILSLDRSDEDKEKASSLISLLKQEGIATSDNFMQAFLNVLDQCPKLEVDIPLVKSYLAQFAARAIISELVSISELAQPLESGTHFPLFLLCLQQLAKLQDREWLTELFQQSKVNMQKMLPEIDQNKDRMLEILEGKGLSFLFPLLKLEKELLKQIKLDPSPTRIKDAEQNN

SEQ ID NO: 909271 - protein, 310 aa, Homo sapiens
TTYFRTTYFRKTINQIRQDAVKDLGVFIPAPMAQGMRSDFFLEGPFMPPRMKMDRDPLGGLADMFGQMPGSGIGTGPGVIQDRFSPTMGRHRSNQLFNGHGGHIMPPTQSQFGEMGGKFMKSQGLSQLYHNQSQGLLSQLQGQSKDMPPRFSKKGQLNADEISLRPAQSFLMNKNQVPKLQPQITMIPPSAQPPRTQTPPLGQTPQLGLKTNPPLIQEKPAKTSKKPPPSKEELLKLTETVVTEYLNSGNANEAVNGVREMRAPKHFLPEMLSKVIILSLDRSDEDKEKASSLISLLKQELGGESLVNSR

SEQ ID NO: 909272 - protein, 251 aa, Homo sapiens
TTYFRTTYFRKTINQIRQDAVKDLGVFIPAPMAQGMRSDFFLEGPFMPPRMKMDRDPLGGLADMFGQMPGSGIGTGPGVIQDRFSPTMGRHRSNQLFNGHGGHIMPPTQSQFGEMGGKFMKSQGLSQLYHNQSQGLLSQLQGQSKDMPPRFSKKGQLNADEISLRPAQSFLMNKNQVPKLQPQITMIPPSAQPPRTQTPPLGQTPQLGLKTNPPLIQEKPAKTSKKPPPSKEELLKLTGAVVTGAVVTGAV

SEQ ID NO: 909273 - protein, 213 aa, Homo sapiens
TTYFRTTYFRKTINQIRQDAVKDLGVFIPAPMAQGMRSDFFLEGPFMPPRMKMDRDPLGGLADMFGQMPGSGIGTGPGVIQDRFSPTMGRHRSNQLFNGHGGHIMPPTQSQFGEMGGKFMKSQGLSQLYHNQSQGLLSQLQGQSKDMPPRFSKKGQLNADEISLRPAQSFLMNKNQVPKLQPQITMIPPSAQPPRTQTPPLGQVDAAANLVVV

SEQ ID NO: 909274 - protein, 169 aa, Homo sapiens
TTYFRTTYFRKTINQIRQDAVKDLGVFIPAPMAQGMRSDFFLEGPFMPPRMKMDRDPLGGLADMFGQMPGSGIGTGPGVIQDRFSPTMGRHRSNQLFNGHGGHIMPPTQSQFGEMGGKFMKSQGLSQLYHNQSQGLLSQLQGQSKDMPPRFSKRISLKRILKRMRSSRV

SEQ ID NO: 909275 - protein, 127 aa, Homo sapiens
TTYFRTTYFRKTINQIRQDAVKDLGVFIPAPMAQGMRSDFFLEGPFMPPRMKMDRDPLGGLADMFGQMPGSGIGTGPGVIQDRFSPTMGRHRSNQLFNGHGGHIMPPTQSQFGEMGGKFMKSQVSNI

SEQ ID NO: 909276 - protein, 78 aa, Homo sapiens
TTYFRTTYFRKTINQIRQDAVKDLGVFIPAPMAQGMRSDFFLEGPFMPPRMKMDRDPLGGLADMFGQMPVAKSRYDVL

SEQ ID NO: 909277 - protein, 195 aa, Homo sapiens
MQKMLPEIDQNKDRMLEILEGKGLSFLFPLLKLEKELLKQIKLDPSPQTIYKWIKDNISPKLHVDKGFVNILMTSFLQYISSEVNPPSDETDSSSAPSKEQLEQEKQLLLSFKPVMQKFLHDHVDLQVSALYALQVHCYNSNFPKEEFQRMLFGFCAFMTWNWRGVLGGRRYYQSSERRLSGISATVDVDEMREG

SEQ ID NO: 909278 - protein, 86 aa, Homo sapiens; identical to SEQ ID NO: 909253

SEQ ID NO: 909279 - protein, 597 aa, Homo sapiens; identical to SEQ ID NO: 909262

SEQ ID NO: 909280 - protein, 559 aa, Homo sapiens
TTYFRTTYFRKTINQIRQDAVKDLGVFIPAPMAQGMRSDFFLEGPFMPPRMKMDRDPLGGLADMFGQMPGSGIGTGPGVIQDRFSPTMGRHRSNQLFNGHGGHIMPPTQSQFGEMGGKFMKSQISLRPAQSFLMNKNQVPKLQPQITMIPPSAQPPRTQTPPLGQTPQLGLKTNPPLIQEKPAKTSKKPPPSKEELLKLTETVVTEYLNSGNANEAVNGVREMRAPKHFLPEMLSKVIILSLDRSDEDKEKASSLISLLKQEGIATSDNFMQAFLNVLDQCPKLEVDIPLVKSYLAQFAARAIISELVSISELAQPLESGTHFPLFLLCLQQLAKLQDREWLTELFQQSKVNMQKMLPEIDQNKDRMLEILEGKGLSFLFPLLKLEKELLKQIKLDPSPQTIYKWIKDNISPKLHVDKGFVNILMTSFLQYISSEVNPPSDETDSSSAPSKEQLEQEKQLLLSFKPVMQKFLHDHVDLQVSALYALQVHCYNSNFPKGMLLRFFVHFYDMEIIEEEAFLAWKEDITQEFPGKGKALFQVNQWLTWLETAEEEESEEEAD

SEQ ID NO: 909281 - protein, 597 aa, Homo sapiens; identical to SEQ ID NO: 909262

SEQ ID NO: 909282 - protein, 603 aa, Homo sapiens
TTYFRTTYFRKTINQIRQDAVKDLGVFIPAPMAQGMRSDFFLEGPFMPPRMKMDRDPLGGLADMFGQMPGSGIGTGPGVIQDRFSPTMGRHRSNQLFNGHGGHIMPPTQSQFGEMGGKFMKSQGLSQLYHNQSQGLLSQLQGQSKDMPPRFSKKGQLNADEISLRPAQSFLMNKNQVPKLQPQITMIPPSAQPPRTQTPPLGQTPQLGLKTNPPLIQEKPAKTSKKPPPSKEELLKLTETVVTEYLNSGNANEAVNGVREMRAPKHFLPEMLSKVIILSLDRSDEDKEKASSLISLLKQEGIATSDNFMQAFLNVLDQCPKLEVDIPLVKSYLAQFAARAIISELVSISELAQPLESGTHFPLFLLCLQQLAKLQDREWLTELFQQSKVNMQKMLPGGFVSSEIDQNKDRMLEILEGKGLSFLFPLLKLEKELLKQIKLDPSPQTIYKWIKDNISPKLHVDKGFVNILMTSFLQYISSEVNPPSDETDSSSAPSKEQLEQEKQLLLSFKPVMQKFLHDHVDLQVSALYALQVHCYNSNFPKGMLLRFFVHFYDMEIIEEEAFLAWKEDITQEFPGKGKALFQVNQWLTWLETAEEEESEEEAD

SEQ ID NO: 909283 - protein, 465 aa, Homo sapiens
TTYFRTTYFRKTINQIRQDAVKDLGVFIPAPMAQGMRSDFFLEGPFMPPRMKMDRDPLGGLADMFGQMPGSGIGTGPGVIQDRFSPTMGRHRSNQLFNGHGGHIMPPTQSQFGEMGGKFMKSQGLSQLYHNQSQGLLSQLQGQSKDMPPRFSKKGQLNADEISLRPAQSFLMNKNQVPKLQPQITMIPPSAQPPRTQTPPLGQTPQLGLKTNPPLIQEKPAKTSKKPPPSKEELLKLTETVVTEYLNSGNANEAVNGVREMRAPKHFLPEMLSKVIILSLDRSDEDKEKASSLISLLKQEGIATSDNFMQAFLNVLDQCPKLEVDIPLVKSYLAQFAARAIISELVSISELAQPLESGTHFPLFLLCLQQLAKLQDREWLTELFQQSKVNMQKMLPEIDQNKDRMLEILEGKGLSFLFPLLKLEKELLKQIKLDPSPQTIYKWIKDNISPKLHVDKGFVNILMTR

SEQ ID NO: 909284 - protein, 597 aa, Homo sapiens; identical to SEQ ID NO: 909262

SEQ ID NO: 909285 - protein, 597 aa, Homo sapiens; identical to SEQ ID NO: 909262

SEQ ID NO: 909286 - protein, 597 aa, Homo sapiens; identical to SEQ ID NO: 909262

SEQ ID NO: 909287 - protein, 597 aa, Homo sapiens; identical to SEQ ID NO: 909262

SEQ ID NO: 909288 - protein, 597 aa, Homo sapiens; identical to SEQ ID NO: 909262

SEQ ID NO: 909289 - protein, 593 aa, Homo sapiens
TTYFRTTYFRKTINQIRQDAVKDLGVFIPAPMAQGMRSDFFLEGPFMPPRMKMDRDPLGGLADMFGQMPGSGIGTGPGVIQDRFSPTMGRHRSNQLFNGHGGHIMPPTQSQFGEMGGKFMKSQGLSQLYHNQSQGLLSQLQGQSKDMPPRFSKKGQLNADEISLRPAQSFLMNKNQVPKLQPQITMIPPSAQPPRTQTPPLGQTPQLGLKTNPPLIQEKPAKTSKKPPPSKEELLKLTETVVTEYLNSGNANEAVNGVREMRAPKHFLPEMLSKVIILSLDRSDEDKEKASSLISLLKQEGIATSDNFMQAFLNVLDQCPKLEVDIPLVKSYLAQFAARAIISELVSISELAQPLESGTHFPLFLLCLQQLAKLQDREWLTELFQQSKVNMQKMLPEIDQNKDRMLEILEGKGLSFLFPLLKLEKELLKQIKLDPSPQTIYKWIKDNISPKLHVDKGFVNILMTSFLQYISSEVNPPSDETDSSSAPSKEQLEQEKQLLLSFKPVMQKFLHDHVDLQVSALYALQVHCYNSNFPKGMLLRFFVHFYDMEIIEEEAFLAWKEDITQEFPGKGKALFQGKSFVKNLVCLLQFAWY

SEQ ID NO: 909290 - protein, 470 aa, Homo sapiens
TTYFRTTYFRKTINQIRQDAVKDLGVFIPAPMAQGMRSDFFLEGPFMPPRMKMDRDPLGGLADMFGQMPGSGIGTGPGVIQDRFSPTMGRHRSNQLFNGHGGHIMPPTQSQFGEMGGKFMKSQGLSQLYHNQSQGLLSQLQGQSKDMPPRFSKKGQLNADEISLRPAQSFLMNKNQVPKLQPQITMIPPSAQPPRTQTPPLGQTPQLGLKTNPPLIQEKPAKTSKKPPPSKEELLKLTETVVTEYLNSGNANEAVNGVREMRAPKHFLPEMLSKVIILSLDRSDEDKEKASSLISLLKQEGIATSDNFMQAFLNVLDQCPKLEVDIPLVKSYLAQFAARAIISELVSISELAQPLESGTHFPLFLLCLQQLAKLQDREWLTELFQQSKVNMQKMLPEIDQNKDRMLEILEGKGLSFLFPLLKLEKELLKQIKLDPSPQTIYKWIKERPKKEIKKKRWNRPKMSLAQIKDR

SEQ ID NO: 909291 - protein, 275 aa, Homo sapiens
TTYFRTTYFRKTINQIRQDAVKDLGVFIPAPMAQGMRSDFFLEGPFMPPRMKMDRDPLGGLADMFGQMPGSGIGTGPGVIQDRFSPTMGRHRSNQLFNGHGGHIMPPTQSQFGEMGGKFMKSQGLSQLYHNQSQGLLSQLQGQSKDMPPRFSKKGQLNADEISLRPAQSFLMNKNQVPKLQPQITMIPPSAQPPRTQTPPLGQTPQLGLKTNPPLIQEKPAKTSKKPPPSKEELLKLTETVVTEWSSKLLRRTIHQATPSLAIDTQENKYVSSQK

SEQ ID NO: 909292 - protein, 222 aa, Homo sapiens
TTYFRTTYFRKTINQIRQDAVKDLGVFIPAPMAQGMRSDFFLEGPFMPPRMKMDRDPLGGLADMFGQMPGSGIGTGPGVIQDRFSPTMGRHRSNQLFNGHGGHIMPPTQSQFGEMGGKFMKSQGLSQLYHNQSQGLLSQLQGQSKDMPPRFSKKGQLNADEISLRPAQSFLMNKNQVPKLQPQITMIPPSAQPPRTQTPPLGQTPQLGANIYIPSESRFGGD

SEQ ID NO: 909293 - protein, 196 aa, Homo sapiens
TTYFRTTYFRKTINQIRQDAVKDLGVFIPAPMAQGMRSDFFLEGPFMPPRMKMDRDPLGGLADMFGQMPGSGIGTGPGVIQDRFSPTMGRHRSNQLFNGHGGHIMPPTQSQFGEMGGKFMKSQGLSQLYHNQSQGLLSQLQGQSKDMPPRFSKKGQLNADEISLRPAQSFLMNKNQVPKLQPQITMIPSLRGPLES

SEQ ID NO: 909294 - protein, 954 aa, Homo sapiens
MTAREHSPRHGARARAMQRASTIDVAADMLGLSLAGNIQDPDEPILEFSLACSELHTPSLDRKPNSFVAVSVTTPPQAFWTKHAQTEIIEGTNNPIFLSSIAFFQDSLINQMTQVKLSVYDVKDRSQGTMYLLGSGTFIVKDLLQDRHHRLHLTLRSAESDRVGNITVIGWQMEEKSDQRPPVTRSVDTVNGRMVLPVDESLTEALGIRSKYASLRKDTLLKSVFGGAICRMYRFPTTDGNHLRILEQMAESVLSLHVPRQFVKLLLEEDAARVCELEELGELSPCWESLRRQIVTQYQTIILTYQENLTDLHQYRGPSFKASSLKADKKLEFVPTNLHIQRMRVQDDGGSDQNYDIVTIGAPAAHCQGFKSGGLRKKLHKFEETKKHFEECCTSSGCQSIIYIPQDVVRAKEIIAQINTLKTQVSYYAERLSRAAKDRSATGLERTLAILADKTRQLVTVCDCKLLANSIHGLNAARPDYIASKASPTSTEEEQVMLRNDQDTLMARWTGRNSRSSLQVDWHEEEWEKVWLNVDKSLECIIQRVDKLLQKERLHGEGCEDVFPCAGSCTSKKDCSPPPEESSPGEWSEALYPLLTTLTDCVAMMSDKAKKAMVFLLMQDSAPTIATYLSLQYRRDVVFCQTLTALICGFIIKLRNCLHDDGFLRQLYTIGLLAQFESLLSTYGEELAMLEDMSLGIMDLRNVTFKVTQATSSASADMLPVITGNRDGFNVRVPLPGPLFDALPREIQSGMLLRVQPVLFNVGINEQQTLAERFGDTSLQEVINVESLVRLNSYFEQFKEVLPEDCLPRSRSQTCLPELLRFLGQNVHARKNKNVDILWQAAEICRRLNGVRFTSCKSAKDRTAMSVTLEQCLILQHEHGMAPQVFTQALECMRSIGTREVVTQKNLSGLVPIRDLRLDPSLLCSIPLLALSPNLLIVWLFLSIAYLVTKLRCK

SEQ ID NO: 909295 - protein, 938 aa, Homo sapiens
MTAREHSPRHGARARAMQRASTIDVAADMLGLSLAGNIQDPDEPILEFSLACSELHTPSLDRKPNSFVAVSVTTPPQAFWTKHAQTEIIEGTNNPIFLSSIAFFQDSLINQMTQVKLSVYDVKDRSQGTMYLLGSGTFIVKDLLQDRHHRLHLTLRSAESDRVGNITVIGWQMEEKSDQRPPVTRSVDTVNGRMVLPVDESLTEALGIRSKYASLRKDTLLKSVFGGAICRMYRFPTTDGNHLRILEQMAESVLSLHVPRQFVKLLLEEDAARVCELEELGELSPCWESLRRQIVTQYQTIILTYQENLTDLHQYRGPSFKASSLKADKKLEFVPTNLHIQRMRVQDDGGSDQNYDIVTIGAPAAHCQGFKSGGLRKKLHKFEETKKHFEECCTSSGCQSIIYIPQDVVRAKEIIAQINTLKTQVSYYAERLSRAAKDRSATGLERTLAILADKTRQLVTVCDCKLLANSIHGLNAARPDYIASKASPTSTEEEQVMLRNDQDTLMARWTGRNSRSSLQVDWHEEEWEKVWLNVDKSLECIIQRVDKLLQKERLHGEGCEDVFPCAGSCTSKKDCSPPPEESSPGEWSEALYPLLTTLTDCVAMMSDKAKKAMVFLLMQDSAPTIATYLSLQYRRDVVFCQTLTALICGFIIKLRNCLHDDGFLRQLYTIGLLAQFESLLSTYGEELAMLEDMSLGIMDLRNVTFKVTQATSSASADMLPVITGNRDGFNVRVPLPGPLFDALPREIQSGMLLRVQPVLFNVGINEQQTLAERFGDTSLQEVINVESLVRLNSYFEQFKEVLPEDCLPRSRSQTCLPELLRFLGQNVHARKNKNVDILWQAAEICRRLNGVRFTSCKSAKDRTAMSVTLEQCLILQHEHGMAPQVFTQALECMRSEGCRRENTMKNVGSRKYAFNSLQLKAFPKHYRPPEGTYGKVET

SEQ ID NO: 909296 - protein, 977 aa, Homo sapiens
MTAREHSPRHGARARAMQRASTIDVAADMLGLSLAGNIQDPDEPILEFSLACSELHTPSLDRKPNSFVAVSVTTPPQAFWTKHAQTEIIEGTNNPIFLSSIAFFQDSLINQMTQVKLSVYDVKDRSQGTMYLLGSGTFIVKDLLQDRHHRLHLTLRSAESDRVGNITVIGWQMEEKSDQRPPVTRSVDTVNGRMVLPVDESLTEALGIRSKYASLRKDTLLKSVFGGAICRMYRFPTTDGNHLRILEQMAESVLSLHVPRQFVKLLLEEDAARVCELEELGELSPCWESLRRQIVTQYQTIILTYQENLTDLHQYRGPSFKASSLKADKKLEFVPTNLHIQRMRVQDDGGSDQNYDIVTIGAPAAHCQGFKSGGLRKKLHKFEETKKHFEECCTSSGCQSIIYIPQDVVRAKEIIAQINTLKTQVSYYAERLSRAAKDRSATGLERTLAILADKTRQLVTVCDCKLLANSIHGLNAARPDYIASKASPTSTEEEQVMLRNDQDTLMARWTGRNSRSSLQVDWHEEEWEKVWLNVDKSLECIIQRVDKLLQKERLHGEGCEDVFPCAGSCTSKKGNPDSHAYWIRPEDPFCDVPSSPCPSTMPSTACHPHLTTHCSPPPEESSPGEWSEALYPLLTTLTDCVAMMSDKAKKAMVFLLMQDSAPTIATYLSLQYRRDVVFCQTLTALICGFIIKLRNCLHDDGFLRQLYTIGLLAQFESLLSTYGEELAMLEDMSLGIMDLRNVTFKVTQATSSASADMLPVITGNRDGFNVRVPLPGPLFDALPREIQSGMLLRVQPVLFNVGINEQQTLAERFGDTSLQEVINVESLVRLNSYFEQFKEVLPEDCLPRSRSQTCLPELLRFLGQNVHARKNKNVDILWQAAEICRRLNGVRFTSCKSAKDRTAMSVTLEQCLILQHEHGMAPQVFTQALECMRSEGCRRENTMKNVGSRKYAFNSLQLKAFPKHYRPPEGTYGKVET

SEQ ID NO: 909297 - protein, 829 aa, Homo sapiens
MTLTSKGTVLSSHKIDLTQTMYLLGSGTFIVKDLLQDRHHRLHLTLRSAESDRVGNITVIGWQMEEKSDQRPPVTRSVDTVNGRMVLPVDESLTEALGIRSKYASLRKDTLLKSVFGGAICRMYRFPTTDGNHLRILEQMAESVLSLHVPRQFVKLLLEEDAARVCELEELGELSPCWESLRRQIVTQYQTIILTYQENLTDLHQYRGPSFKASSLKADKKLEFVPTNLHIQRMRVQDDGGSDQNYDIVTIGAPAAHCQGFKSGGLRKKLHKFEETKKHFEECCTSSGCQSIIYIPQDVVRAKEIIAQINTLKTQVSYYAERLSRAAKDRSATGLERTLAILADKTRQLVTVCDCKLLANSIHGLNAARPDYIASKASPTSTEEEQVMLRNDQDTLMARWTGRNSRSSLQVDWHEEEWEKVWLNVDKSLECIIQRVDKLLQKERLHGEGCEDVFPCAGSCTSKKDCSPPPEESSPGEWSEALYPLLTTLTDCVAMMSDKAKKAMVFLLMQDSAPTIATYLSLQYRRDVVFCQTLTALICGFIIKLRNCLHDDGFLRQLYTIGLLAQFESLLSTYGEELAMLEDMSLGIMDLRNVTFKVTQATSSASADMLPVITGNRDGFNVRVPLPGPLFDALPREIQSGMLLRVQPVLFNVGINEQQTLAERFGDTSLQEVINVESLVRLNSYFEQFKEVLPEDCLPRSRSQTCLPELLRFLGQNVHARKNKNVDILWQAAEICRRLNGVRFTSCKSAKDRTAMSVTLEQCLILQHEHGMAPQVFTQALECMRSEGCRRENTMKNVGSRKYAFNSLQLKAFPKHYRPPEGTYGKVET

SEQ ID NO: 909298 - protein, 717 aa, Homo sapiens
MTAREHSPRHGARARAMQRASTIDVAADMLGLSLAGNIQDPDEPILEFSLACSELHTPSLDRKPNSFVAVSVTTPPQAFWTKHAQTEIIEGTNNPIFLSSIAFFQDSLINQMTQVKLSVYDVKDRSQGTMYLLGSGTFIVKDLLQDRHHRLHLTLRSAESDRVGNITVIGWQMEEKSDQRPPVTRSVDTVNGRMVLPVDESLTEALGIRSKYASLRKDTLLKSVFGGAICRMYRFPTTDGNHLRILEQMAESVLSLHVPRQFVKLLLEEDAARVCELEELGELSPCWESLRRQIVTQYQTIILTYQENLTDLHQYRGPSFKASSLKADKKLEFVPTNLHIQRMRVQDDGGSDQNYDIVTIGAPAAHCQGFKSGGLRKKLHKFEETKKHFEECCTSSGCQSIIYIPQDVVRAKEIIAQINTLKTQVSYYAERLSRAAKDRSATGLERTLAILADKTRQLVTVCDCKLLANSIHGLNAARPDYIASKASPTSTEEEQVMLRNDQDTLMARWTGRNSRSSLQVDWHEEEWEKVWLNVDKSLECIIQRVDKLLQKERLHGEGCEDVFPCAGSCTSKKGNPDSHAYWIRPEDPFCDVPSSPCPSTMPSTACHPHLTTRAYASMLPICCLHFTLCCFHLSVSLTPCPPPPCRLQGGLPGGAGASQCMEQQAVRAESPVAFPCNWSPCVILHLCQSESQGPLEIHHHGYKGWAPGLFRFVKQSE

SEQ ID NO: 909299 - protein, 938 aa, Homo sapiens; identical to SEQ ID NO: 909295

SEQ ID NO: 909300 - protein, 938 aa, Homo sapiens; identical to SEQ ID NO: 909295

SEQ ID NO: 909301 - protein, 816 aa, Homo sapiens
MTAREHSPRHGARARAMQRASTIDVAADMLGLSLAGNIQDPDEPILEFSLACSELHTPSLDRKPNSFVAVSVTTPPQAFWTKHAQTEIIEGTNNPIFLSSIAFFQDSLINQMTQVKLSVYDVKDRSQGTMYLLGSGTFIVKDLLQDRHHRLHLTLRSAESDRVGNITVIGWQMEEKSDQRPPVTRSVDTVNGRMVLPVDESLTEALGIRSKYASLRKDTLLKSVFGGAICRMYRFPTTDGNHLRILEQMAESVLSLHVPRQFVKLLLEEDAARVCELEELGELSPCWESLRRQIVTQYQTIILTYQENLTDLHQYRGPSFKASSLKADKKLEFVPTNLHIQRMRVQDDGGSDQNYDIVTIGAPAAHCQGFKSGGLRKKLHKFEETKKHFEECCTSSGCQSIIYIPQDVVRAKEIIAQINTLKTQVSYYAERLSRAAKDRSATGLERTLAILADKTRQLVTVCDCKLLANSIHGLNAARPDYIASKASPTSTEEEQVMLRNDQDTLMARWTGRNSRSSLQVDWHEEEWEKVWLNVDKSLECIIQRVDKLLQKERLHGEGCEDVFPCAGSCTSKKDCSPPPEESSPGEWSEALYPLLTTLTDCVAMMSDKAKKAMVFLLMQDSAPTIATYLSLQYRRDVVFCQTLTALICGFIIKLRNCLHDDGFLRQLYTIGLLAQFESLLSTYGEELAMLEDMSLGIMDLRNVTFKVTQATSSASADMLPVITGNRDGFNVRVPLPGPLFDALPREIQSGMLLRVQPVLFNVGINEQQTLAERFGDTSLQEVINVESLVRLNSYFEQFKEVLPEDSYVTWLLPMLS

SEQ ID NO: 909302 - protein, 182 aa, Homo sapiens
MEKLLLHTPKAIGQPFYNSLGFSSSPSPIGMPLPSQTPGHSLTPPPSLSSHGSSSSLHLGGLTNGSGRYISAAPGAEAKYRSASSTSSLFSSSSQLFPPSRLRYNRSDIMPSGRSRLLEDFRNNRFPNLQLRDLIGPSACAATTSSIGICGGLDPRRVQPPLRPYRHATTSSTRISKIRPSD

SEQ ID NO: 909303 - protein, 1064 aa, Homo sapiens
MNHDFQALALESRGMGELLPTKKFWEPDDSTKDGQKGIFLGDDEWRETAWGASHHSMSQPIMVQRRSGQGFHGNSEVNAILSPRSESGGLGVSMVEYVLSSSPADKLDSRFRKGNFGTRDAETDGPEKGDQKGKASPFEEDQNRDLKQGDDDDSKINGRGLPNGMDADCKDFNRTPGSRQASPTEVVERLGPNTNPSEGLGPLPNPTANKPLVEEFSNPETQNLDAMEQVGLESLQFDYPGNQVPMDSSGATVGLFDYNSQQQLFQRTNALTVQQLTAAQQQQYALAAAQQPHIAGVFSAGLAPAAFVPNPYIISAAPPGTDPYTAAGLAAAATLAGPAVVPPQYYGVPWGVYPANLFQQQAAAAANNTASQQAASQAQPGQQQVLRAGAGQRPLTPNQGQQGQQAESLAAAAAANPTLAFGQGLATGMPGYQVLAPTAYYDQTGALVVGPGARTGLGAPVRLMAPTPVLISSAAAQAAAAAAAGGTASSLTGSTNGLFRPIGTQPPQQQQQQPSTNLQSNSFYGSSSLTNSSQSSSLFSHGPGQPGSTSLGFGSGNSLGAAIGSALSGFGSSVGSSASSSATRRESLSTSSDLYKRSSSSLAPIGQPFYNSLGFSSSPSPIGMPLPSQTPGHSLTPPPSLSSHGSSSSLHLGGLTNGSGRYISAAPGAEAKYRSASSTSSLFSSSSQLFPPSRLRYNRSDIMPSGRSRLLEDFRNNRFPNLQLRDLIGHIVEFSQDQHGSRFIQQKLERATPAERQMVFNEILQAAYQLMTDVFGNYVIQKFFEFGSLDQKLALATRIRGHVLPLALQMYGCRVIQKALESISSDQQSEMVKELDGHVLKCVKDQNGNHVVQKCIECVQPQSLQFIIDAFKGQVFVLSTHPYGCRVIQRILEHCTAEQTLPILEELHQHTEQLVQDQYGNYVIQHVLEHGRPEDKSKIVSEIRGKVLALSQHKFASNVVEKCVTHASRAERALLIDEVCCQNDGPHSALYTMMKDQYANYVVQKMIDMAEPAQRKIIMHKIRPHITTLRKYTYGKHILAKLEKYYLKNSPDLGPIGGPPNGML

SEQ ID NO: 909304 - protein, 1064 aa, Homo sapiens; identical to SEQ ID NO: 909303

SEQ ID NO: 909305 - protein, 636 aa, Homo sapiens [sequence omitted]

SEQ ID NO: 909306 - protein, 1064 aa, Homo sapiens; identical to SEQ ID NO: 909303

SEQ ID NO: 909307 - protein, 362 aa, Homo sapiens
MPSGRSRLLEDFRNNRFPNLQLRDLIGHIVEFSQDQHGSRFIQQKLERATPAERQMVFNEILQAAYQLMTDVFGNYVIQKFFEFGSLDQKLALATRIRGHVLPLALQMYGCRVIQKALESISSDQQSEMVKELDGHVLKCVKDQNGNHVVQKCIECVQPQSLQFIIDAFKGQVFVLSTHPYGCRVIQRILEHCTAEQTLPILEELHQHTEQLVQDQYGNYVIQHVLEHGRPEDKSKIVSEIRGKVLALSQHKFASNVVEKCVTHASRAERALLIDEVCCQNDGPHSALYTMMKDQYANYVVQKMIDMAEPAQRKIIMHKIRPHITTLRKYTYGKHILAKLEKYYLKNSPDLGPIGGPPNGML

SEQ ID NO: 909308 - protein, 1029 aa, Homo sapiens
MNHDFQALALESRGMGELLPTKKFWEPDDSTKDGQKGIFLGDDEWRETAWGASHHSMSQPIMVQRRSGQGFHGNSEVNAILSPRSESGGLGVSMVEYVLSSSPADKLDSRFRKGNFGTRDAETDGPEKGDQKGKASPFEEDQNRDLKQGDDDDSKINGRGLPNGMDADCKDFNRTPGSRQASPTEVVERLGPNTNPSEGLGPLPNPTANKPLVEEFSNPETQNLDAMEQVGLESLQFDYPGNQVPMDSSGATVGLFDYNSQQQLFQRTNALTVQQLTAAQQQQYALAAAQQPHIAGVFSAGLAPAAFVPNPYIISAAPPGTDPYTAAGLAAAATLAGPAVVPPQYYGVPWGVYPANLFQQQAAAAANNTASQQAASQAQPGQQQVLRAGAGQRPLTPNQGQQGQQAESLAAAAAANPTLAFGQGLATGMPGYQVLAPTAYYDQTGALVVGPGARTGLGAPVRLMAPTPVLISSAAAQAAAAAAAGGTASSLTGSTNGLFRPIGTQPPQQQQQQPSTNLQSNSFYGSSSLTNSSQSSSLFSHGPGQPGSTSLGFGSGNSLGAAIGSALSGFGSSVGSSASSSATRRESLSTSSDLYKRSSSSLAPIGQPFYNSLGFSSSPSPIGMPLPSQTPGHSLTPPPSLSSHGSSSSLHLGGLTNGSGRYISAAPGAEAKYRSASSTSSLFSSSSQLFPPSRLRYNRSDIMPSGRSRLLEDFRNNRFPNLQLRDLIGHIVEFSQDQHGSRFIQQKLERATPAERQMVFNEILQAAYQLMTDVFGNYVIQKFFEFGSLDQKLALATRIRGHVLPLALQMYGCRVIQKALESISSDQQSEMVKELDGHVLKCVKDQNGNHVVQKCIECVQPQSLQFIIDAFKGQVFVLSTHPYGCRVIQRILEHCTAEQTLPILEELHQHTEQLVQDQYGNYVIQHVLEHGRPEDKSKIVSEIRGKVLALSQHKFASNVVEKCVTHASRAERALLIDEVCCQNDGPHSALYTMMKDQYANYVVQKMIDMAEPAQRKIIMHKVIQHVTLR

SEQ ID NO: 909309 - protein, 776 aa, Homo sapiens
  misc_feature (752)..(752): Xaa can be any naturally occurring amino acid
MNHDFQALALESRGMGELLPTKKFWEPDDSTKDGQKGIFLGDDEWRETAWGASHHSMSQPIMVQRRSGQGFHGNSEVNAILSPRSESGGLGVSMVEYVLSSSPADKLDSRFRKGNFGTRDAETDGPEKGDQKGKASPFEEDQNRDLKQGDDDDSKINGRGLPNGMDADCKDFNRTPGSRQASPTEVVERLGPNTNPSEGLGPLPNPTANKPLVEEFSNPETQNLDAMEQVGLESLQFDYPGNQVPMDSSGATVGLFDYNSQQQLFQRTNALTVQQLTAAQQQQYALAAAQQPHIAGVFSAGLAPAAFVPNPYIISAAPPGTDPYTAAGLAAAATLAGPAVVPPQYYGVPWGVYPANLFQQQAAAAANNTASQQAASQAQPGQQQVLRAGAGQRPLTPNQGQQGQQAESLAAAAAANPTLAFGQGLATGMPGYQVLAPTAYYDQTGALVVGPGARTGLGAPVRLMAPTPVLISSAAAQAAAAAAAGGTASSLTGSTNGLFRPIGTQPPQQQQQQPSTNLQSNSFYGSSSLTNSSQSSSLFSHGPGQPGSTSLGFGSGNSLGAAIGSALSGFGSSVGSSASSSATRRESLSTSSDLYKRSSSSLAPIGQPFYNSLGFSSSPSPIGMPLPSQTPGHSLTPPPSLSSHGSSSSLHLGGLTNGSGRYISAAPGAEAKYRSASSTSSLFSSSSQLFPPSRLRYNRSDIMPSGRSRLLEDFRNNRFPNLQLRDLIGHIVEFSQDQHGSRLSSTSSNCLXMIRLGALGGLAPGSKDWPWELQFG

SEQ ID NO: 909310 - protein, 191 aa, Homo sapiens
GGGEGRAGGGGSHVVVSLCVSPSVLRWFGGGGGGEGGGGVGGEGGRWRKKTLPPPKAEEGEDRQERRRRVPNGRCPRLRQLRPQQPCKSVRVRSFSGPLAPSRMAPQALCGGLGGSRSPAGGRIGPAECPGRCGLGPARTMQGEGCRKGVCACGGGGAAPAAFPLPSLCGAAASGAWGADPVLPPIRRAGG

SEQ ID NO: 909311 - protein, 1064 aa, Homo sapiens; identical to SEQ ID NO: 909303

SEQ ID NO: 909312 - protein, 985 aa, Homo sapiens
MNHDFQALALESRGMGELLPTKKFWEPDDSTKDGQKGIFLGDDEWRETAWGASHHSMSQPIMVQRRSGQGFHGNSEVNAILSPRSESGGLGVSMVEYVLSSSPADKLDSRFRKGNFGTRDAETDGPEKGDQKGKASPFEEDQNRDLKQGDDDDSKINGRGLPNGMDADCKDFNRTPGSRQASPTEVVERLGPNTNPSEGLGPLPNPTANKPLVEEFSNPETQNLDAMEQVGLESLQFDYPGNQVPMDSSGATVGLFDYNSQQQLFQRTNALTVQQLTAAQQQQYALAAAQQPHIAGVFSAGLAPAAFVPNPYIISAAPPGTDPYTAAGLAAAATLAGPAVVPPQYYGVPWGVYPANLFQQQAAAAANNTASQQAASQAQPGQQQVLRAGAGQRPLTPNQGQQGQQAESLAAAAAANPTLAFGQGLATGMPGYQVLAPTAYYDQTGALVVGPGARTGLGAPVRLMAPTPVLISSAAAQAAAAAAAGGTASSLTGSTNGLFRPIGTQPPQQQQQQPSTNLQSNSFYGSSSLTNSSQSSSLFSHGPGQPGSTSLGFGSGNSLGAAIGSALSGFGSSGGLTNGSGRYISAAPGAEAKYRSASSTSSLFSSSSQLFPPSRLRYNRSDIMPSGRSRLLEDFRNNRFPNLQLRDLIGHIVEFSQDQHGSRFIQQKLERATPAERQMVFNEILQAAYQLMTDVFGNYVIQKFFEFGSLDQKLALATRIRGHVLPLALQMYGCRVIQKALESISSDQQSEMVKELDGHVLKCVKDQNGNHVVQKCIECVQPQSLQFIIDAFKGQVFVLSTHPYGCRVIQRILEHCTAEQTLPILEELHQHTEQLVQDQYGNYVIQHVLEHGRPEDKSKIVSEIRGKVLALSQHKFASNVVEKCVTHASRAERALLIDEVCCQNDGPHSALYTMMKDQYANYVVQKMIDMAEPAQRKIIMHKIRPHITTLRKYTYGKHILAKLEKYYLKNSPDLGPIGGPPNGML

SEQ ID NO: 909313 - protein, 636 aa, Homo sapiens [sequence omitted]

SEQ ID NO: 909314 - protein, 1064 aa, Homo sapiens; identical to SEQ ID NO: 909303

SEQ ID NO: 909315 - protein, 1064 aa, Homo sapiens; identical to SEQ ID NO: 909303

SEQ ID NO: 909316 - protein, 451 aa, Homo sapiens
TSGEGPGELADPARRWGPAGSVARAAERQGGGGCCAGCSEEEALGGAHGWPGSCAEHESPVLRRGQTWHSAGGRYLKYTLDQYVENDYTIVYFHYGLNSRNKPSLGWLQSAYKEFDRKYKKNLKALYVVHPTSFIKVLWNILKPLISHKFGKKVIYFNYLSELHEHLKYDQLVIPPEVLRYDEKLQSLHEGRTPPPTKTPPPRPPLPTQQFGVSLQYLKDKNQGELIPPVLRFTVTYLREKGLRTEGLFRRSASVQTVREIQRLYNQGKPVNFDDYGDIHIPAVILKTFLRELPQPLLTFQAYEQILGITCVESSLRVTGCRQILRSLPEHNYVVLRYLMGFLHAVSRESIFNKMNSSNLACVFGLNLIWPSQGVSSLSALVPLNMFTELLIEYYEKIFSTPEAPGEHGLAPWEQGSRAAPLQEAVPRTQATGLTKPTLPPSPLMAARRRL

SEQ ID NO: 909317 - protein, 287 aa, Homo sapiens
MAPMPTGQKLLDSLAETWDFFFSDVLPMLQAIFYPVQGKEPSVRQLALLHFRNAITLSVKLEDALARAHARVPPAIVQMLLVLQGVHESRGVTEDYLRLETLVQKVVSPYLGTYGLHSSEGPFTHSCILEKRLLRRSRSGDVLAKNPVVRSKSYNTPLLNPVQEHEAEGAAAGGTSIRRHSVSEMTSCPEPQGFSDPPGQGPTGTFRSSPAPHSGPCPSRLYPTTQPPEQGLDPTRSSLPRSSPENLVDQILESVDSDSEGIFIDFGRGRGSGMSDLEGSGGRQSVV

SEQ ID NO: 909318 - protein, 287 aa, Homo sapiens; identical to SEQ ID NO: 909317

SEQ ID NO: 909319 - protein, 511 aa, Homo sapiens
TSGEGPGERQTRHAGGGRRGPWPELQRDKAAAAAVLGAVRKRPSVVPMAGQDPALSTSHPFYDVARHGILQVAGDDRFGRRVVTFSCCRMPPSHELDHQRLLEYLKYTLDQYVENDYTIVYFHYGLNSRNKPSLGWLQSAYKEFDRKDGDLTMWPRLVSNSKLKRSSHLSLPKYWDYRYKKNLKALYVVHPTSFIKVLWNILKPLISHKFGKKVIYFNYLSELHEHLKYDQLVIPPEVLRYDEKLQSLHEGRTPPPTKTPPPRPPLPTQQFGVSLQYLKDKNQGELIPPVLRFTVTYLREKGLRTEGLFRRSASVQTVREIQRLYNQGKPVNFDDYGDIHIPAVILKTFLRELPQPLLTFQAYEQILGITCVESSLRVTGCRQILRSLPEHNYVVLRYLMGFLHAVSRESIFNKMNSSNLACVFGLNLIWPSQGVSSLSALVPLNMFTELLIEYYEKIFSTPEAPGEHGLAPWEQGSRAAPLQEAVPRTQATGLTKPTLPPSPLMAARRRL

SEQ ID NO: 909320 - protein, 643 aa, Homo sapiens
MRTLRRLKFMSSPSLSDLGKREPAAAADERGTQQRRACANATWNSIHNGVIAVFQRKGLPDQELFSLNEGVRQLLKTELGSFFTEYLQNQLLTKGMVILRDKIRFYEGQKLLDSLAETWDFFFSDVLPMLQAIFYPVQGKEPSVRQLALLHFRNAITLSVKLEDALARAHARVPPAIVQMLLVLQGVHESRGVTEDYLRLETLVQKVVSPYLGTYGLHSSEGPFTHSCILELQRDKAAAAAVLGAVRKRPSVVPMAGQDPALSTSHPFYDVARHGILQVAGDDRFGRRVVTFSCCRMPPSHELDHQRLLEYKKNLKALYVVHPTSFIKVLWNILKPLISHKFGKKVIYFNYLSELHEHLKYDQLVIPPEVLRYDEKLQSLHEGRTPPPTKTPPPRPPLPTQQFGVSLQYLKDKNQGELIPPVLRFTVTYLREKGLRTEGLFRRSASVQTVREIQRLYNQGKPVNFDDYGDIHIPAVILKTFLRELPQPLLTFQAYEQILGITCVESSLRVTGCRQILRSLPEHNYVVLRYLMGFLHAVSRESIFNKMNSSNLACVFGLNLIWPSQGVSSLSALVPLNMFTELLIEYYEKIFSTPEAPGEHGLAPWEQGSRAAPLQEAVPRTQATGLTKPTLPPSPLMAARRRL

SEQ ID NO: 909321 - protein, 581 aa, Homo sapiens
MSAAPKARHPVCLVLSRVSELTPRRVQTSAKVAEQRRPVGWDSTCAHPGSIPPPESSRHPASIHNGVIAVFQRKGLPDQELFSLNEGVRQLLKTELGSFFTEYLQNQLLTKGMVILRDKIRFYEELQRDKAAAAAVLGAVRKRPSVVPMAGQDPALSTSHPFYDVARHGILQVAGDDRFGRRVVTFSCCRMPPSHELDHQRLLEYLKYTLDQYVENDYTIVYFHYGLNSRNKPSLGWLQSAYKEFDRKYKKNLKALYVVHPTSFIKVLWNILKPLISHKFGKKVIYFNYLSELHEHLKYDQLVIPPEVLRYDEKLQSLHEGRTPPPTKTPPPRPPLPTQQFGVSLQYLKDKNQGELIPPVLRFTVTYLREKGLRTEGLFRRSASVQTVREIQRLYNQGKPVNFDDYGDIHIPAVILKTFLRELPQPLLTFQAYEQILGITCVESSLRVTGCRQILRSLPEHNYVVLRYLMGFLHAVSRESIFNKMNSSNLACVFGLNLIWPSQGVSSLSALVPLNMFTELLIEYYEKIFSTPEAPGEHGLAPWEQGSRAAPLQEAVPRTQATGLTKPTLPPSPLMAARRRL

SEQ ID NO: 909322 - protein, 548 aa, Homo sapiens
MRTLRRLKFMSSPSLSDLGKREPAAAADERGTQQRRACANATWNSIHNGVIAVFQRKGLPDQELFSLNEGVRQLLKTELGSFFTEYLQNQLLTKGMVILRDKIRFYEGQKLLDSLAETWDFFFSDVLPMLQAIFYPVQGKEPSVRQLALLHFRNAITLSVKLEDALARAHARVPPAIVQMLLVLQGVHESRGVTEDYLRLETLVQKVVSPYLGTYGLHSSEGPFTHSCILELQRDKAAAAAVLGAVRKRPSVVPMAGQDPALSTSHPFYDVARHGILQVAGDDRFGRRVVTFSCCRMPPSHELDHQRLLEYLKYTLDQYVENDYTIVYFHYGLNSRNKPSLGWLQSAYKEFDRKYKKNLKALYVVHPTSFIKVLWNILKPLISHKFGKKVIYFNYLSELHEHLKYDQLVIPPEVLRYDEKLQSLHEGRTPPPTKTPPPRPPLPTQQFGVSLQYLKDKNQGELIPPVLRFTVTYLREKGLRTEGLFRRSASVQTVREIQRLYNQGKPVNFDDYGDIHIPAVILKTFLRELPQPLLTFQAYEQILGITCA

SEQ ID NO: 909323 - protein, 379 aa, Homo sapiens
MSSPSLSDLGKREPAAAADERGTQQRRACANATWNSIHNGVIAVFQRKGLPDQELFSLNEGVRQLLKTELGSFFTEYLQNQLLTKGMVILRDKIRFYEGQKLLDSLAETWDFFFSDVLPMLQAIFYPVQGKEPSVRQLALLHFRNAITLSVKLEDALARAHARVPPAIVQMLLVLQGVHESRGVTEDYLRLETLVQKVVSPYLGTYGLHSSEGPFTHSCILEKRLLRRSRSGDVLAKNPVVRSKSYNTPLLNPVQEHEAEGAAAGGTSIRRHSVSEMTSCPEPQGFSDPPGQGPTGTFRSSPAPHSGPCPSRLYPTTQPPEQGLDPTRSSLPRSSPENLVDQILESVDSDSEGIFIDFGRGRGSGMSDLEGSGGRQSVV

SEQ ID NO: 909324 - protein, 398 aa, Homo sapiens
LEIPALFGWRLPRAGHQRLLEYLKYTLDQYVENDYTIVYFHYGLNSRNKPSLGWLQSAYKEFDRKYKKNLKALYVVHPTSFIKVLWNILKPLISHKFGKKVIYFNYLSELHEHLKYDQLVIPPEVLRYDEKLQSLHEGRTPPPTKTPPPRPPLPTQQFGVSLQYLKDKNQGELIPPVLRFTVTYLREKGLRTEGLFRRSASVQTVREIQRLYNQGKPVNFDDYGDIHIPAVILKTFLRELPQPLLTFQAYEQILGITCVESSLRVTGCRQILRSLPEHNYVVLRYLMGFLHAVSRESIFNKMNSSNLACVFGLNLIWPSQGVSSLSALVPLNMFTELLIEYYEKIFSTPEAPGEHGLAPWEQGSRAAPLQEAVPRTQATGLTKPTLPPSPLMAARRRL

SEQ ID NO: 909325 - protein, 282 aa, Homo sapiens
MRTLRRLKFMSSPSLSDLGKREPAAAADERGTQQRRACANATWNSIHNGVIAVFQRKGLPDQELFSLNEGVRQLLKTELGSFFTEYLQNQLLTKGMVILRDKIRFYEGQKLLDSLAETWDFFFSDVLPMLQAIFYPVQGKEPSVRQLALLHFRNAITLSVKLEDALARAHARVPPAIVQMLLVLQGVHESRGVTEDYLRLETLVQKVVSPYLGTYGLHSSEGPFTHSCILELQRDKAAAAAVLGAVRKRPSVVPMAGQDPALSTSHPFYDVARHGILQVAGI

SEQ ID NO: 909326 - protein, 368 aa, Homo sapiens
SAAPSPGPGLRLRLRLWLCAVAAAAAARGPRLKFMSSPSLSDLGKREPAAAADERGTQQRRACANATWNSIHNGVIAVFQRKGLPDQELFSLNEGVRQLLKTELGSFFTEYLQNQLLTKGMVILRDKIRFYEGQKLLDSLAETWDFFFSDVLPMLQAIFYPVQGKEPSVRQLALLHFRNAITLSVKLEDALARAHARVPPAIVQMLLVLQGVHESRGVTEDYLRLETLVQKVVSPYLGTYGLHSSEGPFTHSCILEKRLLRRSRSGDVLAKNPVVRSKSYNTPLLNPVQEHEAEGAAAGGTSIRRHSVSEMTSCPEPQGFSDPPGQGPTGTFRSSPAPHSGPCPSRLYPTPAHRECKPSGLCPRRAPK

SEQ ID NO: 909327 - protein, 416 aa, Homo sapiens
MRTLRRLKFMSSPSLSDLGKREPAAAADERGTQQRRACANATWNSIHNGVIAVFQRKGLPDQELFSLNEGVRQLLKTELGSFFTEYLQNQLLTKGMVILRDKIRFYEGQKLLDSLAETWDFFFSDVLPMLQAIFYPVQGKEPSVRQLALLHFRNAITLSVKLEDALARAHARVPPAIVQMLLVLQGVHESRGVTEDYLRLETLVQKVVSPYLGTYGLHSSEGPFTHSCILELQRDKAAAAAVLGAVRKRPSVVPMAGQDPALSTSHPFYDVARHGILQVAGDDRFGRRVVTFSCCRMPPSHELDHQRLLEYLKYTLDQYVENDYTIVYFHYGLNSRNKPSLGWLQSAYKEFDRKYKKNLKALYVVHPTSFIKVLWNILKPLISHKFGKKVIYFNYLSELHEHLKYDQLVIPPEVLR

SEQ ID NO: 909328 - protein, 388 aa, Homo sapiens
MRTLRRLKFMSSPSLSDLGKREPAAAADERGTQQRRACANATWNSIHNGVIAVFQRKGLPDQELFSLNEGVRQLLKTELGSFFTEYLQNQLLTKGMVILRDKIRFYEGQKLLDSLAETWDFFFSDVLPMLQAIFYPVQGKEPSVRQLALLHFRNAITLSVKLEDALARAHARVPPAIVQMLLVLQGVHESRGVTEDYLRLETLVQKVVSPYLGTYGLHSSEGPFTHSCILEKRLLRRSRSGDVLAKNPVVRSKSYNTPLLNPVQEHEAEGAAAGGTSIRRHSVSEMTSCPEPQGFSDPPGQGPTGTFRSSPAPHSGPCPSRLYPTTQPPEQGLDPTRSSLPRSSPENLVDQILESVDSDSEGIFIDFGRGRGSGMSDLEGSGGRQSVV

SEQ ID NO: 909329 - protein, 287 aa, Homo sapiens; identical to SEQ ID NO: 909317

SEQ ID NO: 909330 - protein, 762 aa, Homo sapiens
MRTLRRLKFMSSPSLSDLGKREPAAAADERGTQQRRACANATWNSIHNGVIAVFQRKGLPDQELFSLNEGVRQLLKTELGSFFTEYLQNQLLTKGMVILRDKIRFYEETHLSRCVPIPLRLASPAPIASLDALPPGSPPCLTLCTLFFLRRGAAIGRGLRGSPDLTTGRAGLALGPLGHLTVVHPFLGGSASVCLVGGRSPLATALMILLSVPLPCHVMDGQLFGAQLGPQCPASAPAHSRCSVFVGGADSVGEGGRRSVGRRNQLLSRVVEEDLMRLGCELKLLCQAHLCGSHLCQAYLRGSHLCRSHLCQVYLCGSYLCRSPDAGLTCAECTYLCGSHLCQAYCRGLTCERLTCARCIPVWLSLVWVWYVTKAWELAAVICQEQTLSQVPCALGSFHALSSGRPIPLLPHFINGRLRLSSGPRAIEQLSCGAGHRPWAGAARGLSPGPPLPHPLMTHPGLSGGICPRQSGPVVMAPMPTGQKLLDSLAETWDFFFSDVLPMLQAIFYPVQGKEPSVRQLALLHFRNAITLSVKLEDALARAHARVPPAIVQMLLVLQGVHESRGVTEDYLRLETLVQKVVSPYLGTYGLHSSEGPFTHSCILEKRLLRRSRSGDVLAKNPVVRSKSYNTPLLNPVQEHEAEGAAAGGTSIRRHSVSEMTSCPEPQGFSDPPGQGPTGTFRSSPAPHSGPCPSRLYPTTQPPEQGLDPTRSSLPRSSPENLVDQILESVDSDSEGIFIDFGRGRGSGMSDLEGSGGRQSVV

SEQ ID NO: 909331 - protein, 511 aa, Homo sapiens; identical to SEQ ID NO: 909319

SEQ ID NO: 909332 - protein, 413 aa, Homo sapiens
SAAPSPGPGLRLRLRLWLCAVAAAAAARGPRLKFMSSPSLSDLGKREPAAAADERGTQQRRACANATWNSIHNGVIAVFQRKGLPDQELFSLNEGVRQLLKTELGSFFTEYLQNQLLTKGMVILRDKIRFYEGQKLLDSLAETWDFFFSDVLPMLQAIFYPVQGKEPSVRQLALLHFRNAITLSVKLEDALARAHARVPPAIVQMLLVLQGVHESRGVTEDYLRLETLVQKVVSPYLGTYGLHSSEGPFTHSCILEKRLLRRSRSGDVLAKNPVVRSKSYNTPLLNPVQEHEAEGAAAGGTSIRRHSVSEMTSCPEPQGFSDPPGQGPTGTFRSSPAPHSGPCPSRLYPTTQPPEQGLDPTRSSLPRSSPENLVDQILESVDSDSEGIFIDFGRGRGSGMSDLEGSGGRQSVV

SEQ ID NO: 909333 - protein, 341 aa, Homo sapiens
TSGEGPGERQTRHAGGGRRGPWPELQRDKAAAAAVLGAVRKRPSVVPMAGQDPALSTSHPFYDVARHGILQVAGDDRFGRRVVTFSCCRMPPSHELDHQRLLEYLKYTLDQYVENDYTIVYFHYGLNSRNKPSLGWLQSAYKEFDRKYKKNLKALYVVHPTSFIKVLWNILKPLISHKFGKKVIYFNYLSELHEHLKYDQLVIPPEVLRYDEKLQSLHEGRTPPPTKTPPPRPPLPTQQFGVSLQYLKDKNQGELIPPVLRFTVTYLREKGLRTEGLFRRSASVQTVREIQRLYNQGKPVNFDDYGDIHIPAVILKTFLRELPQPLLTFQAYEQILGITCA

SEQ ID NO: 909334 - protein, 391 aa, Homo sapiens
MPPSHELDHQRLLEYLKYTLDQYVENDYTIVYFHYGLNSRNKPSLGWLQSAYKEFDRKYKKNLKALYVVHPTSFIKVLWNILKPLISHKFGKKVIYFNYLSELHEHLKYDQLVIPPEVLRYDEKLQSLHEGRTPPPTKTPPPRPPLPTQQFGVSLQYLKDKNQGELIPPVLRFTVTYLREKGLRTEGLFRRSASVQTVREIQRLYNQGKPVNFDDYGDIHIPAVILKTFLRELPQPLLTFQAYEQILGITCVESSLRVTGCRQILRSLPEHNYVVLRYLMGFLHAVSRESIFNKMNSSNLACVFGLNLIWPSQGVSSLSALVPLNMFTELLIEYYEKIFSTPEAPGEHGLAPWEQGSRAAPLQEAVPRTQATGLTKPTLPPSPLMAARRRL

SEQ ID NO: 909335 - protein, 180 aa, Homo sapiens
MWDSPSSELSFLHPVLLPGRDAALPLAPLELSREPHALPGVESSLRVTGCRQILRSLPEHNYVVLRYLMGFLHAVSRESIFNKMNSSNLACVFGLNLIWPSQGVSSLSALVPLNMFTELLIEYYEKIFSTPEAPGEHGLAPWEQGSRAAPLQEAVPRTQATGLTKPTLPPSPLMAARRRL

SEQ ID NO: 909336 - protein, 345 aa, Homo sapiens
MSAAPKARHPVCLVLSRVSELTPRRVQTSAKVAEQRRPVGWDSTCAHPGSIPPPESSRHPASIHNGVIAVFQRKGLPDQELFSLNEGVRQLLKTELGSFFTEYLQNQLLTKGMVILRDKIRFYEELQRDKAAAAAVLGAVRKRPSVVPMAGQDPALSTSHPFYDVARHGILQVAGDDRFGRRVVTFSCCRMPPSHELDHQRLLEYLKYTLDQYVENDYTIVYFHYGLNSRNKPSLGWLQSAYKEFDRKDGDLTMWPRLVSNSKLKRSSHLSLPKYWDYRQEPPCQANTLVLKGPDSQHFSFAGLLLYCNNSAGLCSSKTLWTLKCEFHVIFTCHEIFFCFFFSTT

SEQ ID NO: 909337 - protein, 389 aa, Homo sapiens
MRTLRRLKFMSSPSLSDLGKREPAAAADERGTQQRRACANATWNSIHNGVIAVFQRKGLPDQELFSLNEGVRQLLKTELGSFFTEYLQNQLLTKGMVILRDKIRFYEGQKLLDSLAETWDFFFSDVLPMLQAIFYPVQGKEPSVRQLALLHFRNAITLSVKLEDALARAHARVPPAIVQMLLVLQGVHESRGVTEDYLRLETLVQKVVSPYLGTYGLHSSEGPFTHSCILELQRDKAAAAAVLGAVRKRPSVVPMAGQDPALSTSHPFYDVARHGILQVAGDDRFGRRVVTFSCCRMPPSHELDHQRLLEYLKYTLDQYVENDYTIVYFHYGLNSRNKPSLGWLQSAYKEFDRKYVPASLQGRGCGLLVAGGGIVATRGRRVCSGGGVW

SEQ ID NO: 909338 - protein, 344 aa, Homo sapiens
IRGRVDRQKGTKPLRGTRHNRLLWDSLQPIFIAQVSEAAMAEVPELASEMMAYYSGNEDDLFFEADGPKQMKCSFQDLDLCPLDGGIQLRISDHHYSKGFRQAASVVVAMDKLRKMLVPCPQTFQENDLSTFFPFIFEEEPIFFDTWDNEAYVHDAPVRSLNCTLRDSQQKSLVMSGPYELKALHLQGQDMEQQVVFSMSFVQGEESNDKIPVALGLKEKNLYLSCVLKDDKPTLQLESVDPKNYPKKKMEKRFVFNKIEINNKLELGWPSQWVPCLSGKNGASGARRRIMVPPWGSKSANIGDGATRGEDKVKLTDCSHRWVVSPESGRVGPAQYAPFCAPSP

SEQ ID NO: 909339 - protein, 153 aa, Homo sapiens
KFLSLLLLLLKAIKTAREKLADTKPLRGTRHNRLLWDSLQPIFIAQVSEAAMAEVPELASEMMAYYSGNEDDLFFEADGPKQMKCSFQDLDLCPLDGGIQLRISDHHYSKGFRQAASVVVAMDKLRKMLVPCPQTFQENDLSTFFPFIFEEGS

SEQ ID NO: 909340 - protein, 356 aa, Homo sapiens
KFLSLLLLLLKAIKTAREKLADTKPLRGTRHNRLLWDSLQPIFIAQVSEAAMAEVPELASEMMAYYSGNEDDLFFEADGPKQMKCSFQDLDLCPLDGGIQLRISDHHYSKGFRQAASVVVAMDKLRKMLVPCPQTFQENDLSTFFPFIFEEEPIFFDTWDNEAYVHDAPVRSLNCTLRDSQQKSLVMSGPYELKALHLQGQDMEQQVVFSMSFVQGEESNDKIPVALGLKEKNLYLSCVLKDDKPTLQLESVDPKNYPKKKMEKRFVFNKIEINNKLELGWPSQWVPCLSGKNGASGARRRIMVPPWGSKSANIGDGATRGEDKVKLTDCSHRWVVSPESGRVGPAQYAPFCAPSP

SEQ ID NO: 909341 - protein, 110 aa, Homo sapiens [sequence omitted]

SEQ ID NO: 909342 - protein, 102 aa, Homo sapiens
  misc_feature (96)..(96): Xaa can be any naturally occurring amino acid
IRGRVDRQKGTKPLRGTRHNRLLWDSLQPIFIAQVSEAAMAEVPELASEMMAYYSGNEDDLFFEADGPKQMKCSLDLTSASDAHQLDLDTLQQLAXSVCACS

SEQ ID NO: 909343 - protein, 320 aa, Homo sapiens
KFLSLLLLLLKAIKTAREKLADTKPLRGTRHNRLLWDSLQPIFIAQVSEAAMAEVPELASEMMAYYSGNEDDLFFEADGPKQMKCSFQDLDLCPLDGGIQLRISDHHYSKGFRQAASVVVAMDKLRKMLVPCPQTFQENDLSTFFPFIFEEEPIFFDTWDNEAYVHDAPVRSLNCTLRDSQQKSLVMSGPYELKALHLQGQDMEQQVVFSMSFVQGEESNDKIPVALGLKEKNLYLSCVLKDDKPTLQLESVDPKNYPKKKMEKRFVFNKIEINNKLEFESAQFPNWYISTSQAENMPVFLGGTKGGQDITDFTMQFVSS

SEQ ID NO: 909344 - protein, 308 aa, Homo sapiens
IRGRVDRQKGTKPLRGTRHNRLLWDSLQPIFIAQVSEAAMAEVPELASEMMAYYSGNEDDLFFEADGPKQMKCSFQDLDLCPLDGGIQLRISDHHYSKGFRQAASVVVAMDKLRKMLVPCPQTFQENDLSTFFPFIFEEEPIFFDTWDNEAYVHDAPVRSLNCTLRDSQQKSLVMSGPYELKALHLQGQDMEQQVVFSMSFVQGEESNDKIPVALGLKEKNLYLSCVLKDDKPTLQLESVDPKNYPKKKMEKRFVFNKIEINNKLEFESAQFPNWYISTSQAENMPVFLGGTKGGQDITDFTMQFVSS

SEQ ID NO: 909345 - protein, 300 aa, Homo sapiens
MHWMLREITHERSRHGEVTHFLLFTQVSEAAMAEVPELASEMMAYYSGNEDDLFFEADGPKQMKCSFQDLDLCPLDGGIQLRISDHHYSKGFRQAASVVVAMDKLRKMLVPCPQTFQENDLSTFFPFIFEEEPIFFDTWDNEAYVHDAPVRSLNCTLRDSQQKSLVMSGPYELKALHLQGQDMEQQVVFSMSFVQGEESNDKIPVALGLKEKNLYLSCVLKDDKPTLQLESVDPKNYPKKKMEKRFVFNKIEINNKLEFESAQFPNWYISTSQAENMPVFLGGTKGGQDITDFTMQFVSS

SEQ ID NO: 909346 - protein, 153 aa, Homo sapiens; identical to SEQ ID NO: 909339

SEQ ID NO: 909347 - protein, 164 aa, Homo sapiens
MIYCLGGKTDDKKCTNRVFIFNPKKGDWKDLAPMKIPRSMFGVAVHKGKIVIAGGVTEDGLSASVEAFDLTTNKWDVMTEFPQERSSISLVSLAGSLYAIGGFAMIQLESKEFAPTEVNDIWNGFGGLAFLQRSGGLRATLLQSVGVTVNLLTVYVARGPFGGR

SEQ ID NO: 909348 - protein, 159 aa, Homo sapiens
MIYCLGGKTDDKKCTNRVFIFNPKKGDWKDLAPMKIPRSMFGVAVHKGKIVIAGGVTEDGLSASVEAFDLTTNKWDVMTEFPQERSSISLVSLAGSLYAIGGFAMIQLESKEFAPTEVNDIWKYEDDKKEWAGMLKEIRYASGASCLATRLNLFKLSKL

SEQ ID NO: 909349 - protein, 606 aa, Homo sapiens
MDSQRELAEELRLYQSTLLQDGLKDLLDEKKFIDCTLKAGDKSLPCHRLILSACSPYFREYFLSEIDEAKKKEVVLDNVDPAILDLIIKYLYSASIDLNDGNVQDIFALASRFQIPSVFTVCVSYLQKRLAPGNCLAILRLGLLLDCPRLAISAREFVSDRFVQICKEEDFMQLSPQELISVISNDSLNVEKEEAVFEAVMKWVRTDKENRVKNLSEVFDCIRFRLMTEKYFKDHVEKDDIIKSNPDLQKKIKVLKDAFAGKLPEPSKNAAKTGAGEVNGDVGDEDLLPGYLNDIPRHGMFVKDLILLVNDTAAVAYDPTENECYLTALAEQIPRNHSSIVTQQNQIYVVGGLYVDEENKDQPLQSYFFQLDSIASEWVGLPPLPSARCLFGLGEVDDKIYVVAGKDLQTEASLDSVLCYDPVAAKWNEVKKLPIKVYGHNVISHKGMIYCLGGKTDDKKCTNRVFIFNPKKGDWKDLAPMKIPRSMFGVAVHKGKIVIAGGVTEDGLSASVEAFDLTTNKWDVMTEFPQERSSISLVSLAGSLYAIGGFAMIQLESKEFAPTEVNDIWKYEDDKKEWAGMLKEIRYASGASCLATRLNLFKLSKL

SEQ ID NO: 909350 - protein, 606 aa, Homo sapiens; identical to SEQ ID NO: 909349

SEQ ID NO: 909351 - protein, 606 aa, Homo sapiens; identical to SEQ ID NO: 909349

SEQ ID NO: 909352 - protein, 637 aa, Homo sapiens
MDSQRELAEELRLYQSTLLQDGLKDLLDEKKFIDCTLKAGDKSLPCHRLILSACSPYFREYFLSEIDEAKKKEVVLDNVDPAILDLIIKYLYSASIDLNDGNVQDIFALASRFQIPSVFTVCVSYLQKRLAPGNCLAILRLGLLLDCPRLAISAREFVSDRFVQICKEEDFMQLSPQELISVISNDSLNVEKEEAVFEAVMKWVRTDKENRVKNLSEVFDCIRFRLMTEKYFKDHVEKDDIIKSNPDLQKKIKVLKDAFAGKLPEPSKNAAKTGAGEVNGDVGDEDLLPGYLNDIPRHGMFVKDLILLVNDTAAVAYDPTENECYLTALAEQIPRNHSSIVTQQNQIYVVGGLYVDEENKDQPLQSYFFQLDSIASEWVGLPPLPSARCLFGLGEVDDKIYVVAGKDLQTEASLDSVLCYDPVAAKWNEVKKLPIKVYGHNVISHKGMIYCLGGKTDDKKCTNRVFIFNPKKGDWKDLAPMKIPRSMFGVAVHKGKIVIAGGVTEDGLSASVEAFDLTTNKWDVMTEFPQERSSISLVSLAGSLYAIGGFAMIQLESKEFAPTEVNDIWKEIHAFGESEIVTSMRALLHGLPFASGAVAITRLILHRLTGPGPLCGGGGRGGQSSVRVRPLFPSRPG

SEQ ID NO: 909353 - protein, 1031 aa, Homo sapiens
GNAPRPPPPPRLPPAAVLAAAVAAAAALPRRGAALKGGTPPPGALAARAPREPVAAMPPRAPPAPGPRPPPRAAAATDTAAGAGGAGGAGGAGGPGFRPLAPRPWRWLLLLALPAACSAPPPRPVYTNHWAVQVLGGPAEADRVAAAHGYLNLGQIGNLEDYYHFYHSKTFKRSTLSSRGPHTFLRMDPQVKWLQQQEVKRRVKRQVRSDPQALYFNDPIWSNMWYLHCGDKNSRCRSEMNVQAAWKRGYTGKNVVVTILDDGIERNHPDLAPNYDSYASYDVNGNDYDPSPRYDASNENKHGTRCAGEVAASANNSYCIVGIAYNAKIGGIRMLDGDVTDVVEAKSLGIRPNYIDIYSASWGPDDDGKTVDGPGRLAKQAFEYGIKKGRQGLGSIFVWASGNGGREGDYCSCDGYTNSIYTISVSSATENGYKPWYLEECASTLATTYSSGAFYERKIVTTDLRQRCTDGHTGTSVSAPMVAGIIALALEANSQLTWRDVQHLLVKTSRPAHLKASDWKVNGAGHKVSHFYGFGLVDAEALVVEAKKWTAVPSQHMCVAASDKRPRSIPLVQVLRTTALTSACAEHSDQRVVYLEHVVVRTSISHPRRGDLQIYLVSPSGTKSQLLAKRLLDLSNEGFTNWEFMTVHCWGEKAEGQWTLEIQDLPSQVRNPEKQGKLKEWSLILYGTAEHPYHTFSAHQSRSRMLELSAPELEPPKAALSPSQVEVPEDEEDYTAQSTPGSANILQTSVCHPECGDKGCDGPNADQCLNCVHFSLGSVKTSRKCVSVCPLGYFGDTAARRCRRCHKGCETCSSRAATQCLSCRRGFYHHQEMNTCVTLCPAGFYADESQKNCLKCHPSCKKCVDEPEKCTVCKEGFSLARGSCIPDCEPGTYFDSELIRCGECHHTCGTCVGPGREECIHCAKNFHFHDWKCVPACGEGFYPEEMPGLPHKVCRRYGPPGGERQATVSSKGVPGGQSLSASSPGAGEGMLHHPTVDRSPFTELLRGLRPFVHWMHICWVPAVGRHRAAAG

SEQ ID NO: 909354 - protein, 135 aa, Homo sapiens
LTTTDQPTLRVTRYLRLPFETTGTKVPQGREHPVAKIVVLNPGMTFVLPRGHLATSGDILGCHNWKDVLTSSGWRPGMLLSTLQCTAAPMTKNCPDQNVNSAEVEKFRPKEMESKKKIVCNFIEIPSMNKTTYGL

SEQ ID NO: 909355 - protein, 1025 aa, Homo sapiens
GNAPRPPPPPRLPPAAVLAAAVAAAAALPRRGAALKGGTPPPGALAARAPREPVAAMPPRAPPAPGPRPPPRAAAATDTAAGAGGAGGAGGAGGPGFRPLAPRPWRWLLLLALPAACSAPPPRPVYTNHWAVQVLGGPAEADRVAAAHGYLNLGQIGNLEDYYHFYHSKTFKRSTLSSRGPHTFLRMDPQVKWLQQQEVKRRVKRQVRSDPQALYFNDPIWSNMWYLHCGDKNSRCRSEMNVQAAWKRGYTGKNVVVTILDDGIERNHPDLAPNYDSYASYDVNGNDYDPSPRYDASNENKHGTRCAGEVAASANNSYCIVGIAYNAKIGGIRMLDGDVTDVVEAKSLGIRPNYIDIYSASWGPDDDGKTVDGPGRLAKQAFEYGIKKGRQGLGSIFVWASGNGGREGDYCSCDGYTNSIYTISVSSATENGYKPWYLEECASTLATTYSSGAFYERKIVTTDLRQRCTDGHTGTSVSAPMVAGIIALALEANSQLTWRDVQHLLVKTSRPAHLKASDWKVNGAGHKVSHFYGFGLVDAEALVVEAKKWTAVPSQHMCVAASDKRPRSIPLVQVLRTTALTSACAEHSDQRVVYLEHVVVRTSISHPRRGDLQIYLVSPSGTKSQLLAKRLLDLSNEGFTNWEFMTVHCWGEKAEGQWTLEIQDLPSQVRNPEKQGKLKEWSLILYGTAEHPYHTFSAHQSRSRMLELSAPELEPPKAALSPSQVEVPEDEEDYTAQSTPGSANILQTSVCHPECGDKGCDGPNADQCLNCVHFSLGSVKTSRKCVSVCPLGYFGDTAARRCRRCHKGCETCSSRAATQCLSCRRGFYHHQEMNTCVTLCPAGFYADESQKNCLKCHPSCKKCVDEPEKCTVCKEGFSLARGSCIPDCEPGTYFDSELIRCGECHHTCGTCVGPGREECIHCAKNFHFHDWKCVPACGEGFYPEEMPGLPHKVCRRCDENCLSCAGSSRNCSRCKTGFTQLGTSCITNHTCSNADETFCEMVKSNRLCERKLFIQFCCRTCLLAG

SEQ ID NO: 909356 - protein, 977 aa, Homo sapiens
GNAPRPPPPPRLPPAAVLAAAVAAAAALPRRGAALKGGTPPPGALAARAPREPVAAMPPRAPPAPGPRPPPRAAAATDTAAGAGGAGGAGGAGGPGFRPLAPRPWRWLLLLALPAACSAPPPRPVYTNHWAVQVLGGPAEADRVAAAHGYLNLGQIGNLEDYYHFYHSKTFKRSTLSSRGPHTFLRMDPQVKWLQQQEVKRRVKRQVRSDPQALYFNDPIWSNMWYLDSYASYDVNGNDYDPSPRYDASNENKHGTRCAGEVAASANNSYCIVGIAYNAKIGGIRMLDGDVTDVVEAKSLGIRPNYIDIYSASWGPDDDGKTVDGPGRLAKQAFEYGIKKGRQGLGSIFVWASGNGGREGDYCSCDGYTNSIYTISVSSATENGYKPWYLEECASTLATTYSSGAFYERKIVTTDLRQRCTDGHTGTSVSAPMVAGIIALALEANSQLTWRDVQHLLVKTSRPAHLKASDWKVNGAGHKVSHFYGFGLVDAEALVVEAKKWTAVPSQHMCVAASDKRPRSIPLVQVLRTTALTSACAEHSDQRVVYLEHVVVRTSISHPRRGDLQIYLVSPSGTKSQLLAKRLLDLSNEGFTNWEFMTVHCWGEKAEGQWTLEIQDLPSQVRNPEKQGKLKEWSLILYGTAEHPYHTFSAHQSRSRMLELSAPELEPPKAALSPSQVEVPEDEEDYTAQSTPGSANILQTSVCHPECGDKGCDGPNADQCLNCVHFSLGSVKTSRKCVSVCPLGYFGDTAARRCRRCHKGCETCSSRAATQCLSCRRGFYHHQEMNTCVTLCPAGFYADESQKNCLKCHPSCKKCVDEPEKCTVCKEGFSLARGSCIPDCEPGTYFDSELIRCGECHHTCGTCVGPGREECIHCAKNFHFHDWKCVPACGEGFYPEEMPGLPHKVCRRCDENCLSCAGSSRNCSRCKTGFTQLGTSCITNHTCSNADETFCEMVKSNRLCERKLFIQFCCRTCLLAG

SEQ ID NO: 909357 - protein, 661 aa, Homo sapiens
GNAPRPPPPPRLPPAAVLAAAVAAAAALPRRGAALKGGTPPPGALAARAPREPVAAMPPRAPPAPGPRPPPRAAAATDTAAGAGGAGGAGGAGGPGFRPLAPRPWRWLLLLALPAACSAPPPRPVYTNHWAVQVLGGPAEADRVAAAHGYLNLGQIGNLEDYYHFYHSKTFKRSTLSSRGPHTFLRMDPQVKWLQQQEVKRRVKRQVRSDPQALYFNDPIWSNMWYLHCGDKNSRCRSEMNVQAAWKRGYTGKNVVVTILDDGIERNHPDLAPNYDSYASYDVNGNDYDPSPRYDASNENKHGTRCAGEVAASANNSYCIVGIAYNAKIGGIRMLDGDVTDVVEAKSLGIRPNYIDIYSASWGPDDDGKTVDGPGRLAKQAFEYGIKKGRQGLGSIFVWASGNGGREGDYCSCDGYTNSIYTISVSSATENGYKPWYLEECASTLATTYSSGAFYERKIVTTDLRQRCTDGHTGTSVSAPMVAGIIALALEANSQLTWRDVQHLLVKTSRPAHLKASDWKVNGAGHKVSHFYGFGLVDAEALVVEAKKWTAVPSQHMCVAASDKRPRSIPLVQVLRTTALTSACAEHSDQRVVYLEHVVVRTSISHPRRGDLQIYLVSPSGTKSQLLAKRWKFLKMRKITQVCAIRSVVTKAVMAPMQTSA

SEQ ID NO: 909358 - protein, 102 aa, Homo sapiens
GLGALGPWVLQTTDISLNDSARPWFSSHQWHCLCDENCLSCAGSSRNCSRCKTGFTQLGTSCITNHTCSNADETFCEMVKSNRLCERKLFIQFCCRTCLLAG

SEQ ID NO: 909359 - protein, 1025 aa, Homo sapiens; identical to SEQ ID NO: 909355

SEQ ID NO: 909360 - protein, 708 aa, Homo sapiens
GNAPRPPPPPRLPPAAVLAAAVAAAAALPRRGAALKGGTPPPGALAARAPREPVAAMPPRAPPAPGPRPPPRAAAATDTAAGAGGAGGAGGAGGPGFRPLAPRPWRWLLLLALPAACSAPPPRPVYTNHWAVQVLGGPAEADRVAAAHGYLNLGQIGNLEDYYHFYHSKTFKRSTLSSRGPHTFLRMDPQVKWLQQQEVKRRVKRQVRSDPQALYFNDPIWSNMWYLHCGDKNSRCRSEMNVQAAWKRGYTGKNVVVTILDDGIERNHPDLAPNYDSYASYDVNGNDYDPSPRYDASNENKHGTRCAGEVAASANNSYCIVGIAYNAKIGGIRMLDGDVTDVVEAKSLGIRPNYIDIYSASWGPDDDGKTVDGPGRLAKQAFEYGIKKGRQGLGSIFVWASGNGGREGDYCSCDGYTNSIYTISVSSATENGYKPWYLEECASTLATTYSSGAFYERKIVTTDLRQRCTDGHTGTSVSAPMVAGIIALALEANSQLTWRDVQHLLVKTSRPAHLKASDWKVNGAGHKVSHFYGFGLVDAEALVVEAKKWTAVPSQHMCVAASDKRPRSIPLVQVLRTTALTSACAEHSDQRVVYLEHVVVRTSISHPRRGDLQIYLVSPSGTKSQLLAKRLLDLSNEGFTNWEFMTVHCWGEKAEGQWTLEIQDLPSQVRNPEKQGDLETPVANQLTTEEREPGLKHVFRWQIEQELW

SEQ ID NO: 909361 - protein, 1110 aa, Homo sapiens
GNAPRPPPPPRLPPAAVLAAAVAAAAALPRRGAALKGGTPPPGALAARAPREPVAAMPPRAPPAPGPRPPPRAAAATDTAAGAGGAGGAGGAGGPGFRPLAPRPWRWLLLLALPAACSAPPPRPVYTNHWAVQVLGGPAEADRVAAAHGYLNLGQIGNLEDYYHFYHSKTFKRSTLSSRGPHTFLRMDPQVKWLQQQEVKRRVKRQVRSDPQALYFNDPIWSNMWYLHCGDKNSRCRSEMNVQAAWKRGYTGKNVVVTILDDGIERNHPDLAPNYDSYASYDVNGNDYDPSPRYDASNENKHGTRCAGEVAASANNSYCIVGIAYNAKIGGIRMLDGDVTDVVEAKSLGIRPNYIDIYSASWGPDDDGKTVDGPGRLAKQAFEYGIKKGRQGLGSIFVWASGNGGREGDYCSCDGYTNSIYTISVSSATENGYKPWYLEECASTLATTYSSGAFYERKIVTTDLRQRCTDGHTGTSVSAPMVAGIIALALEANSQLTWRDVQHLLVKTSRPAHLKASDWKVNGAGHKVSHFYGFGLVDAEALVVEAKKWTAVPSQHMCVAASDKRPRSIPLVQVLRTTALTSACAEHSDQRVVYLEHVVVRTSISHPRRGDLQIYLVSPSGTKSQLLAKRLLDLSNEGFTNWEFMTVHCWGEKAEGQWTLEIQDLPSQVRNPEKQGKLKEWSLILYGTAEHPYHTFSAHQSRSRMLELSAPELEPPKAALSPSQVEVPEDEEDYTAQSTPGSANILQTSVCHPECGDKGCDGPNADQCLNCVHFSLGSVKTSRKCVSVCPLGYFGDTAARRCRRCHKGCETCSSRAATQCLSCRRGFYHHQEMNTCVTLCPAGFYADESQKNCLKCHPSCKKCVDEPEKCTVCKEGFSLARGSCIPDCEPGTYFDSELIRCGECHHTCGTCVGPGREECIHCAKNFHFHDWKCVPACGEGFYPEEMPGLPHKVCRRCDENCLSCAGSSRNCSRCKTGFTQLGTSCITNHTCSNADETFCEMVKSNRLCERKLFIQFCCRTCLLAGGHLATSGDILGCHNWKDVLTSSGWRPGMLLSTLQCTAAPMTKNCPDQNVNSAEVEKFRPKEMESKKKIVCNFIEIPSMNKTTYGL

SEQ ID NO: 909362 - protein, 445 aa, Homo sapiens
GNAPRPPPPPRLPPAAVLAAAVAAAAALPRRGAALKGGTPPPGALAARAPREPVAAMPPRAPPAPGPRPPPRAAAATDTAAGAGGAGGAGGAGGPGFRPLAPRPWRWLLLLALPAACSAPPPRPVYTNHWAVQVLGGPAEADRVAAAHGYLNLGQIGNLEDYYHFYHSKTFKRSTLSSRGPHTFLRMDPQVKWLQQQEVKRRVKRQVRSDPQALYFNDPIWSNMWYLDSYASYDVNGNDYDPSPRYDASNENKHGTRCAGEVAASANNSYCIVGIAYNAKIGGIRMLDGDVTDVVEAKSLGIRPNYIDIYSASWGPDDDGKTVDGPGRLAKQAFEYGIKKGRQGLGSIFVWASGNGGREGDYCSCDGYTNSIYTISVSSATENGYKPWYLEECASTLATTYSSGAFYERKIVTTDLRQRCTDGHTGTSVSAPMVAGIIALALEAK

SEQ ID NO: 909363 - protein, 1018 aa, Homo sapiens
GNAPRPPPPPRLPPAAVLAAAVAAAAALPRRGAALKGGTPPPGALAARAPREPVAAMPPRAPPAPGPRPPPRAAAATDTAAGAGGAGGAGGAGGPGFRPLAPRPWRWLLLLALPAACSAPPPRPVYTNHWAVQVLGGPAEADRVAAAHGYLNLGQIGNLEDYYHFYHSKTFKRSTLSSRGPHTFLRMDPQVKWLQQQEVKRRVKRQVRSDPQALYFNDPIWSNMWYLHCGDKNSRCRSEMNVQAAWKRGYTGKNVVVTILDDGIERNHPDLAPNYDSYASYDVNGNDYDPSPRYDASNENKHGTRCAGEVAASANNSYCIVGIAYNAKIGGIRMLDGDVTDVVEAKSLGIRPNYIDIYSASWGPDDDGKTVDGPGRLAKQAFEYGIKKGRQGLGSIFVWASGNGGREGDYCSCDGYTNSIYTISVSSATENGYKPWYLEECASTLATTYSSGAFYERKIVTTDLRQRCTDGHTGTSVSAPMVAGIIALALEANSQLTWRDVQHLLVKTSRPAHLKASDWKVNGAGHKVSHFYGFGLVDAEALVVEAKKWTAVPSQHMCVAASDKRPRSIPLVQVLRTTALTSACAEHSDQRVVYLEHVVVRTSISHPRRGDLQIYLVSPSGTKSQLLAKRLLDLSNEGFTNWEFMTVHCWGEKAEGQWTLEIQDLPSQVRNPEKQGKLKEWSLILYGTAEHPYHTFSAHQSRSRMLELSAPELEPPKAALSPSQVEVPEDEEDYTGVCHPECGDKGCDGPNADQCLNCVHFSLGSVKTSRKCVSVCPLGYFGDTAARRCRRCHKGCETCSSRAATQCLSCRRGFYHHQEMNTCVTLCPAGFYADESQKNCLKCHPSCKKCVDEPEKCTVCKEGFSLARGSCIPDCEPGTYFDSELIRCGECHHTCGTCVGPGREECIHCAKNFHFHDWKCVPACGEGFYPEEMPGLPHKVCRRYGPPGGERQATVSSKGVPGGQSLSASSPGAGEGMLHHPTVDRSPFTELLRGLRPFVHWMHICWVPAVGRHRAAAG

SEQ ID NO: 909364 - protein, 497 aa, Homo sapiens
MWYLHCGDKNSRCRSEMNVQAAWKRGYTGKNVVVTILDDGIERNHPDLAPNYDSYASYDVNGNDYDPSPRYDASNENKHGTRCAGEVAASANNSYCIVGIAYNAKIGGIRMLDGDVTDVVEAKSLGIRPNYIDIYSASWGPDDDGKTVDGPGRLAKQAFEYGIKKGRQGLGSIFVWASGNGGREGDYCSCDGYTNSIYTISVSSATENGYKPWYLEECASTLATTYSSGAFYERKIVTTDLRQRCTDGHTGTSVSAPMVAGIIALALEANSQLTWRDVQHLLVKTSRPAHLKASDWKVNGAGHKVSHFYGFGLVDAEALVVEAKKWTAVPSQHMCVAASDKRPRSIPLVQVLRTTALTSACAEHSDQRVVYLEHVVVRTSISHPRRGDLQIYLVSPSGTKSQLLAKRLLDLSNEGFTNWEFMTVHCWGEKAEGQWTLEIQDLPSQVRNPEKQGDLETPVANQLTTEERFVSTLSILFHWSVYLSWSQYHIVLITVAL

SEQ ID NO: 909365 - protein, 1012 aa, Homo sapiens
GNAPRPPPPPRLPPAAVLAAAVAAAAALPRRGAALKGGTPPPGALAARAPREPVAAMPPRAPPAPGPRPPPRAAAATDTAAGAGGAGGAGGAGGPGFRPLAPRPWRWLLLLALPAACSAPPPRPVYTNHWAVQVLGGPAEADRVAAAHGYLNLGQIGNLEDYYHFYHSKTFKRSTLSSRGPHTFLRMDPQVKWLQQQEVKRRVKRQVRSDPQALYFNDPIWSNMWYLHCGDKNSRCRSEMNVQAAWKRGYTGKNVVVTILDDGIERNHPDLAPNYDSYASYDVNGNDYDPSPRYDASNENKHGTRCAGEVAASANNSYCIVGIAYNAKIGGIRMLDGDVTDVVEAKSLGIRPNYIDIYSASWGPDDDGKTVDGPGRLAKQAFEYGIKKGRQGLGSIFVWASGNGGREGDYCSCDGYTNSIYTISVSSATENGYKPWYLEECASTLATTYSSGAFYERKIVTTDLRQRCTDGHTGTSVSAPMVAGIIALALEANSQLTWRDVQHLLVKTSRPAHLKASDWKVNGAGHKVSHFYGFGLVDAEALVVEAKKWTAVPSQHMCVAASDKRPRSIPLVQVLRTTALTSACAEHSDQRVVYLEHVVVRTSISHPRRGDLQIYLVSPSGTKSQLLAKRLLDLSNEGFTNWEFMTVHCWGEKAEGQWTLEIQDLPSQVRNPEKQGKLKEWSLILYGTAEHPYHTFSAHQSRSRMLELSAPELEPPKAALSPSQVEVPEDEEDYTGVCHPECGDKGCDGPNADQCLNCVHFSLGSVKTSRKCVSVCPLGYFGDTAARRCRRCHKGCETCSSRAATQCLSCRRGFYHHQEMNTCVTLCPAGFYADESQKNCLKCHPSCKKCVDEPEKCTVCKEGFSLARGSCIPDCEPGTYFDSELIRCGECHHTCGTCVGPGREECIHCAKNFHFHDWKCVPACGEGFYPEEMPGLPHKVCRRCDENCLSCAGSSRNCSRCKTGFTQLGTSCITNHTCSNADETFCEMVKSNRLCERKLFIQFCCRTCLLAG

SEQ ID NO: 909366 - protein, 1007 aa, Homo sapiens
GNAPRPPPPPRLPPAAVLAAAVAAAAALPRRGAALKGGTPPPGALAARAPREPVAAMPPRAPPAPGPRPPPRAAAATDTAAGAGGAGGAGGAGGPGFRPLAPRPWRWLLLLALPAACSAPPPRPVYTNHWAVQVLGGPAEADRVAAAHGYLNLGQIGNLEDYYHFYHSKTFKRSTLSSRGPHTFLRMDPQVKWLQQQEVKRRVKRQVRSDPQALYFNDPIWSNMWYLHCGDKNSRCRSEMNVQAAWKRGYTGKNVVVTILDDGIERNHPDLAPNYDSYASYDVNGNDYDPSPRYDASNENKHGTRCAGEVAASANNSYCIVGIAYNAKIGGIRMLDGDVTDVVEAKSLGIRPNYIDIYSASWGPDDDGKTVDGPGRLAKQAFEYGIKKGRQGLGSIFVWASGNGGREGDYCSCDGYTNSIYTISVSSATENGYKPWYLEECASTLATTYSSGAFYERKIVTTDLRQRCTDGHTGTSVSAPMVAGIIALALEANSQLTWRDVQHLLVKTSRPAHLKASDWKVNGAGHKVSHFYGFGLVDAEALVVEAKKWTAVPSQHMCVAASDKRPRSIPLVQVLRTTALTSACAEHSDQRVVYLEHVVVRTSISHPRRGDLQIYLVSPSGTKSQLLAKRLLDLSNEGFTNWEFMTVHCWGEKAEGQWTLEIQDLPSQVRNPEKQGKLKEWSLILYGTAEHPYHTFSAHQSRSRMLELSAPELEPPKAALSPSQVEVPEDEEDYTAQSTPGSANILQTSVCHPECGDKGCDGPNADQCLNCVHFSLGSVKTSRKCVSVCPLGYFGDTAARRCRRCHKGCETCSSRAATQCLSCRRGFYHHQEMNTCVTLCPAGFYADESQKNCLKCHPSCKKCVDEPEKCTVCKEGFSLARGSCIPDCEPGTYFDSELIRCGECHHTCGTCVGPGREECIHCAKPEEMPGLPHKVCRRCDENCLSCAGSSRNCSRCKTGFTQLGTSCITNHTCSNADETFCEMVKSNRLCERKLFIQFCCRTCLLAG

SEQ ID NO: 909367 - protein, 856 aa, Homo sapiens
GNAPRPPPPPRLPPAAVLAAAVAAAAALPRRGAALKGGTPPPGALAARAPREPVAAMPPRAPPAPGPRPPPRAAAATDTAAGAGGAGGAGGAGGPGFRPLAPRPWRWLLLLALPAACSAPPPRPVYTNHWAVQVLGGPAEADRVAAAHGYLNLGQIGNLEDYYHFYHSKTFKRSTLSSRGPHTFLRMDPQVKWLQQQEVKRRVKRQVRSDPQALYFNDPIWSNMWYLHCGDKNSRCRSEMNVQAAWKRGYTGKNVVVTILDDGIERNHPDLAPNYDSYASYDVNGNDYDPSPRYDASNENKHGTRCAGEVAASANNSYCIVGIAYNAKIGGIRMLDGDVTDVVEAKSLGIRPNYIDIYSASWGPDDDGKTVDGPGRLAKQAFEYGIKKGRQGLGSIFVWASGNGGREGDYCSCDGYTNSIYTISVSSATENGYKPWYLEECASTLATTYSSGAFYERKIVTTDLRQRCTDGHTGTSVSAPMVAGIIALALEANSQLTWRDVQHLLVKTSRPAHLKASDWKVNGAGHKVSHFYGFGLVDAEALVVEAKKWTAVPSQHMCVAASDKRPSQSTPGSANILQTSVCHPECGDKGCDGPNADQCLNCVHFSLGSVKTSRKCVSVCPLGYFGDTAARRCRRCHKGCETCSSRAATQCLSCRRGFYHHQEMNTCVTLCPAGFYADESQKNCLKCHPSCKKCVDEPEKCTVCKEGFSLARGSCIPDCEPGTYFDSELIRCGECHHTCGTCVGPGREECIHCAKNFHFHDWKCVPACGEGFYPEEMPGLPHKVCRRCDENCLSCAGSSRNCSRCKTGFTQLGTSCITNHTCSNADETFCEMVKSNRLCERKLFIQFCCRTCLLAG

SEQ ID NO: 909368 - protein, 1025 aa, Homo sapiens; identical to SEQ ID NO: 909355

SEQ ID NO: 909369 - protein, 1023 aa, Homo sapiens
GNAPRPPPPPRLPPAAVLAAAVAAAAALPRRGAALKGGTPPPGALAARAPREPVAAMPPRAPPAPGPRPPPRAAAATDTAAGAGGAGGAGGAGGPGFRPLAPRPWRWLLLLALPAACSAPPPRPVYTNHWAVQVLGGPAEADRVAAAHGYLNLGQIGNLEDYYHFYHSKTFKRSTLSSRGPHTFLRMDPQVKWLQQQEVKRRVKRQVRSDPQALYFNDPIWSNMWYLHCGDKNSRCRSEMNVQAAWKRGYTGKNVVVTILDDGIERNHPDLAPNYDSYASYDVNGNDYDPSPRYDASNENKHGTRCAGEVAASANNSYCIVGIAYNAKIGGIRMLDGDVTDVVEAKSLGIRPNYIDIYSASWGPDDDGKTVDGPGRLAKQAFEYGIKKGRQGLGSIFVWASGNGGREGDYCSCDGYTNSIYTISVSSATENGYKPWYLEECASTLATTYSSGAFYERKIVTTDLRQRCTDGHTGTSVSAPMVAGIIALALEANSQLTWRDVQHLLVKTSRPAHLKASDWKVNGAGHKVSHFYGFGLVDAEALVVEAKKWTAVPSQHMCVAASDKRPRSIPLVQVLRTTALTSACAEHSDQRVVYLEHVVVRTSISHPRRGDLQIYLVSPSGTKSQLLAKRLLDLSNEGFTNWEFMTVHCWGEKAEGQWTLEIQDLPSQVRNPEKQGKLKEWSLILYGTAEHPYHTFSAHQSRSRMLELSAPELEPPKAALSPSQVEVPEDEEDYTAQSTPGSANILQTSVCHPECGDKGCDGPNADQCLNCVHFSLGSVKTSRKCVSVCPLGYFGDTAARRCRRCHKGCETCSSRAATQCLSCRRGFYHHQEMNTCVTLCPAGFYADESQKNCLKCHPSCKKCVDEPEKCTVCKEGFSLARGSCIPDCEPGTYFDSELIRCGECHHTCGTCVGPGREECIHCAKNFHFHDWKCVPACGEGFYPEEMPGLPHKVCRRCDENCLSCAGSSRNCSRCKTGFTQLGTSCITNHTCSNGDIWQRLETFWVVTTGRMYSHPVGGGQECC

SEQ ID NO: 909370 - protein, 778 aa, Homo sapiens
GNAPRPPPPPRLPPAAVLAAAVAAAAALPRRGAALKGGTPPPGALAARAPREPVAAMPPRAPPAPGPRPPPRAAAATDTAAGAGGAGGAGGAGGPGFRPLAPRPWRWLLLLALPAACSAPPPRPVYTNHWAVQVLGGPAEADRVAAAHGYLNLGQIGNLEDYYHFYHSKTFKRSTLSSRGPHTFLRMDPQVKWLQQQEVKRRVKRQVRSDPQALYFNDPIWSNMWYLHCGDKNSRCRSEMNVQAAWKRGYTGKNVVVTILDDGIERNHPDLAPNYDSYASYDVNGNDYDPSPRYDASNENKHGTRCAGEVAASANNSYCIVGIAYNAKIGGIRMLDGDVTDVVEAKSLGIRPNYIDIYSASWGPDDDGKTVDGPGRLAKQAFEYGIKKGRQGLGSIFVWASGNGGREGDYCSCDGYTNSIYTISVSSATENGYKPWYLEECASTLATTYSSGAFYERKIVTTDLRQRCTDGHTGTSVSAPMVAGIIALALEANSQLTWRDVQHLLVKTSRPAHLKASDWKVNGAGHKVSHFYGFGLVDAEALVVEAKKWTAVPSQHMCVAASDKRPRSIPLVQVLRTTALTSACAEHSDQRVVYLEHVVVRTSISHPRRGDLQIYLVSPSGTKSQLLAKRLLDLSNEGFTNWEFMTVHCWGEKAEGQWTLEIQDLPSQVRNPEKQGKLKEWSLILYGTAEHPYHTFSAHQSRSRMLELSAPELEPPKAALSPSQVEVPEDEEDYTAQSTPGSANILQTRDIWQRLETFWVVTTGRMYSHPVGGGQECC

SEQ ID NO: 909371 - protein, 1907 aa, Homo sapiens
MAPEPAPGRTMVPLVPALVMLGLVAGAHGDSKPVFIKVPEDQTGLSGGVASFVCQATGEPKPRITWMKKGKKVSSQRFEVIEFDDGAGSVLRIQPLRVQRDEAIYECTATNSLGEINTSAKLSVLEEEQLPPGFPSIDMGPQLKVVEKARTATMLCAAGGNPDPEISWFKDFLPVDPATSNGRIKQLRSGALQIESSEESDQGKYECVATNSAGTRYSAPANLYVRVRRVAPRFSIPPSSQEVMPGGSVNLTCVAVGAPMPYVKWMMGAEELTKEDEMPVGRNVLELSNVVRSANYTCVAISSLGMIEATAQVTVKALPKPPIDLVVTETTATSVTLTWDSGNSEPVTYYGIQYRAAGTEGPFQEVDGVATTRYSIGGLSPFSEYAFRVLAVNSIGRGPPSEAVRARTGEQAPSSPPRRVQARMLSASTMLVQWEPPEEPNGLVRGYRVYYTPDSRRPPNAWHKHNTDAGLLTTVGSLLPGITYSLRVLAFTAVGDGPPSPTIQVKTQQGVPAQPADFQAEVESDTRIQLSWLLPPQERIIMYELVYWAAEDEDQQHKVTFDPTSSYTLEDLKPDTLYRFQLAARSDMGVGVFTPTIEARTAQSTPSAPPQKVMCVSMGSTTVRVSWVPPPADSRNGVITQYSVAYEAVDGEDRGRHVVDGISREHSSWDLVGLEKWTEYRVWVRAHTDVGPGPESSPVLVRTDEDVPSGPPRKVEVEPLNSTAVHVYWKLPVPSKQHGQIRGYQVTYVRLENGEPRGLPIIQDVMLAEAQWRPEESEDYETTISGLTPETTYSVTVAAYTTKGDGARSKPKIVTTTGAVPGRPTMMISTTAMNTALLQWHPPKELPGELLGYRLQYCRADEARPNTIDFGKDDQHFTVTGLHKGTTYIFRLAAKNRAGLGEEFEKEIRTPEDLPSGFPQNLHVTGLTTSTTELAWDPPVLAERNGRIISYTVVFRDINSQQELQNITTDTRFTLTGLKPDTTYDIKVRAWTSKGSGPLSPSIQSRTMPVEQVFAKNFRVAAAMKTSVLLSWEVPDSYKSAVPFKILYNGQSVEVDGHSMRKLIADLQPNTEYSFVLMNRGSSAGGLQHLVSIRTAPDLLPHKPLPASAYIEDGRFDLSMPHVQDPSLVRWFYIVVVPIDRVGGSMLTPRWSTPEELELDELLEAIEQGGEEQRRRRRQAERLKPYVAAQLDVLPETFTLGDKKNYRGFYNRPLSPDLSYQCFVLASLKEPMDQKRYASSPYSDEIVVQVTPAQQQEEPEMLWVTGPVLAVILIILIVIAILLFKRKRTHSPSSKDEQSIGLKDSLLAHSSDPVEMRRLNYQTPGMRDHPPIPITDLADNIERLKANDGLKFSQEYESIDPGQQFTWENSNLEVNKPKNRYANVIAYDHSRVILTSIDGVPGSDYINANYIDGYRKQNAYIATQGPLPETMGDFWRMVWEQRTATVVMMTRLEEKSRVKCDQYWPARGTETCGLIQVTLLDTVELATYTVRTFALHKSGSSEKRELRQFQFMAWPDHGVPEYPTPILAFLRRVKACNPLDAGPMVVHCSAGVGRTGCFIVIDAMLERMKHEKTVDIYGHVTCMRSQRNYMVQTEDQYVFIHEALLEAATCGHTEVPARNLYAHIQKLGQVPPGESVTAMELEFKLLASSKAHTSRFISANLPCNKFKNRLVNIMPYELTRVCLQPIRGVEGSDYINASFLDGYRQQKAYIATQGPLAESTEDFWRMLWEHNSTIIVMLTKLREMGREKCHQYWPAERSARYQYFVVDPMAEYNMPQYILREFKVTDARDGQSRTIRQFQFTDWPEQGVPKTGEGFIDFIGQVHKTKEQFGQDGPITVHCSAGVGRTGVFITLSIVLERMRYEGVVDMFQTVKTLRTQRPAMVQTEDQYQLCYRAALEYLGSFDHYAT

SEQ ID NO: 909372 - protein, 122 aa, Homo sapiens
EPGVVLGCYPHGYFEAQKPSLCPPWARSLPGQALSRSESFTILSPFLSLSRGQWRPEESEDYVSNRCANADKTWVKLGSWDAPPLPPFLLACTAKIHRALATSGENWRLDTSTELSSDWHFL

SEQ ID NO: 909373 - protein, 101 aa, Homo sapiens
PDKPDSPEKYDRRDKQQAHAQAGVRGVCQVGALVTGCPFSISPPGSFVRERSMELELRVRLSERPVPVGLVGAPTSPTEDQYQLCYRAALEYLGSFDHYAT

SEQ ID NO: 909374 - protein, 1898 aa, Homo sapiens
MAPEPAPGRTMVPLVPALVMLGLVAGAHGDSKPVFIKVPEDQTGLSGGVASFVCQATGEPKPRITWMKKGKKVSSQRFEVIEFDDGAGSVLRIQPLRVQRDEAIYECTATNSLGEINTSAKLSVLEEEQLPPGFPSIDMGPQLKVVEKARTATMLCAAGGNPDPEISWFKDFLPVDPATSNGRIKQLRSGALQIESSEESDQGKYECVATNSAGTRYSAPANLYVRVRRVAPRFSIPPSSQEVMPGGSVNLTCVAVGAPMPYVKWMMGAEELTKEDEMPVGRNVLELSNVVRSANYTCVAISSLGMIEATAQVTVKALPKPPIDLVVTETTATSVTLTWDSGNSEPVTYYGIQYRAAGTEGPFQEVDGVATTRYSIGGLSPFSEYAFRVLAVNSIGRGPPSEAVRARTGEQAPSSPPRRVQARMLSASTMLVQWEPPEEPNGLVRGYRVYYTPDSRRPPNAWHKHNTDAGLLTTVGSLLPGITYSLRVLAFTAVGDGPPSPTIQVKTQQGVPAQPADFQAEVESDTRIQLSWLLPPQERIIMYELVYWAAEDEDQQHKVTFDPTSSYTLEDLKPDTLYRFQLAARSDMGVGVFTPTIEARTAQSTPSAPPQKVMCVSMGSTTVRVSWVPPPADSRNGVITQYSVAYEAVDGEDRGRHVVDGISREHSSWDLVGLEKWTEYRVWVRAHTDVGPGPESSPVLVRTDEDVPSGPPRKVEVEPLNSTAVHVYWKLPVPSKQHGQIRGYQVTYVRLENGEPRGLPIIQDVMLAEAQETTISGLTPETTYSVTVAAYTTKGDGARSKPKIVTTTGAVPGRPTMMISTTAMNTALLQWHPPKELPGELLGYRLQYCRADEARPNTIDFGKDDQHFTVTGLHKGTTYIFRLAAKNRAGLGEEFEKEIRTPEDLPSGFPQNLHVTGLTTSTTELAWDPPVLAERNGRIISYTVVFRDINSQQELQNITTDTRFTLTGLKPDTTYDIKVRAWTSKGSGPLSPSIQSRTMPVEQVFAKNFRVAAAMKTSVLLSWEVPDSYKSAVPFKILYNGQSVEVDGHSMRKLIADLQPNTEYSFVLMNRGSSAGGLQHLVSIRTAPDLLPHKPLPASAYIEDGRFDLSMPHVQDPSLVRWFYIVVVPIDRVGGSMLTPRWSTPEELELDELLEAIEQGGEEQRRRRRQAERLKPYVAAQLDVLPETFTLGDKKNYRGFYNRPLSPDLSYQCFVLASLKEPMDQKRYASSPYSDEIVVQVTPAQQQEEPEMLWVTGPVLAVILIILIVIAILLFKRKRTHSPSSKDEQSIGLKDSLLAHSSDPVEMRRLNYQTPGMRDHPPIPITDLADNIERLKANDGLKFSQEYESIDPGQQFTWENSNLEVNKPKNRYANVIAYDHSRVILTSIDGVPGSDYINANYIDGYRKQNAYIATQGPLPETMGDFWRMVWEQRTATVVMMTRLEEKSRVKCDQYWPARGTETCGLIQVTLLDTVELATYTVRTFALHKSGSSEKRELRQFQFMAWPDHGVPEYPTPILAFLRRVKACNPLDAGPMVVHCSAGVGRTGCFIVIDAMLERMKHEKTVDIYGHVTCMRSQRNYMVQTEDQYVFIHEALLEAATCGHTEVPARNLYAHIQKLGQVPPGESVTAMELEFKLLASSKAHTSRFISANLPCNKFKNRLVNIMPYELTRVCLQPIRGVEGSDYINASFLDGYRQQKAYIATQGPLAESTEDFWRMLWEHNSTIIVMLTKLREMGREKCHQYWPAERSARYQYFVVDPMAEYNMPQYILREFKVTDARDGQSRTIRQFQFTDWPEQGVPKTGEGFIDFIGQVHKTKEQFGQDGPITVHCSAGVGRTGVFITLSIVLERMRYEGVVDMFQTVKTLRTQRPAMVQTEDQYQLCYRAALEYLGSFDHYAT

SEQ ID NO: 909375 - protein, 1933 aa, Homo sapiens
MAPEPAPGRTMVPLVPALVMLGLVAGAHGDSKPVFIKVPEDQTGLSGGVASFVCQATGEPKPRITWMKKGKKVSSQRFEVIEFDDGAGSVLRIQPLRVQRDEAIYECTATNSLGEINTSAKLSVLEEEQLPPGFPSIDMGPQLKVVEKARTATMLCAAGGNPDPEISWFKDFLPVDPATSNGRIKQLRSGALQIESSEESDQGKYECVATNSAGTRYSAPANLYVRVRRVAPRFSIPPSSQEVMPGGSVNLTCVAVGAPMPYVKWMMGAEELTKEDEMPVGRNVLELSNVVRSANYTCVAISSLGMIEATAQVTVKALPKPPIDLVVTETTATSVTLTWDSGNSEPVTYYGIQYRAAGTEGPFQEVDGVATTRYSIGGLSPFSEYAFRVLAVNSIGRGPPSEAVRARTGEQAPSSPPRRVQARMLSASTMLVQWEPPEEPNGLVRGYRVYYTPDSRRPPNAWHKHNTDAGLLTTVGSLLPGITYSLRVLAFTAVGDGPPSPTIQVKTQQGVPAQPADFQAEVESDTRIQLSWLLPPQERIIMYELVYWAAEDEDQQHKVTFDPTSSYTLEDLKPDTLYRFQLAARSDMGVGVFTPTIEARTAQSTPSAPPQKVMCVSMGSTTVRVSWVPPPADSRNGVITQYSVAYEAVDGEDRGRHVVDGISREHSSWDLVGLEKWTEYRVWVRAHTDVGPGPESSPVLVRTDEDVPSGPPRKVEVEPLNSTAVHVYWKLPVPSKQHGQIRGYQVTYVRLENGEPRGLPIIQDVMLAEAQWRPEESEDYETTISGLTPETTYSVTVAAYTTKGDGARSKPKIVTTTGAGELRGQDGPEGGAAGGQRQSPARGPSVPGRPTMMISTTAMNTALLQWHPPKELPGELLGYRLQYCRADEARPNTIDFGKDDQHFTVTGLHKGTTYIFRLAAKNRAGLGEEFEKEIRTPEDLPSGFPQNLHVTGLTTSTTELAWDPPVLAERNGRIISYTVVFRDINSQQELQNITTDTRFTLTGLKPDTTYDIKVRAWTSKGSGPLSPSIQSRTMPVEQVFAKNFRVAAAMKTSVLLSWEVPDSYKSAVPFKILYNGQSVEVDGHSMRKLIADLQPNTEYSFVLMNRGSSAGGLQHLVSIRTAPDLLPHKPLPASAYIEDGRFDLSMPHVQDPSLVRWFYIVVVPIDRVGGSMLTPRWSTPEELELDELLEAIEQGGEEQRRRRRQAERLKPYVAAQLDVLPETFTLGDKKNYRGFYNRPLSPDLSYQCFVLASLKEPMDQKRYASSPYSDEIVVQVTPAQQQEEPEMLWVTGPVLAVILIILIVIAILLFKRKRTHSPSSKDEQSIGLKDSLLAHSSDPVEMRRLNYQTPGMRDHPPIPITDLADNIERLKANDGLKFSQEYESIDPGQQFTWENSNLEVNKPKNRYANVIAYDHSRVILTSIDGVPGSDYINANYIDGYRKQNAYIATQGPLPETMGDFWRMVWEQRTATVVMMTRLEEKSRVKCDQYWPARGTETCGLIQVTLLDTVELATYTVRTFALHKSGSSEKRELRQFQFMAWPDHGVPEYPTPILAFLRRVKACNPLDAGPMVVHCSAGVGRTGCFIVIDAMLERMKHEKTVDIYGHVTCMRSQRNYMVQTEDQYVFIHEALLEAATCGHTEVPARNLYAHIQKLGQVPPGESVTAMELEFKLLASSKAHTSRFISANLPCNKFKNRLVNIMPYELTRVCLQPIRGVEGSDYINASFLDGYRQQKAYIATQGPLAESTEDFWRMLWEHNSTIIVMLTKLREMGREKCHQYWPAERSARYQYFVVDPMAEYNMPQYILREFKVTDARDGQSRTIRQFQFTDWPEQGVPKTGEGFIDFIGQVHKTKEQFGQDGPITVHCSAGVGRTGVFITLSIVLERMRYEGVVDMFQTVKTLRTQRPAMVQTEDQYQLCYRAALEYLGSFDHYAT

SEQ ID NO: 909376 - protein, 1758 aa, Homo sapiens
MGAWLQDLSLSKSSCSRQSLSVGATSRLEVGGVGVDDELGSGGATPPVSEHGFGSDQRGFLNEGPLPFHAVVCPARPVSASLPPPAVRRVAPRFSIPPSSQEVMPGGSVNLTCVAVGAPMPYVKWMMGAEELTKEDEMPVGRNVLELSNVVRSANYTCVAISSLGMIEATAQVTVKALPKPPIDLVVTETTATSVTLTWDSGNSEPVTYYGIQYRAAGTEGPFQEVDGVATTRYSIGGLSPFSEYAFRVLAVNSIGRGPPSEAVRARTGEQAPSSPPRRVQARMLSASTMLVQWEPPEEPNGLVRGYRVYYTPDSRRPPNAWHKHNTDAGLLTTVGSLLPGITYSLRVLAFTAVGDGPPSPTIQVKTQQGVPAQPADFQAEVESDTRIQLSWLLPPQERIIMYELVYWAAEDEDQQHKVTFDPTSSYTLEDLKPDTLYRFQLAARSDMGVGVFTPTIEARTAQSTPSAPPQKVMCVSMGSTTVRVSWVPPPADSRNGVITQYSVAYEAVDGEDRGRHVVDGISREHSSWDLVGLEKWTEYRVWVRAHTDVGPGPESSPVLVRTDEDVPSGPPRKVEVEPLNSTAVHVYWKLPVPSKQHGQIRGYQVTYVRLENGEPRGLPIIQDVMLAEAQETTISGLTPETTYSVTVAAYTTKGDGARSKPKIVTTTGAVPGRPTMMISTTAMNTALLQWHPPKELPGELLGYRLQYCRADEARPNTIDFGKDDQHFTVTGLHKGTTYIFRLAAKNRAGLGEEFEKEIRTPEDLPSGFPQNLHVTGLTTSTTELAWDPPVLAERNGRIISYTVVFRDINSQQELQNITTDTRFTLTGLKPDTTYDIKVRAWTSKGSGPLSPSIQSRTMPVEQVFAKNFRVAAAMKTSVLLSWEVPDSYKSAVPFKILYNGQSVEVDGHSMRKLIADLQPNTEYSFVLMNRGSSAGGLQHLVSIRTAPDLLPHKPLPASAYIEDGRFDLSMPHVQDPSLVRWFYIVVVPIDRVGGSMLTPRWSTPEELELDELLEAIEQGGEEQRRRRRQAERLKPYVAAQLDVLPETFTLGDKKNYRGFYNRPLSPDLSYQCFVLASLKEPMDQKRYASSPYSDEIVVQVTPAQQQEEPEMLWVTGPVLAVILIILIVIAILLFKRKRTHSPSSKDEQSIGLKDSLLAHSSDPVEMRRLNYQTPGMRDHPPIPITDLADNIERLKANDGLKFSQEYESIDPGQQFTWENSNLEVNKPKNRYANVIAYDHSRVILTSIDGVPGSDYINANYIDGYRKQNAYIATQGPLPETMGDFWRMVWEQRTATVVMMTRLEEKSRVKCDQYWPARGTETCGLIQVTLLDTVELATYTVRTFALHKSGSSEKRELRQFQFMAWPDHGVPEYPTPILAFLRRVKACNPLDAGPMVVHCSAGVGRTGCFIVIDAMLERMKHEKTVDIYGHVTCMRSQRNYMVQTEDQYVFIHEALLEAATCGHTEVPARNLYAHIQKLGQVPPGESVTAMELEFKLLASSKAHTSRFISANLPCNKFKNRLVNIMPYELTRVCLQPIRGVEGSDYINASFLDGYRQQKAYIATQGPLAESTEDFWRMLWEHNSTIIVMLTKLREMGREKCHQYWPAERSARYQYFVVDPMAEYNMPQYILREFKVTDARDGQSRTIRQFQFTDWPEQGVPKTGEGFIDFIGQVHKTKEQFGQDGPITVHCSAGVGRTGVFITLSIVLERMRYEGVVDMFQTVKTLRTQRPAMVQTEDQYQLCYRAALEYLGSFDHYAT

SEQ ID NO: 909377 - protein, 1305 aa, Homo sapiens
RERRERWRRQRRRLQLRLRLGLGLRLRLRLRVSWVPPPADSRNGVITQYSVAYEAVDGEDRGRHVVDGISREHSSWDLVGLEKWTEYRVWVRAHTDVGPGPESSPVLVRTDEDVPSGPPRKVEVEPLNSTAVHVYWKLPVPSKQHGQIRGYQVTYVRLENGEPRGLPIIQDVMLAEAQETTISGLTPETTYSVTVAAYTTKGDGARSKPKIVTTTGAVPGRPTMMISTTAMNTALLQWHPPKELPGELLGYRLQYCRADEARPNTIDFGKDDQHFTVTGLHKGTTYIFRLAAKNRAGLGEEFEKEIRTPEDLPSGFPQNLHVTGLTTSTTELAWDPPVLAERNGRIISYTVVFRDINSQQELQNITTDTRFTLTGLKPDTTYDIKVRAWTSKGSGPLSPSIQSRTMPVEQVFAKNFRVAAAMKTSVLLSWEVPDSYKSAVPFKILYNGQSVEVDGHSMRKLIADLQPNTEYSFVLMNRGSSAGGLQHLVSIRTAPDLLPHKPLPASAYIEDGRFDLSMPHVQDPSLVRWFYIVVVPIDRVGGSMLTPRWSTPEELELDELLEAIEQGGEEQRRRRRQAERLKPYVAAQLDVLPETFTLGDKKNYRGFYNRPLSPDLSYQCFVLASLKEPMDQKRYASSPYSDEIVVQVTPAQQQEEPEMLWVTGPVLAVILIILIVIAILLFKRKRTHSPSSKDEQSIGLKDSLLAHSSDPVEMRRLNYQTPGMRDHPPIPITDLADNIERLKANDGLKFSQEYESIDPGQQFTWENSNLEVNKPKNRYANVIAYDHSRVILTSIDGVPGSDYINANYIDGYRKQNAYIATQGPLPETMGDFWRMVWEQRTATVVMMTRLEEKSRVKCDQYWPARGTETCGLIQVTLLDTVELATYTVRTFALHKSGSSEKRELRQFQFMAWPDHGVPEYPTPILAFLRRVKACNPLDAGPMVVHCSAGVGRTGCFIVIDAMLERMKHEKTVDIYGHVTCMRSQRNYMVQTEDQYVFIHEALLEAATCGHTEVPARNLYAHIQKLGQVPPGESVTAMELEFKLLASSKAHTSRFISANLPCNKFKNRLVNIMPYELTRVCLQPIRGVEGSDYINASFLDGYRQQKAYIATQGPLAESTEDFWRMLWEHNSTIIVMLTKLREMGREKCHQYWPAERSARYQYFVVDPMAEYNMPQYILREFKVTDARDGQSRTIRQFQFTDWPEQGVPKTGEGFIDFIGQVHKTKEQFGQDGPITVHCSAGVGRTGVFITLSIVLERMRYEGVVDMFQTVKTLRTQRPAMVQTEDQYQLCYRAALEYLGSFDHYAT

SEQ ID NO: 909378 - protein, 768 aa, Homo sapiens
RLILMDPYRRYGGATEELELDELLEAIEQGGEEQRRRRRQAERLKPYVAAQLDVLPETFTLGDKKNYRGFYNRPLSPDLSYQCFVLASLKEPMDQKRYASSPYSDEIVVQVTPAQQQEEPEMLWVTGPVLAVILIILIVIAILLFKRKRTHSPSSKDEQSIGLKDSLLAHSSDPVEMRRLNYQTPGMRDHPPIPITDLADNIERLKANDGLKFSQEYESIDPGQQFTWENSNLEVNKPKNRYANVIAYDHSRVILTSIDGVPGSDYINANYIDGYRKQNAYIATQGPLPETMGDFWRMVWEQRTATVVMMTRLEEKSRVKCDQYWPARGTETCGLIQVTLLDTVELATYTVRTFALHKSGSSEKRELRQFQFMAWPDHGVPEYPTPILAFLRRVKACNPLDAGPMVVHCSAGVGRTGCFIVIDAMLERMKHEKTVDIYGHVTCMRSQRNYMVQTEDQYVFIHEALLEAATCGHTEVPARNLYAHIQKLGQVPPGESVTAMELEFKLLASSKAHTSRFISANLPCNKFKNRLVNIMPYELTRVCLQPIRGVEGSDYINASFLDGYRQQKAYIATQGPLAESTEDFWRMLWEHNSTIIVMLTKLREMGREKCHQYWPAERSARYQYFVVDPMAEYNMPQYILREFKVTDARDGQSRTIRQFQFTDWPEQGVPKTGEGFIDFIGQVHKTKEQFGQDGPITVHCSAGVGRTGVFITLSIVLERMRYEGVVDMFQTVKTLRTQRPAMVQTEDQYQLCYRAALEYLGSFDHYAT

SEQ ID NO: 909379 - protein, 638 aa, Homo sapiens
PPPSLSLHVLLSPCHQFQVLHGHTCSHVHIHALGLSLPHCSSLTLMLPVYALPPLGMRDHPPIPITDLADNIERLKANDGLKFSQEYESIDPGQQFTWENSNLEVNKPKNRYANVIAYDHSRVILTSIDGVPGSDYINANYIDGYRKQNAYIATQGPLPETMGDFWRMVWEQRTATVVMMTRLEEKSRVKCDQYWPARGTETCGLIQVTLLDTVELATYTVRTFALHKSGSSEKRELRQFQFMAWPDHGVPEYPTPILAFLRRVKACNPLDAGPMVVHCSAGVGRTGCFIVIDAMLERMKHEKTVDIYGHVTCMRSQRNYMVQTEDQYVFIHEALLEAATCGHTEVPARNLYAHIQKLGQVPPGESVTAMELEFKLLASSKAHTSRFISANLPCNKFKNRLVNIMPYELTRVCLQPIRGVEGSDYINASFLDGYRQQKAYIATQGPLAESTEDFWRMLWEHNSTIIVMLTKLREMGREKCHQYWPAERSARYQYFVVDPMAEYNMPQYILREFKVTDARDGQSRTIRQFQFTDWPEQGVPKTGEGFIDFIGQVHKTKEQFGQDGPITVHCSAGVGRTGVFITLSIVLERMRYEGVVDMFQTVKTLRTQRPAMVQTEDQYQLCYRAALEYLGSFDHYAT

SEQ ID NO: 909380 - protein, 1898 aa, Homo sapiens; identical to SEQ ID NO: 909374

SEQ ID NO: 909381 - protein, 1898 aa, Homo sapiens; identical to SEQ ID NO: 909374

SEQ ID NO: 909382 - protein, 1898 aa, Homo sapiens; identical to SEQ ID NO: 909374

SEQ ID NO: 909383 - protein, 1898 aa, Homo sapiens; identical to SEQ ID NO: 909374

SEQ ID NO: 909384 - protein, 1866 aa, Homo sapiens
MAPEPAPGRTMVPLVPALVMLGLVAGAHGDSKPVFIKVPEDQTGLSGGVASFVCQATGEPKPRITWMKKGKKVSSQRFEVIEFDDGAGSVLRIQPLRVQRDEAIYECTATNSLGEINTSAKLSVLEEEQLPPGFPSIDMGPQLKVVEKARTATMLCAAGGNPDPEISWFKDFLPVDPATSNGRIKQLRSGALQIESSEESDQGKYECVATNSAGTRYSAPANLYVRVRRVAPRFSIPPSSQEVMPGGSVNLTCVAVGAPMPYVKWMMGAEELTKEDEMPVGRNVLELSNVVRSANYTCVAISSLGMIEATAQVTVKALPKPPIDLVVTETTATSVTLTWDSGNSEPVTYYGIQYRAAGTEGPFQEVDGVATTRYSIGGLSPFSEYAFRVLAVNSIGRGPPSEAVRARTGEQAPSSPPRRVQARMLSASTMLVQWEPPEEPNGLVRGYRVYYTPDSRRPPNAWHKHNTDAGLLTTVGSLLPGITYSLRVLAFTAVGDGPPSPTIQVKTQQGVPAQPADFQAEVESDTRIQLSWLLPPQERIIMYELVYWAAEDEDQQHKVTFDPTSSYTLEDLKPDTLYRFQLAARSDMGVGVFTPTIEARTAQSTPSAPPQKVMCVSMGSTTVRVSWVPPPADSRNGVITQYSVAYEAVDGEDRGRHVVDGISREHSSWDLVGLEKWTEYRVWVRAHTDVGPGPESSPVLVRTDEDVPSGPPRKVEVEPLNSTAVHVYWKLPVPSKQHGQIRGYQVTYVRLENGEPRGLPIIQDVMLAEAQETTISGLTPETTYSVTVAAYTTKGDGARSKPKIVTTTGAVPGRPTMMISTTAMNTALLQWHPPKELPGELLGYRLQYCRADEARPNTIDFGKDDQHFTVTGLHKGTTYIFRLAAKNRAGLGEEFEKEIRTPEDLPSGFPQNLHVTGLTTSTTELAWDPPVLAERNGRIISYTVVFRDINSQQELQNITTDTRFTLTGLKPDTTYDIKVRAWTSKGSGPLSPSIQSRTMPVEQVFAKNFRVAAAMKTSVLLSWEVPDSYKSAVPFKILYNGQSVEVDGHSMRKLIADLQPNTEYSFVLMNRGSSAGGLQHLVSIRTAPDLLPHKPLPASAYIEDGRFDLSMPHVQDPSLVRWFYIVVVPIDRVGGSMLTPRWSTPEELELDELLEAIEQGGEEQRRRRRQAERLKPYVAAQLDVLPETFTLGDKKNYRGFYNRPLSPDLSYQCFVLASLKEPMDQKRYASSPYSDEIVVQVTPAQQQEEPEMLWVTGPVLAVILIILIVIAILLFKRKRTHSPSSKDEQSIGLKDSLLAHSSDPVEMRRLNYQTPGMRDHPPIPITDLADNIERLKANDGLKFSQEYESIDPGQQFTWENSNLEVNKPKNRYANVIAYDHSRVILTSIDGVPGSDYINANYIDGYRKQNAYIATQGPLPETMGDFWRMVWEQRTATVVMMTRLEEKSRVKCDQYWPARGTETCGLIQVTLLDTVELATYTVRTFALHKSGSSEKRELRQFQFMAWPDHGVPEYPTPILAFLRRVKACNPLDAGPMVVHCSAGVGRTGCFIVIDAMLERMKHEKTVDIYGHVTCMRSQRNYMVQTEDQYVFIHEALLEAATCGHTEVPARNLYAHIQKLGQVPPGESVTAMELEFKLLASSKAHTSRFISANLPCNKFKNRLVNIMPYELTRVCLQPIRGVEGSDYINASFLDGYRQQKAYIATQGPLAESTEDFWRMLWEHNSTIIVMLTKLREMGREKCHQYWPAERSARYQYFVVDPMAEYNMPQYILREFKVTDARDGQSRTIRQFQFTDWPEQGVPKTGEGFIDFIGQVHKTKEQFGQDGPITVHCSAGVGRTGVFITLSIVLERMRYEGVAGLSGPGQWAW

SEQ ID NO: 909385 - protein, 1898 aa, Homo sapiens; identical to SEQ ID NO: 909374

SEQ ID NO: 909386 - protein, 128 aa, Homo sapiens
ITIVFAKVMRNALPGSPRHICGSGLWMLNTHWDRRPAFLITIVFAKVKTKTKNHKNKKQKKQKTQEKKKESALGFCFKPSRGEATPCAWGSRGSCWLTWAHRAWLWSPALQYGVVFVGCGVWLCGQGE

SEQ ID NO: 909387 - protein, 1790 aa, Homo sapiens
MAPEPAPGRTMVPLVPALVMLGLVAGAHGDSKPVFIKVPEDQTGLSGGVASFVCQATGEPKPRITWMKKGKKVSSQRFEVIEFDDGAGSVLRIQPLRVQRDEAIYECTATNSLGEINTSAKLSVLEEEQLPPGFPSIDMGPQLKVVEKARTATMLCAAGGNPDPEISWFKDFLPVDPATSNGRIKQLRSGALQIESSEESDQGKYECVATNSAGTRYSAPANLYVRVRRVAPRFSIPPSSQEVMPGGSVNLTCVAVGAPMPYVKWMMGAEELTKEDEMPVGRNVLELSNVVRSANYTCVAISSLGMIEATAQVTVKALPKPPIDLVVTETTATSVTLTWDSGNSEPVTYYGIQYRAAGTEGPFQEVDGVATTRYSIGGLSPFSEYAFRVLAVNSIGRGPPSEAVRARTGEQAPSSPPRRVQARMLSASTMLVQWEPPEEPNGLVRGYRVYYTPDSRRPPNAWHKHNTDAGLLTTVGSLLPGITYSLRVLAFTAVGDGPPSPTIQVKTQQGVPAQPADFQAEVESDTRIQLSWLLPPQERIIMYELVYWAAEDEDQQHKVTFDPTSSYTLEDLKPDTLYRFQLAARSDMGVGVFTPTIEARTAQSTPSAPPQKVMCVSMGSTTVRVSWVPPPADSRNGVITQYSVAYEAVDGEDRGRHVVDGISREHSSWDLVGLEKWTEYRVWVRAHTDVGPGPESSPVLVRTDEDVPSGPPRKVEVEPLNSTAVHVYWKLPVPSKQHGQIRGYQVTYVRLENGEPRGLPIIQDVMLAEAQETTISGLTPETTYSVTVAAYTTKGDGARSKPKIVTTTGAVPGRPTMMISTTAMNTALLQWHPPKELPGELLGYRLQYCRADEARPNTIDFGKDDQHFTVTGLHKGTTYIFRLAAKNRAGLGEEFEKEIRTPEDLPSGFPQNLHVTGLTTSTTELAWDPPVLAERNGRIISYTVVFRDINSQQELQNITTDTRFTLTGLKPDTTYDIKVRAWTSKGSGPLSPSIQSRTMPVEQVFAKNFRVAAAMKTSVLLSWEVPDSYKSAVPFKILYNGQSVEVDGHSMRKLIADLQPNTEYSFVLMNRGSSAGGLQHLVSIRTAPDLLPHKPLPASAYIEDGRFDLSMPHVQDPSLVRWFYIVVVPIDRVGGSMLTPRWSTPEELELDELLEAIEQGGEEQRRRRRQAERLKPYVAAQLDVLPETFTLGDKKNYRGFYNRPLSPDLSYQCFVLASLKEPMDQKRYASSPYSDEIVVQVTPAQQQEEPEMLWVTGPVLAVILIILIVIAILLFKRKRTHSPSSKDEQSIGLKDSLLAHSSDPVEMRRLNYQTPGMRDHPPIPITDLADNIERLKANDGLKFSQEYESIDPGQQFTWENSNLEVNKPKNRYANVIAYDHSRVILTSIDGVPGSDYINANYIDGYRKQNAYIATQGPLPETMGDFWRMVWEQRTATVVMMTRLEEKSRVKCDQYWPARGTETCGLIQVTLLDTVELATYTVRTFALHKSGSSEKRELRQFQFMAWPDHGVPEYPTPILAFLRRVKACNPLDAGPMVVHCSAGVGRTGCFIVIDAMLERMKHEKTVDIYGHVTCMRSQRNYMVQTEDQYVFIHEALLEAATCGHTEVPARNLYAHIQKLGQVPPGESVTAMELEFKLLASSKAHTSRFISANLPCNKFKNRLVNIMPYELTRVCLQPIRGVEGSDYINASFLDGYRQQKAYIATQGPLAESTEDFWRMLWEHNSTIIVMLTKLREMGRKMPRTGRERSVVRTCRCRGGHLAVSGGSPIRWRRKRVRHMAAGCHGGRSAGPG

SEQ ID NO: 909388 - protein, 1335 aa, Homo sapiens
MAPEPAPGRTMVPLVPALVMLGLVAGAHGDSKPVFIKVPEDQTGLSGGVASFVCQATGEPKPRITWMKKGKKVSSQRFEVIEFDDGAGSVLRIQPLRVQRDEAIYECTATNSLGEINTSAKLSVLEEEQLPPGFPSIDMGPQLKVVEKARTATMLCAAGGNPDPEISWFKDFLPVDPATSNGRIKQLRSGALQIESSEESDQGKYECVATNSAGTRYSAPANLYVRVRRVAPRFSIPPSSQEVMPGGSVNLTCVAVGAPMPYVKWMMGAEELTKEDEMPVGRNVLELSNVVRSANYTCVAISSLGMIEATAQVTVKALPKPPIDLVVTETTATSVTLTWDSGNSEPVTYYGIQYRAAGTEGPFQEVDGVATTRYSIGGLSPFSEYAFRVLAVNSIGRGPPSEAVRARTGEQAPSSPPRRVQARMLSASTMLVQWEPPEEPNGLVRGYRVYYTPDSRRPPNAWHKHNTDAGLLTTVGSLLPGITYSLRVLAFTAVGDGPPSPTIQVKTQQGVPAQPADFQAEVESDTRIQLSWLLPPQERIIMYELVYWAAEDEDQQHKVTFDPTSSYTLEDLKPDTLYRFQLAARSDMGVGVFTPTIEARTAQSTPSAPPQKVMCVSMGSTTVRVSWVPPPADSRNGVITQYSVAYEAVDGEDRGRHVVDGISREHSSWDLVGLEKWTEYRVWVRAHTDVGPGPESSPVLVRTDEDVPSGPPRKVEVEPLNSTAVHVYWKLPVPSKQHGQIRGYQVTYVRLENGEPRGLPIIQDVMLAEAQETTISGLTPETTYSVTVAAYTTKGDGARSKPKIVTTTGAVPGRPTMMISTTAMNTALLQWHPPKELPGELLGYRLQYCRADEARPNTIDFGKDDQHFTVTGLHKGTTYIFRLAAKNRAGLGEEFEKEIRTPEDLPSGFPQNLHVTGLTTSTTELAWDPPVLAERNGRIISYTVVFRDINSQQELQNITTDTRFTLTGLKPDTTYDIKVRAWTSKGSGPLSPSIQSRTMPVEQVFAKNFRVAAAMKTSVLLSWEVPDSYKSAVPFKILYNGQSVEVDGHSMRKLIADLQPNTEYSFVLMNRGSSAGGLQHLVSIRTAPDLLPHKPLPASAYIEDGRFDLSMPHVQDPSLVRWFYIVVVPIDRVGGSMLTPRWSTPEELELDELLEAIEQGGEEQRRRRRQAERLKPYVAAQLDVLPETFTLGDKKNYRGFYNRPLSPDLSYQCFVLASLKEPMDQKRYASSPYSDEIVVQVTPAQQQEEPEMLWVTGPVLAVILIILIVIAILLFKRKRTHSPSSKDEQSIGLKDSLLAHSSDPVEMRRLNYQTPVRETTHNPPIRYPMGNLRVT

SEQ ID NO: 909389 - protein, 1049 aa, Homo sapiens
MAPEPAPGRTMVPLVPALVMLGLVAGAHGDSKPVFIKVPEDQTGLSGGVASFVCQATGEPKPRITWMKKGKKVSSQRFEVIEFDDGAGSVLRIQPLRVQRDEAIYECTATNSLGEINTSAKLSVLEEEQLPPGFPSIDMGPQLKVVEKARTATMLCAAGGNPDPEISWFKDFLPVDPATSNGRIKQLRSGALQIESSEESDQGKYECVATNSAGTRYSAPANLYVRVRRVAPRFSIPPSSQEVMPGGSVNLTCVAVGAPMPYVKWMMGAEELTKEDEMPVGRNVLELSNVVRSANYTCVAISSLGMIEATAQVTVKALPKPPIDLVVTETTATSVTLTWDSGNSEPVTYYGIQYRAAGTEGPFQEVDGVATTRYSIGGLSPFSEYAFRVLAVNSIGRGPPSEAVRARTGEQAPSSPPRRVQARMLSASTMLVQWEPPEEPNGLVRGYRVYYTPDSRRPPNAWHKHNTDAGLLTTVGSLLPGITYSLRVLAFTAVGDGPPSPTIQVKTQQGVPAQPADFQAEVESDTRIQLSWLLPPQERIIMYELVYWAAEDEDQQHKVTFDPTSSYTLEDLKPDTLYRFQLAARSDMGVGVFTPTIEARTAQSTPSAPPQKVMCVSMGSTTVRVSWVPPPADSRNGVITQYSVAYEAVDGEDRGRHVVDGISREHSSWDLVGLEKWTEYRVWVRAHTDVGPGPESSPVLVRTDEDVPSGPPRKVEVEPLNSTAVHVYWKLPVPSKQHGQIRGYQVTYVRLENGEPRGLPIIQDVMLAEAQWRPEESEDYETTISGLTPETTYSVTVAAYTTKGDGARSKPKIVTTTGAVPGRPTMMISTTAMNTALLQWHPPKELPGELLGYRLQYCRADEARPNTIDFGKDDQHFTVTGLHKGTTYIFRLAAKNRAGLGEEFEKEIRTPEDLPSGFPQNLHVTGLTTSTTELAWDPPVLAERNGRIISYTVVFRDINSQQELQNITTDTRFTLTGLKPDTTYDIKVRAWTSKGSGPLSPSIQSRTMPVEQGVCCGHGIPSRVWLHLGVSALLEPLTSGDCDPPASGV

SEQ ID NO: 909390 - protein, 840 aa, Homo sapiens
MAPEPAPGRTMVPLVPALVMLGLVAGAHGDSKPVFIKVPEDQTGLSGGVASFVCQATGEPKPRITWMKKGKKVSSQRFEVIEFDDGAGSVLRIQPLRVQRDEAIYECTATNSLGEINTSAKLSVLEEEQLPPGFPSIDMGPQLKVVEKARTATMLCAAGGNPDPEISWFKDFLPVDPATSNGRIKQLRSGALQIESSEESDQGKYECVATNSAGTRYSAPANLYVRVRRVAPRFSIPPSSQEVMPGGSVNLTCVAVGAPMPYVKWMMGAEELTKEDEMPVGRNVLELSNVVRSANYTCVAISSLGMIEATAQVTVKALPKPPIDLVVTETTATSVTLTWDSGNSEPVTYYGIQYRAAGTEGPFQEVDGVATTRYSIGGLSPFSEYAFRVLAVNSIGRGPPSEAVRARTGEQAPSSPPRRVQARMLSASTMLVQWEPPEEPNGLVRGYRVYYTPDSRRPPNAWHKHNTDAGLLTTVGSLLPGITYSLRVLAFTAVGDGPPSPTIQVKTQQGVPAQPADFQAEVESDTRIQLSWLLPPQERIIMYELVYWAAEDEDQQHKVTFDPTSSYTLEDLKPDTLYRFQLAARSDMGVGVFTPTIEARTAQSTPSAPPQKVMCVSMGSTTVRVSWVPPPADSRNGVITQYSVAYEAVDGEDRGRHVVDGISREHSSWDLVGLEKWTEYRVWVRAHTDVGPGPESSPVLVRTDEDVPSGPPRKVEVEPLNSTAVHVYWKLPVPSKQHGQIRGYQVTYVRLENGEPRGLPIIQDVMLAEAQWRPEESEDYVSNRCANADKTWVKLGSWDAPPLPPFLLACTAKIHRALATSGENWRLDTSTELSSDWHFL

SEQ ID NO: 909391 - protein, 570 aa, Homo sapiens
  misc_feature (563)..(563): Xaa can be any naturally occurring amino acid
MAPEPAPGRTMVPLVPALVMLGLVAGAHGDSKPVFIKVPEDQTGLSGGVASFVCQATGEPKPRITWMKKGKKVSSQRFEVIEFDDGAGSVLRIQPLRVQRDEAIYECTATNSLGEINTSAKLSVLEEEQLPPGFPSIDMGPQLKVVEKARTATMLCAAGGNPDPEISWFKDFLPVDPATSNGRIKQLRSGALQIESSEESDQGKYECVATNSAGTRYSAPANLYVRVRRVAPRFSIPPSSQEVMPGGSVNLTCVAVGAPMPYVKWMMGAEELTKEDEMPVGRNVLELSNVVRSANYTCVAISSLGMIEATAQVTVKALPKPPIDLVVTETTATSVTLTWDSGNSEPVTYYGIQYRAAGTEGPFQEVDGVATTRYSIGGLSPFSEYAFRVLAVNSIGRGPPSEAVRARTGEQAPSSPPRRVQARMLSASTMLVQWEPPEEPNGLVRGYRVYYTPDSRRPPNAWHKHNTDAGLLTTVGSLLPGITYSLRVLAFTAVGDGPPSPTIQVKTQQGVPAQPADFQAEVESDTRIQLSWLLPPQERIIMYELVYWAAEDEDQQHKVKSTXLQGFPCL

SEQ ID NO: 909392 - protein, 199 aa, Homo sapiens [sequence omitted]

SEQ ID NO: 909393 - protein, 117 aa, Homo sapiens
PPPSLSLHVLLSPCHQFQVLHGHTCSHVHIHALGLSLPHCSSLTLMLPVYALPPLGMRDHPPIPITDLADNIERLKANDGLKFSQEYEVRCSRPLPCAWPRPTQTSSCPVLGPSCGG

SEQ ID NO: 909394 - protein, 81 aa, Homo sapiens
MLAVGDASPDICGEMKCLHLSLPGGRPQVYHTTYLPLLLATLMGLSTSSFYLKCYSSQHPADTAQTSPLAHTPTGLGVSSW

SEQ ID NO: 909395 - protein, 1898 aa, Homo sapiens; identical to SEQ ID NO: 909374

SEQ ID NO: 909396 - protein, 1753 aa, Homo sapiens
IQGHEWQNPLEEIFLAVSKGKGVPFPLVGNPMHTSNGRIKQLRSGALQIESSEESDQGKYECVATNSAGTRYSAPANLYVRVRRVAPRFSIPPSSQEVMPGGSVNLTCVAVGAPMPYVKWMMGAEELTKEDEMPVGRNVLELSNVVRSANYTCVAISSLGMIEATAQVTVKALPKPPIDLVVTETTATSVTLTWDSGNSEPVTYYGIQYRAAGTEGPFQEVDGVATTRYSIGGLSPFSEYAFRVLAVNSIGRGPPSEAVRARTGEQAPSSPPRRVQARMLSASTMLVQWEPPEEPNGLVRGYRVYYTPDSRRPPNAWHKHNTDAGLLTTVGSLLPGITYSLRVLAFTAVGDGPPSPTIQVKTQQGVPAQPADFQAEVESDTRIQLSWLLPPQERIIMYELVYWAAEDEDQQHKVTFDPTSSYTLEDLKPDTLYRFQLAARSDMGVGVFTPTIEARTAQSTPSAPPQKVMCVSMGSTTVRVSWVPPPADSRNGVITQYSVAYEAVDGEDRGRHVVDGISREHSSWDLVGLEKWTEYRVWVRAHTDVGPGPESSPVLVRTDEDVPSGPPRKVEVEPLNSTAVHVYWKLPVPSKQHGQIRGYQVTYVRLENGEPRGLPIIQDVMLAEAQETTISGLTPETTYSVTVAAYTTKGDGARSKPKIVTTTGAVPGRPTMMISTTAMNTALLQWHPPKELPGELLGYRLQYCRADEARPNTIDFGKDDQHFTVTGLHKGTTYIFRLAAKNRAGLGEEFEKEIRTPEDLPSGFPQNLHVTGLTTSTTELAWDPPVLAERNGRIISYTVVFRDINSQQELQNITTDTRFTLTGLKPDTTYDIKVRAWTSKGSGPLSPSIQSRTMPVEQVFAKNFRVAAAMKTSVLLSWEVPDSYKSAVPFKILYNGQSVEVDGHSMRKLIADLQPNTEYSFVLMNRGSSAGGLQHLVSIRTAPDLLPHKPLPASAYIEDGRFDLSMPHVQDPSLVRWFYIVVVPIDRVGGSMLTPRWSTPEELELDELLEAIEQGGEEQRRRRRQAERLKPYVAAQLDVLPETFTLGDKKNYRGFYNRPLSPDLSYQCFVLASLKEPMDQKRYASSPYSDEIVVQVTPAQQQEEPEMLWVTGPVLAVILIILIVIAILLFKRKRTHSPSSKDEQSIGLKDSLLAHSSDPVEMRRLNYQTPGMRDHPPIPITDLADNIERLKANDGLKFSQEYESIDPGQQFTWENSNLEVNKPKNRYANVIAYDHSRVILTSIDGVPGSDYINANYIDGYRKQNAYIATQGPLPETMGDFWRMVWEQRTATVVMMTRLEEKSRVKCDQYWPARGTETCGLIQVTLLDTVELATYTVRTFALHKSGSSEKRELRQFQFMAWPDHGVPEYPTPILAFLRRVKACNPLDAGPMVVHCSAGVGRTGCFIVIDAMLERMKHEKTVDIYGHVTCMRSQRNYMVQTEDQYVFIHEALLEAATCGHTEVPARNLYAHIQKLGQVPPGESVTAMELEFKLLASSKAHTSRFISANLPCNKFKNRLVNIMPYELTRVCLQPIRGVEGSDYINASFLDGYRQQKAYIATQGPLAESTEDFWRMLWEHNSTIIVMLTKLREMGREKCHQYWPAERSARYQYFVVDPMAEYNMPQYILREFKVTDARDGQSRTIRQFQFTDWPEQGVPKTGEGFIDFIGQVHKTKEQFGQDGPITVHCSAGVGRTGVFITLSIVLERMRYEGVVDMFQTVKTLRTQRPAMVQTEDQYQLCYRAALEYLGSFDHYAT

SEQ ID NO: 909397 - protein, 1082 aa, Homo sapiens [sequence omitted]

SEQ ID NO: 909398 - protein, 1898 aa, Homo sapiens; identical to SEQ ID NO: 909374

SEQ ID NO: 909399 - protein, 1898 aa, Homo sapiens; identical to SEQ ID NO: 909374

SEQ ID NO: 909400 - protein, 1898 aa, Homo sapiens; identical to SEQ ID NO: 909374

SEQ ID NO: 909401 - protein, 1910 aa, Homo sapiens
MAPEPAPGRTMVPLVPALVMLGLVAGAHGDSKPVFIKVPEDQTGLSGGVASFVCQATGEPKPRITWMKKGKKVSSQRFEVIEFDDGAGSVLRIQPLRVQRDEAIYECTATNSLGEINTSAKLSVLEEEQLPPGFPSIDMGPQLKVVEKARTATMLCAAGGNPDPEISWFKDFLPVDPATSNGRIKQLRSGALQIESSEESDQGKYECVATNSAGTRYSAPANLYVRVRRVAPRFSIPPSSQEVMPGGSVNLTCVAVGAPMPYVKWMMGAEELTKEDEMPVGRNVLELSNVVRSANYTCVAISSLGMIEATAQVTVKALPKPPIDLVVTETTATSVTLTWDSGNSEPVTYYGIQYRAAGTEGPFQEVDGVATTRYSIGGLSPFSEYAFRVLAVNSIGRGPPSEAVRARTGEQAPSSPPRRVQARMLSASTMLVQWEPPEEPNGLVRGYRVYYTPDSRRPPNAWHKHNTDAGLLTTVGSLLPGITYSLRVLAFTAVGDGPPSPTIQVKTQQGVPAQPADFQAEVESDTRIQLSWLLPPQERIIMYELVYWAAEDEDQQHKVTFDPTSSYTLEDLKPDTLYRFQLAARSDMGVGVFTPTIEARTAQSTPSAPPQKVMCVSMGSTTVRVSWVPPPADSRNGVITQYSVAYEAVDGEDRGRHVVDGISREHSSWDLVGLEKWTEYRVWVRAHTDVGPGPESSPVLVRTDEDVPSGPPRKVEVEPLNSTAVHVYWKLPVPSKQHGQIRGYQVTYVRLENGEPRGLPIIQDVMLAEAQETTISGLTPETTYSVTVAAYTTKGDGARSKPKIVTTTGAVPGRPTMMISTTAMNTALLQWHPPKELPGELLGYRLQYCRADEARPNTIDFGKDDQHFTVTGLHKGTTYIFRLAAKNRAGLGEEFEKEIRTPEDLPSGFPQNLHVTGLTTSTTELAWDPPVLAERNGRIISYTVVFRDINSQQELQNITTDTRFTLTGLKPDTTYDIKVRAWTSKGSGPLSPSIQSRTMPVEQVFAKNFRVAAAMKTSVLLSWEVPDSYKSAVPFKILYNGQSVEVDGHSMRKLIADLQPNTEYSFVLMNRGSSAGGLQHLVSIRTAPDLLPHKPLPASAYIEDGRFDLSMPHVQDPSLVRWFYIVVVPIDRVGGSMLTPRWSTPEELELDELLEAIEQGGEEQRRRRRQAERLKPYVAAQLDVLPETFTLGDKKNYRGFYNRPLSPDLSYQCFVLASLKEPMDQKRYASSPYSDEIVVQVTPAQQQEEPEMLWVTGPVLAVILIILIVIAILLFKRKRTHSPSSKDEQSIGLKDSLLAHSSDPVEMRRLNYQTPGMRDHPPIPITDLADNIERLKANDGLKFSQEYESIDPGQQFTWENSNLEVNKPKNRYANVIAYDHSRVILTSIDGVPGSDYINANYIDGYRKQNAYIATQGPLPETMGDFWRMVWEQRTATVVMMTRLEEKSRVKCDQYWPARGTETCGLIQVTLLDTVELATYTVRTFALHKSGSSEKRELRQFQFMAWPDHGVPEYPTPILAFLRRVKACNPLDAGPMVVHCSAGVGRTGCFIVIDAMLERMKHEKTVDIYGHVTCMRSQRNYMVQTEDQYVFIHEALLEAATCGHTEVPARNLYAHIQKLGQVPPGESVTAMELEFKLLASSKAHTSRFISANLPCNKFKNRLVNIMPYELTRVCLQPIRGVEGSDYINASFLDGYRQQKAYIATQGPLAESTEDFWRMLWEHNSTIIVMLTKLREMGREKCHQYWPAERSARYQYFVVDPMAEYNMPQYILREFKVTDARDGQSRTIRQFQFTDWPEQGVPKTGEGFIDFIGQVHKTKEQFGQDGPITVHCSAGVGRTGVFITLSIVLERMRYEGVVDMFQTVKTLRTQRPAMVQTEDQYQLCYRAALEYLPSIAVWCGVCRLWGLAVWPR

SEQ ID NO: 909402 - protein, 1577 aa, Homo sapiens
MAPEPAPGRTMVPLVPALVMLGLVAGAHGDSKPVFIKVPEDQTGLSGGVASFVCQATGEPKPRITWMKKGKKVSSQRFEVIEFDDGAGSVLRIQPLRVQRDEAIYECTATNSLGEINTSAKLSVLEEEQLPPGFPSIDMGPQLKVVEKARTATMLCAAGGNPDPEISWFKDFLPVDPATSNGRIKQLRSGALQIESSEESDQGKYECVATNSAGTRYSAPANLYVRVRRVAPRFSIPPSSQEVMPGGSVNLTCVAVGAPMPYVKWMMGAEELTKEDEMPVGRNVLELSNVVRSANYTCVAISSLGMIEATAQVTVKALPKPPIDLVVTETTATSVTLTWDSGNSEPVTYYGIQYRAAGTEGPFQEVDGVATTRYSIGGLSPFSEYAFRVLAVNSIGRGPPSEAVRARTGEQAPSSPPRRVQARMLSASTMLVQWEPPEEPNGLVRGYRVYYTPDSRRPPNAWHKHNTDAGLLTTVGSLLPGITYSLRVLAFTAVGDGPPSPTIQVKTQQGVPAQPADFQAEVESDTRIQLSWLLPPQERIIMYELVYWAAEDEDQQHKVTFDPTSSYTLEDLKPDTLYRFQLAARSDMGVGVFTPTIEARTAQSTPSAPPQKVMCVSMGSTTVRVSWVPPPADSRNGVITQYSVAYEAVDGEDRGRHVVDGISREHSSWDLVGLEKWTEYRVWVRAHTDVGPGPESSPVLVRTDEDVPSGPPRKVEVEPLNSTAVHVYWKLPVPSKQHGQIRGYQVTYVRLENGEPRGLPIIQDVMLAEAQETTISGLTPETTYSVTVAAYTTKGDGARSKPKIVTTTGAVPGRPTMMISTTAMNTALLQWHPPKELPGELLGYRLQYCRADEARPNTIDFGKDDQHFTVTGLHKGTTYIFRLAAKNRAGLGEEFEKEIRTPEDLPSGFPQNLHVTGLTTSTTELAWDPPVLAERNGRIISYTVVFRDINSQQELQNITTDTRFTLTGLKPDTTYDIKVRAWTSKGSGPLSPSIQSRTMPVEQVFAKNFRVAAAMKTSVLLSWEVPDSYKSAVPFKILYNGQSVEVDGHSMRKLIADLQPNTEYSFVLMNRGSSAGGLQHLVSIRTAPDLLPHKPLPASAYIEDGRFDLSMPHVQDPSLVRWFYIVVVPIDRVGGSMLTPRWSTPEELELDELLEAIEQGGEEQRRRRRQAERLKPYVAAQLDVLPETFTLGDKKNYRGFYNRPLSPDLSYQCFVLASLKEPMDQKRYASSPYSDEIVVQVTPAQQQEEPEMLWVTGPVLAVILIILIVIAILLFKRKRTHSPSSKDEQSIGLKDSLLAHSSDPVEMRRLNYQTPGMRDHPPIPITDLADNIERLKANDGLKFSQEYESIDPGQQFTWENSNLEVNKPKNRYANVIAYDHSRVILTSIDGVPGSDYINANYIDGYRKQNAYIATQGPLPETMGDFWRMVWEQRTATVVMMTRLEEKSRVKCDQYWPARGTETCGLIQVTLLDTVELATYTVRTFALHKSGSSEKRELRQFQFMAWPDHGVPEYPTPILAFLRRVKACNPLDAGPMVVHCSAGVGRTGCFIVIDAMLERMKHEKIGNTHPWSSIPVCV

SEQ ID NO: 909403 - protein, 1638 aa, Homo sapiens
MAPEPAPGRTMVPLVPALVMLGLVAGAHGDSKPVFIKVPEDQTGLSGGVASFVCQATGEPKPRITWMKKGKKVSSQRFEVIEFDDGAGSVLRIQPLRVQRDEAIYECTATNSLGEINTSAKLSVLEEEQLPPGFPSIDMGPQLKVVEKARTATMLCAAGGNPDPEISWFKDFLPVDPATSNGRIKQLRSGALQIESSEESDQGKYECVATNSAGTRYSAPANLYVRVRRVAPRFSIPPSSQEVMPGGSVNLTCVAVGAPMPYVKWMMGAEELTKEDEMPVGRNVLELSNVVRSANYTCVAISSLGMIEATAQVTVKALPKPPIDLVVTETTATSVTLTWDSGNSEPVTYYGIQYRAAGTEGPFQEVDGVATTRYSIGGLSPFSEYAFRVLAVNSIGRGPPSEAVRARTGEQAPSSPPRRVQARMLSASTMLVQWEPPEEPNGLVRGYRVYYTPDSRRPPNAWHKHNTDAGLLTTVGSLLPGITYSLRVLAFTAVGDGPPSPTIQVKTQQGVPAQPADFQAEVESDTRIQLSWLLPPQERIIMYELVYWAAEDEDQQHKVTFDPTSSYTLEDLKPDTLYRFQLAARSDMGVGVFTPTIEARTAQSTPSAPPQKVMCVSMGSTTVRVSWVPPPADSRNGVITQYSVAYEAVDGEDRGRHVVDGISREHSSWDLVGLEKWTEYRVWVRAHTDVGPGPESSPVLVRTDEDVPSGPPRKVEVEPLNSTAVHVYWKLPVPSKQHGQIRGYQVTYVRLENGEPRGLPIIQDVMLAEAQETTISGLTPETTYSVTVAAYTTKGDGARSKPKIVTTTGAVPGRPTMMISTTAMNTALLQWHPPKELPGELLGYRLQYCRADEARPNTIDFGKDDQHFTVTGLHKGTTYIFRLAAKNRAGLGEEFEKEIRTPEDLPSGFPQNLHVTGLTTSTTELAWDPPVLAERNGRIISYTVVFRDINSQQELQNITTDTRFTLTGLKPDTTYDIKVRAWTSKGSGPLSPSIQSRTMPVEQVFAKNFRVAAAMKTSVLLSWEVPDSYKSAVPFKILYNGQSVEVDGHSMRKLIADLQPNTEYSFVLMNRGSSAGGLQHLVSIRTAPDLLPHKPLPASAYIEDGRFDLSMPHVQDPSLVRWFYIVVVPIDRVGGSMLTPRWSTPEELELDELLEAIEQGGEEQRRRRRQAERLKPYVAAQLDVLPETFTLGDKKNYRGFYNRPLSPDLSYQCFVLASLKEPMDQKRYASSPYSDEIVVQVTPAQQQEEPEMLWVTGPVLAVILIILIVIAILLFKRKRTHSPSSKDEQSIGLKDSLLAHSSDPVEMRRLNYQTPGMRDHPPIPITDLADNIERLKANDGLKFSQEYESIDPGQQFTWENSNLEVNKPKNRYANVIAYDHSRVILTSIDGVPGSDYINANYIDGYRKQNAYIATQGPLPETMGDFWRMVWEQRTATVVMMTRLEEKSRVKCDQYWPARGTETCGLIQVTLLDTVELATYTVRTFALHKSGSSEKRELRQFQFMAWPDHGVPEYPTPILAFLRRVKACNPLDAGPMVVHCSAGVGRTGCFIVIDAMLERMKHEKTVDIYGHVTCMRSQRNYMVQTEDQYVFIHEALLEAATCGHTEVPALQQVQEPAGEHHALRIDPCVSAAHPWCGGL

SEQ ID NO: 909404 - protein, 1362 aa, Homo sapiens
MAPEPAPGRTMVPLVPALVMLGLVAGAHGDSKPVFIKVPEDQTGLSGGVASFVCQATGEPKPRITWMKKGKKVSSQRFEVIEFDDGAGSVLRIQPLRVQRDEAIYECTATNSLGEINTSAKLSVLEEEQLPPGFPSIDMGPQLKVVEKARTATMLCAAGGNPDPEISWFKDFLPVDPATSNGRIKQLRSGALQIESSEESDQGKYECVATNSAGTRYSAPANLYVRVRRVAPRFSIPPSSQEVMPGGSVNLTCVAVGAPMPYVKWMMGAEELTKEDEMPVGRNVLELSNVVRSANYTCVAISSLGMIEATAQVTVKALPKPPIDLVVTETTATSVTLTWDSGNSEPVTYYGIQYRAAGTEGPFQEVDGVATTRYSIGGLSPFSEYAFRVLAVNSIGRGPPSEAVRARTGEQAPSSPPRRVQARMLSASTMLVQWEPPEEPNGLVRGYRVYYTPDSRRPPNAWHKHNTDAGLLTTVGSLLPGITYSLRVLAFTAVGDGPPSPTIQVKTQQGVPAQPADFQAEVESDTRIQLSWLLPPQERIIMYELVYWAAEDEDQQHKVTFDPTSSYTLEDLKPDTLYRFQLAARSDMGVGVFTPTIEARTAQSTPSAPPQKVMCVSMGSTTVRVSWVPPPADSRNGVITQYSVAYEAVDGEDRGRHVVDGISREHSSWDLVGLEKWTEYRVWVRAHTDVGPGPESSPVLVRTDEDVPSGPPRKVEVEPLNSTAVHVYWKLPVPSKQHGQIRGYQVTYVRLENGEPRGLPIIQDVMLAEAQETTISGLTPETTYSVTVAAYTTKGDGARSKPKIVTTTGAVPGRPTMMISTTAMNTALLQWHPPKELPGELLGYRLQYCRADEARPNTIDFGKDDQHFTVTGLHKGTTYIFRLAAKNRAGLGEEFEKEIRTPEDLPSGFPQNLHVTGLTTSTTELAWDPPVLAERNGRIISYTVVFRDINSQQELQNITTDTRFTLTGLKPDTTYDIKVRAWTSKGSGPLSPSIQSRTMPVEQVFAKNFRVAAAMKTSVLLSWEVPDSYKSAVPFKILYNGQSVEVDGHSMRKLIADLQPNTEYSFVLMNRGSSAGGLQHLVSIRTAPDLLPHKPLPASAYIEDGRFDLSMPHVQDPSLVRWFYIVVVPIDRVGGSMLTPRWSTPEELELDELLEAIEQGGEEQRRRRRQAERLKPYVAAQLDVLPETFTLGDKKNYRGFYNRPLSPDLSYQCFVLASLKEPMDQKRYASSPYSDEIVVQVTPAQQQEEPEMLWVTGPVLAVILIILIVIAILLFKRKRTHSPSSKDEQSIGLKDSLLAHSSDPVEMRRLNYQTPGMRDHPPIPITDLADNIERLKANDGLKFSQEYESIDLTASPLERYDS

SEQ ID NO: 909405 - protein, 464 aa, Homo sapiens
MAPEPAPGRTMVPLVPALVMLGLVAGAHGDSKPVFIKVPEDQTGLSGGVASFVCQATGEPKPRITWMKKGKKVSSQRFEVIEFDDGAGSVLRIQPLRVQRDEAIYECTATNSLGEINTSAKLSVLEEEQLPPGFPSIDMGPQLKVVEKARTATMLCAAGGNPDPEISWFKDFLPVDPATSNGRIKQLRSGALQIESSEESDQGKYECVATNSAGTRYSAPANLYVRGKDSGSAWPLSPQSCAAPAGLSAQSPWCRHARDCHGPSLFSFLLLSAAAATAPTGQVPGVCHYFAFLPCRPMGKQPLLGAFVSFVGLAAWARSPMGIWSHPIRLLGVCACVCAHTGTLICVKCMHTWPGFPSVHPPACRSMVGSRTTMALGFGVVRPQERTRPGEPILWPGLPGAFLEEPLCSAVSPCGYVASGEHLVCSRCSLLGASGQCAFWKSKFPAERNLGTVLGFPISAMLTA

SEQ ID NO: 909406 - protein, 1049 aa, Homo sapiens; identical to SEQ ID NO: 909389

SEQ ID NO: 909407 - protein, 592 aa, Homo sapiens
AEFQQSASCRRLRGGGGPGTPGRGGALLASLLPPCRTPPDPPAGPRRCTRPLLSPPGKLSAPPRPSPVIRRGSSPATPPQGLLPTSRPAAPATAGSRNMSTTLLSAFYDVDFLCKTEKSLANLNLNNMLDKKAVGTPVAAAPSSGFAPGFLRRHSASNLHALAHPAPSPGSCSPKFPGAANGSSCGSAAAGGPTSYGTLKEPSGGGGTALLNKENKFRDRSFSENGDRSQHLLHLQQQQKGGGGSQINSTRYKTELCRPFEESGTCKYGEKCQFAHGFHELRSLTRHPKYKTELCRTFHTIGFCPYGPRCHFIHNADERRPAPSGGASGDLRAFGTRDALHLGFPREPRPKLHHSLSFSGFPSGHHQPPGGLESPLLLDSPTSRTPPPPSCSSASSCSSSASSCSSASAASTPSGAPTCCASAAAAAAAALLYGTGGAEDLLAPGAPCAACSSASCANNAFAFGPELSSLITPLAIQTHNFAAVAAAAYYRSQQQQQQQGLAPPAQPPAPPSATLPAGAAAPPSPPFSFQLPRRLSDSPVFDAPPSPPDSLSDRDSYLSGSLSSGSLSGSESPSLDPGRRLPIFSRLSISDD

SEQ ID NO: 909408 - protein, 593 aa, Homo sapiens
SGVPAVRELPSAPRGGRAGHPGARRSAPRFSPSPLPHSAGPSRRPAPLHSPSPLVRAGPKGVAVSASVDREKEAAERLAHKAIGAGLGARAACAVGSRNMSTTLLSAFYDVDFLCKTEKSLANLNLNNMLDKKAVGTPVAAAPSSGFAPGFLRRHSASNLHALAHPAPSPGSCSPKFPGAANGSSCGSAAAGGPTSYGTLKEPSGGGGTALLNKENKFRDRSFSENGDRSQHLLHLQQQQKGGGGSQINSTRYKTELCRPFEESGTCKYGEKCQFAHGFHELRSLTRHPKYKTELCRTFHTIGFCPYGPRCHFIHNADERRPAPSGGASGDLRAFGTRDALHLGFPREPRPKLHHSLSFSGFPSGHHQPPGGLESPLLLDSPTSRTPPPPSCSSASSCSSSASSCSSASAASTPSGAPTCCASAAAAAAAALLYGTGGAEDLLAPGAPCAACSSASCANNAFAFGPELSSLITPLAIQTHNFAAVAAAAYYRSQQQQQQQGLAPPAQPPAPPSATLPAGAAAPPSPPFSFQLPRRLSDSPVFDAPPSPPDSLSDRDSYLSGSLSSGSLSGSESPSLDPGRRLPIFSRLSISDD

SEQ ID NO: 909409 - protein, 592 aa, Homo sapiens; identical to SEQ ID NO: 909407

SEQ ID NO: 909410 - protein, 592 aa, Homo sapiens; identical to SEQ ID NO: 909407

SEQ ID NO: 909411 - protein, 592 aa, Homo sapiens; identical to SEQ ID NO: 909407

SEQ ID NO: 909412 - protein, 592 aa, Homo sapiens; identical to SEQ ID NO: 909407

SEQ ID NO: 909413 - protein, 579 aa, Homo sapiens
AEFQQSASCRRLRGGGGPGTPGRGGALLASLLPPCRTPPDPPAGPRRCTRPLLSPPGKLSAPPRPSPVIRRGSSPATPPQGLLPTSRPAAPATAGSRNMSTTLLSAFYDVDFLCKTEKSLANLNLNNMLDKKAVGTPVAAAPSSGFAPGFLRRHSASNLHALAHPAPSPGSCSPKFPGAANGSSCGSAAAGGPTSYGTLKEPSGGGGTALLNKENKFRDRSFSENGDRSQHLLHLQQQQKGGGGSQINSTRYKTELCRPFEESGTCKYGEKCQFAHGFHELRSLTRHPKYKTELCRTFHTIGFCPYGPRCHFIHNADERRPAPSGGASGDLRAFGTRDALHLGFPREPRPKLHHSLSFSGFPSGHHQPPGGLESPLLLDSPTSRTPPPPSCSSASSCSSSASSCSSASAASTPSGAPTCCASAAAAAAAALLYGTGGAEDLLAPGAPCAACSSASCANNAFAFGPELSSLITPLAIQTHNFAAVAAAAYYRSQQQQQQQGLAPPAQPPAPPSATLPAGAAAPPSPPFSFQLPRRLSDSPVFDAPPSPPLSSGSLSGSESPSLDPGRRLPIFSRLSISDD

SEQ ID NO: 909414 - protein, 542 aa, Homo sapiens
AEFQQSASCRRLRGGGGPGTPGRGGALLASLLPPCRTPPDPPAGPRRCTRPLLSPPGKLSAPPRPSPVIRRGSSPATPPQGLLPTSRPAAPATAGSRNMSTTLLSAFYDVDFLCKTEKSLANLNLNNMLDKKAVGTPVAAAPSSGFAPGFLRRHSASNLHALAHPAPSPGSCSPKFPGAANGSSCGSAAAGGPTSYGTLKEPSGGGGTALLNKENKFRDRSFSENGDRSQHLLHLQQQQKGGGGSQINSTRYKTELCRPFEESGTCKYGEKCQFAHGFHELRSLTRHPKYKTELCRTFHTIGFCPYGPRCHFIHNADERRPAPSGGASGDLRAFGTRDALHLGFPREPRPKLHHSLSFSGFPSGHHQPPGGLESPLLLDSPTSRTPPPPSCSSASSCSSSASSCSSASAASTPSGAPTCCASAAAAAAAALLYGTGGAEDLLAPGAPCAACSSASCANNAFAFGPELSSLITPTTAVSSSSSSRAWRPPRSRRRRPARPSPPGPPHLPRRPSASSCRAACPTRPCSTRPPAPRTRCRTATAT

SEQ ID NO: 909415 - protein, 528 aa, Homo sapiens
AEFQQSASCRRLRGGGGPGTPGRGGALLASLLPPCRTPPDPPAGPRRCTRPLLSPPGKLSAPPRPSPVIRRGSSPATPPQGLLPTSRPAAPATAGSRNMSTTLLSAFYDVDFLCKTEKSLANLNLNNMLDKKAVGTPVAAAPSSGFAPGFLRRHSASNLHALAHPAPSPGSCSPKFPGAANGSSCGSAAAGGPTSYGTLKEPSGGGGTALLNKENKFRDRSFSENGDRSQHLLHLQQQQKGGGGSQINSTRYKTELCRPFEESGTCKYGEKCQFAHGFHELRSLTRHPKYKTELCRTFHTIGFCPYGPRCHFIHNADERRPAPSGGASGDLRAFGTRDALHLGFPREPRPKLHHSLSFSGFPSGHHQPPGGLESPLLLDSPTSRTPPPPSCSSASSCSSSASSCSSASAASTPSGAPTCCASAAAAAAAALLYGTGGAEDLLAPGAPCAACSSASCANNAFAFGPELSSLITPLAIQTHNFAAVAAAASAAPPVRLARVRRAPQPPGLAVGPRQLPKRLPELRQPQRL

SEQ ID NO: 909416 - protein, 493 aa, Homo sapiens
AEFQQSASCRRLRGGGGPGTPGRGGALLASLLPPCRTPPDPPAGPRRCTRPLLSPPGKLSAPPRPSPVIRRGSSPATPPQGLLPTSRPAAPATAGSRNMSTTLLSAFYDVDFLCKTEKSLANLNLNNMLDKKAVGTPVAAAPSSGFAPGFLRRHSASNLHALAHPAPSPGSCSPKFPGAANGSSCGSAAAGGPTSYGTLKEPSGGGGTALLNKENKFRDRSFSENGDRSQHLLHLQQQQKGGGGSQINSTRYKTELCRPFEESGTCKYGEKCQFAHGFHELRSLTRHPKYKTELCRTFHTIGFCPYGPRCHFIHNADERRPAPSGGASGDLRAFGTRDALHLGFPREPRPKLHHSLSFSGFPSGHHQPPGGLESPLLLDSPTSRTPPPPSCSSASSCSSSASSCSSASAASTPSGAPTCCASAAAAAAAALLYGTGGAEDLLAPGAPCAACSSASCANNAFALSSGSLSGSESPSLDPGRRLPIFSRLSISDD

SEQ ID NO: 909417 - protein, 482 aa, Homo sapiens
AEFQQSASCRRLRGGGGPGTPGRGGALLASLLPPCRTPPDPPAGPRRCTRPLLSPPGKLSAPPRPSPVIRRGSSPATPPQGLLPTSRPAAPATAGSRNMSTTLLSAFYDVDFLCKTEKSLANLNLNNMLDKKAVGTPVAAAPSSGFAPGFLRRHSASNLHALAHPAPSPGSCSPKFPGAANGSSCGSAAAGGPTSYGTLKEPSGGGGTALLNKENKFRDRSFSENGDRSQHLLHLQQQQKGGGGSQINSTRYKTELCRPFEESGTCKYGEKCQFAHGFHELRSLTRHPKYKTELCRTFHTIGFCPYGPRCHFIHNADERRPAPSGGASGDLRAFGTRDALHLGFPREPRPKLHHSLSFSGFPSGHHQPPGGLESPLLLDSPTSRTPPPPSCSSASSCSSSALPQSAAAAAAGPGAPRAAAGAAQRDPPRRGRRTSLAALQLPAAAPPVRLARVRRAPQPPGLAVGPRQLPKRLPELRQPQRL

SEQ ID NO: 909418 - protein, 592 aa, Homo sapiens; identical to SEQ ID NO: 909407

SEQ ID NO: 909419 - protein, 129 aa, Homo sapiens
AEFQQSASCRRLRGGGGPGTPGRGGALLASLLPPCRTPPDPPAGPRRCTRPLLSPPGKLSAPPRPSPVIRRGSSPATPPQGLLPTSRPAAPATAGSRNMSTTLLSAFYDVDFLCKTEKSLANLNLNNLP

SEQ ID NO: 909420 - protein, 152 aa, Homo sapiens
MSTTLLSAFYDVDFLCKVGQGAGPAGSSRCSSWTLPLSPGSGGRPSRPAFQVGKVPGFAKECPSALEAGRAARRAPVSRLSFSTADRGHAARGFPDRLRAAHLGSRGGGSRVETQRGPRWASSPLPLRPARSCWFCACIGGGWRPSRDPPRV

SEQ ID NO: 909421 - protein, 494 aa, Homo sapiens
MSTTLLSAFYDVDFLCKTEKSLANLNLNNMLDKKAVGTPVAAAPSSGFAPGFLRRHSASNLHALAHPAPSPGSCSPKFPGAANGSSCGSAAAGGPTSYGTLKEPSGGGGTALLNKENKFRDRSFSENGDRSQHLLHLQQQQKGGGGSQINSTRYKTELCRPFEESGTCKYGEKCQFAHGFHELRSLTRHPKYKTELCRTFHTIGFCPYGPRCHFIHNADERRPAPSGGASGDLRAFGTRDALHLGFPREPRPKLHHSLSFSGFPSGHHQPPGGLESPLLLDSPTSRTPPPPSCSSASSCSSSASSCSSASAASTPSGAPTCCASAAAAAAAALLYGTGGAEDLLAPGAPCAACSSASCANNAFAFGPELSSLITPLAIQTHNFAAVAAAAYYRSQQQQQQQGLAPPAQPPAPPSATLPAGAAAPPSPPFSFQLPRRLSDSPVFDAPPSPPDSLSDRDSYLSGSLSSGSLSGSESPSLDPGRRLPIFSRLSISDD

SEQ ID NO: 909422 - protein, 592 aa, Homo sapiens; identical to SEQ ID NO: 909407

SEQ ID NO: 909423 - protein, 531 aa, Homo sapiens
AEFQQSASCRRLRGGGGPGTPGRGGALLASLLPPCRTPPDPPAGPRRCTRPLLSPPGKLSAPPRPSPVIRRGSSPATPPQGLLPTSRPAAPATAGSRNMSTTLLSAFYDVDFLCKTEKSLANLNLNNMLDKKAVGTPVAAAPSSGFAPGFLRRHSASNLHALAHPAPSPGSCSPKFPGAANGSSCGSAAAGGPTSYGTLKEPSGGGGTALLNKENKFRDRSFSENGDRSQHLLHLQQQQKGGGGSQINSTRYKTELCRPFEESGTCKYGEKCLWHARCVAPGLPAGAAAQAAPQPQLLGLPVGPPSAPGRPRVAAAARQPHVAHAAAALLLFGLVLLLLRLLLFLGLRGLHALGRPDMLRLRGGRAAAALLYGTGGAEDLLAPGAPCAACSSASCANNAFAFGPELSSLITPLAIQTHNFAAVAAAAYYRSQQQQQQQGLAPPAQPPAPPSATLPAGAAAPPSPPFSFQLPRRLSDSPVFDAPPSPPDSLSDRDSYLSGSLSSGSLSGSESPSLDPGRRLPIFSRLSISDD

SEQ ID NO: 909424 - protein, 592 aa, Homo sapiens; identical to SEQ ID NO: 909407

SEQ ID NO: 909425 - protein, 592 aa, Homo sapiens; identical to SEQ ID NO: 909407

SEQ ID NO: 909426 - protein, 566 aa, Homo sapiens
AEFQQSASCRRLRGGGGPGTPGRGGALLASLLPPCRTPPDPPAGPRRCTRPLLSPPGKLSAPPRPSPVIRRGSSPATPPQGLLPTSRPAAPATAGSRNMSTTLLSAFYDVDFLCKTEKSLANLNLNNMLDKKAVGTPVAAAPSSGFAPGFLRRHSASNLHALAHPAPSPGSCSPKFPGAANGSSCGSAAAGGPTSYGTLKEPSGGGGTALLNKENKFRDRSFSENGDRSQHLLHLQQQQKGGGGSQINSTRYKTELCRPFEESGTCKYGEKCQFAHGFHELRSLTRHPKYKTELCRTFHTIGFCPYGPRCHFIHNADERRPAPSGGASGDLRAFGTRDALHLGFPREPRPKLHHSLSFSGFPSGHHQPPGGLESPLLLDSPTSRTPPPPSCSSASSCSSSASSCSSASAASTPSGAPTCCASAAAAAAAALLYGTGGAEDLLAPGAPCAACSSASCANNAFAFGPELSSLITPLAIQTHNFAAVAAAAYYRSQQQQQQQGLAPPAQPPAPPSATLPAGAAAPPSPPFSFQLPRRLSDSPVFDAPPSPPLDPGRRLPIFSRLSISDD

SEQ ID NO: 909427 - protein, 522 aa, Homo sapiens
AEFQQSASCRRLRGGGGPGTPGRGGALLASLLPPCRTPPDPPAGPRRCTRPLLSPPGKLSAPPRPSPVIRRGSSPATPPQGLLPTSRPAAPATAGSRNMSTTLLSAFYDVDFLCKTEKSLANLNLNNMLDKKAVGTPVAAAPSSGFAPGFLRRHSASNLHALAHPAPSPGSCSPKFPGAANGSSCGSAAAGGPTSYGTLKEPSGGGGTALLNKENKFRDRSFSENGDRSQHLLHLQQQQKGGGGSQINSTRYKTELCRPFEESGTCKYGEKCQFAHGFHELRSLTRHPKYKTELCRTFHTIGFCPYGPRCHFIHNADERRPAPSGGASGDLRAFGTRDALHLGFPREPRPKLHHSLSFSGFPSGHHQPPGGLESPLLLDSPTSRTPPPPSCSSASSCSSSASSCSSASAASTPSGAPTCCASAAAAAAAALLYGTGGAEDLLAPGAPCAACSSASCANNAFAFGPELSSLITPLAIQTHNFAAVAAAAYYRSQQQQQQQGLAPPAQPPAPPSATLPAGAAAP

SEQ ID NO: 909428 - protein, 502 aa, Homo sapiens
AEFQQSASCRRLRGGGGPGTPGRGGALLASLLPPCRTPPDPPAGPRRCTRPLLSPPGKLSAPPRPSPVIRRGSSPATPPQGLLPTSRPAAPATAGSRNMSTTLLSAFYDVDFLCKTEKSLANLNLNNMLDKKAVGTPVAAAPSSGFAPGFLRRHSASNLHALAHPAPSPGSCSPKFPGAANGSSCGSAAAGGPTSYGTLKEPSGGGGTALLNKENKFRDRSFSENGDRSQHLLHLQQQQKGGGGSQINSTRYKTELCRPFEESGTCKYGEKCQFAHGFHELRSLTRHPKYKTELCRTFHTIGFCPYGPRCHFIHNADERRPAPSGGASGDLRAFGTRDALHLGFPREPRPKLHHSLSFSGFPSGHHQPPGGLESPLLLDSPTSRTPPPPSCSSASSCSSSASSCSSASAASTPSGAPTCCASAAAAAAAALLYGTGGAEDLLAPGAPCAACSSASCANNAFAFGPELSSLITPLAIQTHNFAAVAAAASSTSSYQPPFHLFT

SEQ ID NO: 909429 - protein, 224 aa, Homo sapiens
SSRCSSWTLPLSPGSGGRPSRPAFQVGKVPGFAKECPSALEAGRAARRAPVSRLSFSTADRGHAARGFPDRLRAAHLGSRGGGSRVETQRGPRWASSPLPLLQMWEPFSWKKFLIVSQTGVNKPASRHLAKPISFLKSNIFCQEYALIVSPQPIGVFCFLTELYMSGGEKTLAFQRSILVTWFHCHHLVDVQFRTILSAPSGSLAQSLLCNCWRITAEFLAVLS

SEQ ID NO: 909430 - protein, 129 aa, Homo sapiens; identical to SEQ ID NO: 909419

SEQ ID NO: 909431 - protein, 488 aa, Homo sapiens
ASGDWSVRAEVCATRAGSLPESFPGRGPCGGCVSAWPGQALVLPGRRARGGRGLGWPPAQALDGSRMGKAKVPASKRAPSSPVAKPGPVKTLTRKKNKKKKRFWKSKAREVSKKPASGPGAVVRPPKAPEDFSQNWKALQEWLLKQKSQAPEKPLVISQMGSKKKPKIIQQNKKETSPQVKGEEMPAGKDQEASRGSVPSGSKMDRRAPVPRTKASGTEHNKKGTKERTNGDIVPERGDIEHKKRKAKEAAPAPPTEEDIWFDDVDPADIEAAIGPEAAKIARKQLGQSEGSVSLSLVKEQAFGGLTRALALDCEMVGVGPKGEESMAARVSIVNQYGKCVYDKYVKPTEPVTDYRTAVSGIRPENLKQGEELEVVQKEVAEMLKGRILVGHALHNDLKVLFLDHPKKKIRDTQKYKPFKSQVKSGRPSLRLLSEKILGLQVQQAEHCSIQDAQAAMRLYVMVKKEWESMARDRRPLLTAPDHCSDDA

SEQ ID NO: 909432 - protein, 285 aa, Homo sapiens
MDRRAPVPRTKASGTEHNKKGTKERTNGDIVPERGDIEHKKRKAKEAAPAPPTEEDIWFDDVDPADIEAAIGPEAAKIARKQLGQSEGSVSLSLVKEQAFGGLTRALALDCEMVGVGPKGEESMAARVSIVNQYGKCVYDKYVKPTEPVTDYRTAVSGIRPENLKQGEELEVVQKEVAEMLKGRILVGHALHNDLKVLFLDHPKKKIRDTQKYKPFKSQVKSGRPSLRLLSEKILGLQVQQAEHCSIQDAQAAMRLYVMVKKEWESMARDRRPLLTAPDHCSDDA

SEQ ID NO: 909433 - protein, 173 aa, Homo sapiens
MVGVGPKGEESMAARVSIVNQYGKCVYDKYVKPTEPVTDYRTAVSGIRPENLKQGEELEVVQKEVAEMLKGRILVGHALHNDLKVLFLDHPKKKIRDTQKYKPFKSQVKSGRPSLRLLSEKILGLQVQQAEHCSIQDAQAAMRLYVMVKKEWESMARDRRPLLTAPDHCSDDA

SEQ ID NO: 909434 - protein, 373 aa, Homo sapiens
ASGDWSVRAEVCATRAGSLPESFPGRGPCGGCVSAWPGQALVLPGRRARGGRGLGWPPAQALDGSRMGKAKVPASKRAPSSPVAKPGPVKTLTRKKNKKKKRFWKSKAREVSKKPASGPGAVVRPPKAPEDFSQNWKALQEWLLKQKSQAPEKPLVISQMGSKKKPKIIQQNKKETSPQVKGEEMPAGKDQEASRGSVPSGSKMDRRAPVPRTKASGTEHNKKGTKERTNGDIVPERGDIEHKKRKAKEAAPAPPTEEDIWFDDVDPADIEAAIGPEAAKIARKQLGQSEGSVSLSLVKEQAFGGLTRALALDCEMVGVGPKGEESMAARVSIVNQYGKCVYDKYVKPTEPVTDYRTAVSGIRPENLKQGEAM

SEQ ID NO: 909435 - protein, 488 aa, Homo sapiens; identical to SEQ ID NO: 909431

SEQ ID NO: 909436 - protein, 470 aa, Homo sapiens
ASGDWSVRAEVCATRAGSLPESFPGRGPCGGCVSAWPGQALVLPGRRARGGRGLGWPPAQALDGSRMGKAKVPASKRAPSSPVAKPGPVKTLTRKKNKKKKRFWKSKAREVSKKPASGPGAVVRPPKAPEDFSQNWKALQEMGSKKKPKIIQQNKKETSPQVKGEEMPAGKDQEASRGSVPSGSKMDRRAPVPRTKASGTEHNKKGTKERTNGDIVPERGDIEHKKRKAKEAAPAPPTEEDIWFDDVDPADIEAAIGPEAAKIARKQLGQSEGSVSLSLVKEQAFGGLTRALALDCEMVGVGPKGEESMAARVSIVNQYGKCVYDKYVKPTEPVTDYRTAVSGIRPENLKQGEELEVVQKEVAEMLKGRILVGHALHNDLKVLFLDHPKKKIRDTQKYKPFKSQVKSGRPSLRLLSEKILGLQVQQAEHCSIQDAQAAMRLYVMVKKEWESMARDRRPLLTAPDHCSDDA

SEQ ID NO: 909437 - protein, 173 aa, Homo sapiens; identical to SEQ ID NO: 909433

SEQ ID NO: 909438 - protein, 502 aa, Homo sapiens
MPLVKRNIEPRHLCRGALPEGITSELECVTNSTLAAIIRQLSSLSKHAEDIFGELFNEANNFYIRANSLQDRIDRLAVKVTQLDSTVEEVSLQDINMKKAFKSSTVQDQQVVSKNSIPNPVADIYNQSDKPPPLNILTPYRDDKKDGLKFYTDPSYFFDLWKEKMLQDTEDKRKEKRRQKEQKRIDGTTREVKKVRKARNRRQEWNMMAYDKELRPDNRLSQSVYHGASSEGSLSPDTRSHASDVTDYSYPATPNHSLHPQPVTPSYAAGDVPPHGPASQAAEHEYRPPSASARHMALNRPQQPPPPPPPQAPEGSQASAPMAPADYGMLPAQIIEYYNPSGPPPPPPPPVIPSAQTAFVSPLQMPMQPPFPASASSTHAAPPHPPSTGLLVTAPPPPGPPPPPPGPPGPGSSLSSSPMHGPPVAEAKRQEPAQPPISDARSDLLAAIRMGIQLKKVQEQREQEAKREPVVNDVATILSRRIAVEYSDSDDDSEFDENDWSD

SEQ ID NO: 909439 - protein, 433 aa, Homo sapiens
QKCTLKNDQKGKFYVVYIFLLSLQDINMKKAFKSSTVQDQQVVSKNSIPNPVADIYNQSDKPPPLNILTPYRDDKKDGLKFYTDPSYFFDLWKEKMLQDTEDKRKEKRRQKEQKRIDGTTREVKKVRKARNRRQEWNMMAYDKELRPDNRLSQSVYHGASSEGSLSPDTRSHASDVTDYSYPATPNHSLHPQPVTPSYAAGDVPPHGPASQAAEHEYRPPSASARHMALNRPQQPPPPPPPQAPEGSQASAPMAPADYGMLPAQIIEYYNPSGPPPPPPPPVIPSAQTAFVSPLQMPMQPPFPASASSTHAAPPHPPSTGLLVTAPPPPGPPPPPPGPPGPGSSLSSSPMHGPPVAEAKRQEPAQPPISDARSDLLAAIRMGIQLKKVQEQREQEAKREPVVNDVATILSRRIAVEYSDSDDDSEFDENDWSD

SEQ ID NO: 909440 - protein, 321 aa, Homo sapiens
MPLVKRNIEPRHLCRGALPEGITSELECVTNSTLAAIIRQLSSLSKHAEDIFGELFNEANNFYIRANSLQDRIDRLAVKVTQLDSTVEEVSLQDINMKKAFKSSTVQDQQVVSKNSIPNPVADIYNQSDKPPPLNILTPYRDDKKDGLKFYTDPSYFFDLWKEKMLQDTEDKRKEKRRQKEQKRIDGTTREVKKVRKARNRRQEWNMMAYDKELRPDNRLSQSVYHGASSEGSLSPDTRCVCVTAPSALMLGQLGTTWFYYHLKCINSFGVYMALDVLRFSLKIVYLYFDFEIILEDSVILHWVPLILENLSDLKCIVEFI

SEQ ID NO: 909441 - protein, 502 aa, Homo sapiens; identical to SEQ ID NO: 909438

SEQ ID NO: 909442 - protein, 260 aa, Homo sapiens
MPLVKRNIEPRHLCRGALPEGITSELECVTNSTLAAIIRQLSSLSKHAEDIFGELFNEANNFYIRANSLQDRIDRLAVKVTQLDSTVEEVSLQDINMKKAFKSSTVQDQQVVSKNSIPNPVADIYNQSDKPPPLNILTPYRDDKKDGLKFYTDPSYFFDLWKEKMLQDTEDKRKEKRRQKEQKRIDGTTREVKKVRKARNRRQEWNMMAYDKELRPDNRLSQSVYHGASSEGSLSPDTRSHASDVTDYSYPATPNHSSAE

SEQ ID NO: 909443 - protein, 187 aa, Homo sapiens
MPLVKRNIEPRHLCRGALPEGITSELECVTNSTLAAIIRQLSSLSKHAEDIFGELFNEANNFYIRANSLQDRIDRLAVKVTQLDSTVEEVSLQDINMKKAFKSSTVQDQQVVSKNSIPNPVADIYNQSDKPPPLNILTPYRDDKKDGLKFYTDPSYFFDLWKEKMLQDTEDKRKEKRRQKVNNFSMG

SEQ ID NO: 909444 - protein, 1531 aa, Homo sapiens
MEVSPLQPVNENMQVNKIKKNEDAKKRLSVERIYQKKTQLEHILLRPDTYIGSVELVTQQMWVYDEDVGINYREVTFVPGLYKIFDEILVNAADNKQRDPKMSCIRVTIDPENNLISIWNNGKGIPVVEHKVEKMYVPALIFGQLLTSSNYDDDEKKVTGGRNGYGAKLCNIFSTKFTVETASREYKKMFKQTWMDNMGRAGEMELKPFNGEDYTCITFQPDLSKFKMQSLDKDIVALMVRRAYDIAGSTKDVKVFLNGNKLPVKGFRSYVDMYLKDKLDETGNSLKVIHEQVNHRWEVCLTMSEKGFQQISFVNSIATSKGGRHVDYVADQIVTKLVDVVKKKNKGGVAVKAHQVKNHMWIFVNALIENPTFDSQTKENMTLQPKSFGSTCQLSEKFIKAAIGCGIVESILNWVKFKAQVQLNKKCSAVKHNRIKGIPKLDDANDAGGRNSTECTLILTEGDSAKTLAVSGLGVVGRDKYGVFPLRGKILNVREASHKQIMENAEINNIIKIVGLQYKKNYEDEDSLKTLRYGKIMIMTDQDQDGSHIKGLLINFIHHNWPSLLRHRFLEEFITPIVKVSKNKQEMAFYSLPEFEEWKSSTPNHKKWKVKYYKGLGTSTSKEAKEYFADMKRHRIQFKYSGPEDDAAISLAFSKKQIDDRKEWLTNFMEDRRQRKLLGLPEDYLYGQTTTYLTYNDFINKELILFSNSDNERSIPSMVDGLKPGQRKVLFTCFKRNDKREVKVAQLAGSVAEMSSYHHGEMSLMMTIINLAQNFVGSNNLNLLQPIGQFGTRLHGGKDSASPRYIFTMLSSLARLLFPPKDDHTLKFLYDDNQRVEPEWYIPIIPMVLINGAEGIGTGWSCKIPNFDVREIVNNIRRLMDGEEPLPMLPSYKNFKGTIEELAPNQYVISGEVAILNSTTIEISELPVRTWTQTYKEQVLEPMLNGTEKTPPLITDYREYHTDTTVKFVVKMTEEKLAEAERVGLHKVFKLQTSLTCNSMVLFDHVGCLKKYDTVLDILRDFFELRLKYYGLRKEWLLGMLGAESAKLNNQARFILEKIDGKIIIENKPKKELIKVLIQRGYDSDPVKAWKEAQQKVPDEEENEESDNEKETEKSDSVTDSGPTFNYLLDMPLWYLTKEKKDELCRLRNEKEQELDTLKRKSPSDLWKEDLATFIEELEAVEAKEKQDEQVGLPGKGGKAKGKKTQMAEVLPSPRGQRVIPRITIEMKAEAEKKNKKKIKNENTEGSPQEDGVELEGLKQRLEKKQKREPGTKTKKQTTLAFKPIKKGKKRNPWSDSESDRSSDESNFDVPPRETEPRRAATKTKFTMDLDSDEDFSDFDEKTDDEDFVPSDASPPKTKTSPKLSNKELKPQKSVVSDLEADDVKGSVPLSSSPPATHFPDETEITNPVPKKNVTVKKTAAKSQSSTSTTGAKKRAAPKGTKRDPALNSGVSQKPDPAKTKNRRKRKPSTSDDSDSNFEKIVSKAVTSKKSKGESDDFHMDFDSAVAPRAKSVRAKKPIKYLEESDEDDLF

SEQ ID NO: 909445 - protein, 1531 aa, Homo sapiens; identical to SEQ ID NO: 909444

SEQ ID NO: 909446 - protein, 1557 aa, Homo sapiens
MEVSPLQPVNENMQVNKIKKNEDAKKRLSVERIYQKKTQLEHILLRPDTYIGSVELVTQQMWVYDEDVGINYREVTFVPGLYKIFDEILVNAADNKQRDPKMSCIRVTIDPENNLISIWNNGKGIPVVEHKVEKMYVPALIFGQLLTSSNYDDDEKKVTGGRNGYGAKLCNIFSTKFTVETASREYKKMFKQTWMDNMGRAGEMELKPFNGEDYTCITFQPDLSKFKMQSLDKDIVALMVRRAYDIAGSTKDVKVFLNGNKLPVKGFRSYVDMYLKDKLDETGNSLKVIHEQVNHRWEVCLTMSEKGFQQISFVNSIATSKGGRHVDYVADQIVTKLVDVVKKKNKGGVAVKAHQVKNHMWIFVNALIENPTFDSQTKENMTLQPKSFGSTCQLSEKFIKAAHLYSRFLIDPFFPNMIPNMNLLVFKAIGCGIVESILNWVKFKAQVQLNKKCSAVKHNRIKGIPKLDDANDAGGRNSTECTLILTEGDSAKTLAVSGLGVVGRDKYGVFPLRGKILNVREASHKQIMENAEINNIIKIVGLQYKKNYEDEDSLKTLRYGKIMIMTDQDQDGSHIKGLLINFIHHNWPSLLRHRFLEEFITPIVKVSKNKQEMAFYSLPEFEEWKSSTPNHKKWKVKYYKGLGTSTSKEAKEYFADMKRHRIQFKYSGPEDDAAISLAFSKKQIDDRKEWLTNFMEDRRQRKLLGLPEDYLYGQTTTYLTYNDFINKELILFSNSDNERSIPSMVDGLKPGQRKVLFTCFKRNDKREVKVAQLAGSVAEMSSYHHGEMSLMMTIINLAQNFVGSNNLNLLQPIGQFGTRLHGGKDSASPRYIFTMLSSLARLLFPPKDDHTLKFLYDDNQRVEPEWYIPIIPMVLINGAEGIGTGWSCKIPNFDVREIVNNIRRLMDGEEPLPMLPSYKNFKGTIEELAPNQYVISGEVAILNSTTIEISELPVRTWTQTYKEQVLEPMLNGTEKTPPLITDYREYHTDTTVKFVVKMTEEKLAEAERVGLHKVFKLQTSLTCNSMVLFDHVGCLKKYDTVLDILRDFFELRLKYYGLRKEWLLGMLGAESAKLNNQARFILEKIDGKIIIENKPKKELIKVLIQRGYDSDPVKAWKEAQQKVPDEEENEESDNEKETEKSDSVTDSGPTFNYLLDMPLWYLTKEKKDELCRLRNEKEQELDTLKRKSPSDLWKEDLATFIEELEAVEAKEKQDEQVGLPGKGGKAKGKKTQMAEVLPSPRGQRVIPRITIEMKAEAEKKNKKKIKNENTEGSPQEDGVELEGLKQRLEKKQKREPGTKTKKQTTLAFKPIKKGKKRNPWSDSESDRSSDESNFDVPPRETEPRRAATKTKFTMDLDSDEDFSDFDEKTDDEDFVPSDASPPKTKTSPKLSNKELKPQKSVVSDLEADDVKGSVPLSSSPPATHFPDETEITNPVPKKNVTVKKTAAKSQSSTSTTGAKKRAAPKGTKRDPALNSGVSQKPDPAKTKNRRKRKPSTSDDSDSNFEKIVSKAVTSKKSKGESDDFHMDFDSAVAPRAKSVRAKKPIKYLEESDEDDLF

SEQ ID NO: 909447 - protein, 1573 aa, Homo sapiens
ARASLWPPVTGEALGLRSGRRPAWEPIFSIPGSGVIVERRKPLLVLSSEPVNENMQVNKIKKNEDAKKRLSVERIYQKKTQLEHILLRPDTYIGSVELVTQQMWVYDEDVGINYREVTFVPGLYKIFDEILVNAADNKQRDPKMSCIRVTIDPENNLISIWNNGKGIPVVEHKVEKMYVPALIFGQLLTSSNYDDDEKKVTGGRNGYGAKLCNIFSTKFTVETASREYKKMFKQTWMDNMGRAGEMELKPFNGEDYTCITFQPDLSKFKMQSLDKDIVALMVRRAYDIAGSTKDVKVFLNGNKLPVKGFRSYVDMYLKDKLDETGNSLKVIHEQVNHRWEVCLTMSEKGFQQISFVNSIATSKGGRHVDYVADQIVTKLVDVVKKKNKGGVAVKAHQVKNHMWIFVNALIENPTFDSQTKENMTLQPKSFGSTCQLSEKFIKAAIGCGIVESILNWVKFKAQVQLNKKCSAVKHNRIKGIPKLDDANDAGGRNSTECTLILTEGDSAKTLAVSGLGVVGRDKYGVFPLRGKILNVREASHKQIMENAEINNIIKIVGLQYKKNYEDEDSLKTLRYGKIMIMTDQDQDGSHIKGLLINFIHHNWPSLLRHRFLEEFITPIVKVSKNKQEMAFYSLPEFEEWKSSTPNHKKWKVKYYKGLGTSTSKEAKEYFADMKRHRIQFKYSGPEDDAAISLAFSKKQIDDRKEWLTNFMEDRRQRKLLGLPEDYLYGQTTTYLTYNDFINKELILFSNSDNERSIPSMVDGLKPGQRKVLFTCFKRNDKREVKVAQLAGSVAEMSSYHHGEMSLMMTIINLAQNFVGSNNLNLLQPIGQFGTRLHGGKDSASPRYIFTMLSSLARLLFPPKDDHTLKFLYDDNQRVEPEWYIPIIPMVLINGAEGIGTGWSCKIPNFDVREIVNNIRRLMDGEEPLPMLPSYKNFKGTIEELAPNQYVISGEVAILNSTTIEISELPVRTWTQTYKEQVLEPMLNGTEKTPPLITDYREYHTDTTVKFVVKMTEEKLAEAERVGLHKVFKLQTSLTCNSMVLFDHVGCLKKYDTVLDILRDFFELRLKYYGLRKEWLLGMLGAESAKLNNQARFILEKIDGKIIIENKPKKELIKVLIQRGYDSDPVKAWKEAQQKVPDEEENEESDNEKETEKSDSVTDSGPTFNYLLDMPLWYLTKEKKDELCRLRNEKEQELDTLKRKSPSDLWKEDLATFIEELEAVEAKEKQDEQVGLPGKGGKAKGKKTQMAEVLPSPRGQRVIPRITIEMKAEAEKKNKKKIKNENTEGSPQEDGVELEGLKQRLEKKQKREPGTKTKKQTTLAFKPIKKGKKRNPWSDSESDRSSDESNFDVPPRETEPRRAATKTKFTMDLDSDEDFSDFDEKTDDEDFVPSDASPPKTKTSPKLSNKELKPQKSVVSDLEADDVKGSVPLSSSPPATHFPDETEITNPVPKKNVTVKKTAAKSQSSTSTTGAKKRAAPKGTKRDPALNSGVSQKPDPAKTKNRRKRKPSTSDDSDSNFEKIVSKAVTSKKSKGESDDFHMDFDSAVAPRAKSVRAKKPIKYLEESDEDDLF

SEQ ID NO: 909448 - protein, 1090 aa, Homo sapiens
MYIFILGGRNSTECTLILTEGDSAKTLAVSGLGVVGRDKYGVFPLRGKILNVREASHKQIMENAEINNIIKIVGLQYKKNYEDEDSLKTLRYGKIMIMTDQDQDGSHIKGLLINFIHHNWPSLLRHRFLEEFITPIVKVSKNKQEMAFYSLPEFEEWKSSTPNHKKWKVKYYKGLGTSTSKEAKEYFADMKRHRIQFKYSGPEDDAAISLAFSKKQIDDRKEWLTNFMEDRRQRKLLGLPEDYLYGQTTTYLTYNDFINKELILFSNSDNERSIPSMVDGLKPGQRKVLFTCFKRNDKREVKVAQLAGSVAEMSSYHHGEMSLMMTIINLAQNFVGSNNLNLLQPIGQFGTRLHGGKDSASPRYIFTMLSSLARLLFPPKDDHTLKFLYDDNQRVEPEWYIPIIPMVLINGAEGIGTGWSCKIPNFDVREIVNNIRRLMDGEEPLPMLPSYKNFKGTIEELAPNQYVISGEVAILNSTTIEISELPVRTWTQTYKEQVLEPMLNGTEKTPPLITDYREYHTDTTVKFVVKMTEEKLAEAERVGLHKVFKLQTSLTCNSMVLFDHVGCLKKYDTVLDILRDFFELRLKYYGLRKEWLLGMLGAESAKLNNQARFILEKIDGKIIIENKPKKELIKVLIQRGYDSDPVKAWKEAQQKVPDEEENEESDNEKETEKSDSVTDSGPTFNYLLDMPLWYLTKEKKDELCRLRNEKEQELDTLKRKSPSDLWKEDLATFIEELEAVEAKEKQDEQVGLPGKGGKAKGKKTQMAEVLPSPRGQRVIPRITIEMKAEAEKKNKKKIKNENTEGSPQEDGVELEGLKQRLEKKQKREPGTKTKKQTTLAFKPIKKGKKRNPWSDSESDRSSDESNFDVPPRETEPRRAATKTKFTMDLDSDEDFSDFDEKTDDEDFVPSDASPPKTKTSPKLSNKELKPQKSVVSDLEADDVKGSVPLSSSPPATHFPDETEITNPVPKKNVTVKKTAAKSQSSTSTTGAKKRAAPKGTKRDPALNSGVSQKPDPAKTKNRRKRKPSTSDDSDSNFEKIVSKAVTSKKSKGESDDFHMDFDSAVAPRAKSVRAKKPIKYLEESDEDDLF

SEQ ID NO: 909449 - protein, 677 aa, Homo sapiens
PAEDEARTCNILGRPQLNETQGQAMGCPRLQPPLLPSYKNFKGTIEELAPNQYVISGEVAILNSTTIEISELPVRTWTQTYKEQVLEPMLNGTEKTPPLITDYREYHTDTTVKFVVKMTEEKLAEAERVGLHKVFKLQTSLTCNSMVLFDHVGCLKKYDTVLDILRDFFELRLKYYGLRKEWLLGMLGAESAKLNNQARFILEKIDGKIIIENKPKKELIKVLIQRGYDSDPVKAWKEAQQKVPDEEENEESDNEKETEKSDSVTDSGPTFNYLLDMPLWYLTKEKKDELCRLRNEKEQELDTLKRKSPSDLWKEDLATFIEELEAVEAKEKQDEQVGLPGKGGKAKGKKTQMAEVLPSPRGQRVIPRITIEMKAEAEKKNKKKIKNENTEGSPQEDGVELEGLKQRLEKKQKREPGTKTKKQTTLAFKPIKKGKKRNPWSDSESDRSSDESNFDVPPRETEPRRAATKTKFTMDLDSDEDFSDFDEKTDDEDFVPSDASPPKTKTSPKLSNKELKPQKSVVSDLEADDVKGSVPLSSSPPATHFPDETEITNPVPKKNVTVKKTAAKSQSSTSTTGAKKRAAPKGTKRDPALNSGVSQKPDPAKTKNRRKRKPSTSDDSDSNFEKIVSKAVTSKKSKGESDDFHMDFDSAVAPRAKSVRAKKPIKYLEESDEDDLF

SEQ ID NO: 909450 - protein, 1531 aa, Homo sapiens; identical to SEQ ID NO: 909444

SEQ ID NO: 909451 - protein, 1531 aa, Homo sapiens; identical to SEQ ID NO: 909444

SEQ ID NO: 909452 - protein, 507 aa, Homo sapiens
MEVSPLQPVNENMQVNKIKKNEDAKKRLSVERIYQKKTQLEHILLRPDTYIGSVELVTQQMWVYDEDVGINYREVTFVPGLYKIFDEILVNAADNKQRDPKMSCIRVTIDPENNLISIWNNGKGIPVVEHKVEKMYVPALIFGQLLTSSNYDDDEKKVTGGRNGYGAKLCNIFSTKFTVETASREYKKMFKQTWMDNMGRAGEMELKPFNGEDYTCITFQPDLSKFKMQSLDKDIVALMVRRAYDIAGSTKDVKVFLNGNKLPVKGFRSYVDMYLKDKLDETGNSLKVIHEQVNHRWEVCLTMSEKGFQQISFVNSIATSKGGRHVDYVADQIVTKLVDVVKKKNKGGVAVKAHQVKNHMWIFVNALIENPTFDSQTKENMTLQPKSFGSTCQLSEKFIKAAIGCGIVESILNWVKFKAQVQLNKKCSAVKHNRIKGIPKLDDANDAGGRNSTECTLILTEGDSAKTLAVSGLGVVGRDKYGVFPLRGKILNVREASHKQIMENAEN

SEQ ID NO: 909453 - protein, 433 aa, Homo sapiens
MEVSPLQPVNENMQVNKIKKNEDAKKRLSVERIYQKKTQLEHILLRPDTYIGSVELVTQQMWVYDEDVGINYREVTFVPGLYKIFDEILVNAADNKQRDPKMSCIRVTIDPENNLISIWNNGKGIPVVEHKVEKMYVPALIFGQLLTSSNYDDDEKKVTGGRNGYGAKLCNIFSTKFTVETASREYKKMFKQTWMDNMGRAGEMELKPFNGEDYTCITFQPDLSKFKMQSLDKDIVALMVRRAYDIAGSTKDVKVFLNGNKLPVKGFRSYVDMYLKDKLDETGNSLKVIHEQVNHRWEVCLTMSEKGFQQISFVNSIATSKGGRHVDYVADQIVTKLVDVVKKKNKGGVAVKAHQVKNHMWIFVNALIENPTFDSQTKENMTLQPKSFGSTCQLSEKFIKAAHLYSRFLIDPFFPNMIPNMNLLVFRPLAVVL

SEQ ID NO: 909454 - protein, 1531 aa, Homo sapiens; identical to SEQ ID NO: 909444

SEQ ID NO: 909455 - protein, 1531 aa, Homo sapiens; identical to SEQ ID NO: 909444

SEQ ID NO: 909456 - protein, 1531 aa, Homo sapiens; identical to SEQ ID NO: 909444

SEQ ID NO: 909457 - protein, 1512 aa, Homo sapiens
MEVSPLQPVNENMQVNKIKKNEDAKKRLSVERIYQKKTQLEHILLRPDTYIGSVELVTQQMWVYDEDVGINYREVTFVPGLYKIFDEILVNAADNKQRDPKMSCIRVTIDPENNLISIWNNGKGIPVVEHKVEKMYVPALIFGQLLTSSNYDDDEKKVTGGRNGYGAKLCNIFSTKFTVETASREYKKMFKQTWMDNMGRAGEMELKPFNGEDYTCITFQPDLSKFKMQSLDKDIVALMVRRAYDIAGSTKDVKVFLNGNKLPVKGFRSYVDMYLKDKLDETGNSLKVIHEQVNHRWEVCLTMSEKGFQQISFVNSIATSKGGRHVDYVADQIVTKLVDVVKKKNKGGVAVKAHQVKNHMWIFVNALIENPTFDSQTKENMTLQPKSFGSTCQLSEKFIKAAIGCGIVESILNWVKFKAQVQLNKKCSAVKHNRIKGIPKLDDANDAGGRNSTECTLILTEGDSAKTLAVSGLGVVGRDKYGVFPLRGKILNVREASHKQIMENAEINNIIKIVGLQYKKNYEDEDSLKTLRYGKIMIMTDQDQDGSHIKGLLINFIHHNWPSLLRHRFLEEFITPIVKVSKNKQEMAFYSLPEFEEWKSSTPNHKKWKVKYYKGLGTSTSKEAKEYFADMKRHRIQFKYSGPEDDAAISLAFSKKQIDDRKEWLTNFMEDRRQRKLLGLPEDYLYGQTTTYLTYNDFINKELILFSNSDNERSIPSMVDGLKPGQRKVLFTCFKRNDKREVKVAQLAGSVAEMSSYHHGEMSLMMTIINLAQNFVGSNNLNLLQPIGQFGTRLHGGKDSASPRYIFTMLSSLARLLFPPKDDHTLKFLYDDNQRVEPEWYIPIIPMVLINGAEGIGTGWSCKIPNFDVREIVNNIRRLMDGEEPLPMLPSYKNFKGTIEELAPNQYVISGEVAILNSTTIEISELPVRTWTQTYKEQVLEPMLNGTEKTPPLITDYREYHTDTTVKFVVKMTEEKLAEAERVGLHKVFKLQTSLTCNSMVLFDHVGCLKKYDTVLDILRDFFELRLKYYGLRKEWLLGMLGAESAKLNNQARFILEKIDGKIIIENKPKKELIKVLIQRGYDSDPVKAWKEAQQKVPDEEENEESDNEKETEKSDSVTDSGPTFNYLLDMPLWYLTKEKKDELCRLRNEKEQELDTLKRKSPSDLWKEDLATFIEELEAVEAKEKQDEQVGLPGKGGKAKGKKTQMAEVLPSPRGQRVIPRITIEMKAEAEKKNKKKIKNENTEGSPQEDGVELEGLKQRLEKKQKREPGTKTKKQTTLAFKPIKNNFDVPPRETEPRRAATKTKFTMDLDSDEDFSDFDEKTDDEDFVPSDASPPKTKTSPKLSNKELKPQKSVVSDLEADDVKGSVPLSSSPPATHFPDETEITNPVPKKNVTVKKTAAKSQSSTSTTGAKKRAAPKGTKRDPALNSGVSQKPDPAKTKNRRKRKPSTSDDSDSNFEKIVSKAVTSKKSKGESDDFHMDFDSAVAPRAKSVRAKKPIKYLEESDEDDLF

SEQ ID NO: 909458 - protein, 1531 aa, Homo sapiens; identical to SEQ ID NO: 909444

SEQ ID NO: 909459 - protein, 650 aa, Homo sapiens
EISMVVELRIATSPLSQSFHVLTGSSEISMVVELRIATSPLITELPVRTWTQTYKEQVLEPMLNGTEKTPPLITDYREYHTDTTVKFVVKMTEEKLAEAERVGLHKVFKLQTSLTCNSMVLFDHVGCLKKYDTVLDILRDFFELRLKYYGLRKEWLLGMLGAESAKLNNQARFILEKIDGKIIIENKPKKELIKVLIQRGYDSDPVKAWKEAQQKVPDEEENEESDNEKETEKSDSVTDSGPTFNYLLDMPLWYLTKEKKDELCRLRNEKEQELDTLKRKSPSDLWKEDLATFIEELEAVEAKEKQDEQVGLPGKGGKAKGKKTQMAEVLPSPRGQRVIPRITIEMKAEAEKKNKKKIKNENTEGSPQEDGVELEGLKQRLEKKQKREPGTKTKKQTTLAFKPIKKGKKRNPWSDSESDRSSDESNFDVPPRETEPRRAATKTKFTMDLDSDEDFSDFDEKTDDEDFVPSDASPPKTKTSPKLSNKELKPQKSVVSDLEADDVKGSVPLSSSPPATHFPDETEITNPVPKKNVTVKKTAAKSQSSTSTTGAKKRAAPKGTKRDPALNSGVSQKPDPAKTKNRRKRKPSTSDDSDSNFEKIVSKAVTSKKSKGESDDFHMDFDSAVAPRAKSVRAKKPIKYLEESDEDDLF

SEQ ID NO: 909460 - protein, 310 aa, Homo sapiens
RIPLLSESRCKKEEKKKIKNENTEGSPQEDGVELEGLKQRLEKKQKREPGTKTKKQTTLAFKPIKKGKKRNPWSDSESDRSSDESNFDVPPRETEPRRAATKTKFTMDLDSDEDFSDFDEKTDDEDFVPSDASPPKTKTSPKLSNKELKPQKSVVSDLEADDVKGSVPLSSSPPATHFPDETEITNPVPKKNVTVKKTAAKSQSSTSTTGAKKRAAPKGTKRDPALNSGVSQKPDPAKTKNRRKRKPSTSDDSDSNFEKIVSKAVTSKKSKGESDDFHMDFDSAVAPRAKSVRAKKPIKYLEESDEDDLF

SEQ ID NO: 909461 - protein, 1101 aa, Homo sapiens
MEVSPLQPVNENMQVNKIKKNEDAKKRLSVERIYQKKTQLEHILLRPDTYIGSVELVTQQMWVYDEDVGINYREVTFVPGLYKIFDEILVNAADNKQRDPKMSCIRVTIDPENNLISIWNNGKGIPVVEHKVEKMYVPALIFGQLLTSSNYDDDEKKVTGGRNGYGAKLCNIFSTKFTVETASREYKKMFKQTWMDNMGRAGEMELKPFNGEDYTCITFQPDLSKFKMQSLDKDIVALMVRRAYDIAGSTKDVKVFLNGNKLPVKGFRSYVDMYLKDKLDETGNSLKVIHEQVNHRWEVCLTMSEKGFQQISFVNSIATSKGGRHVDYVADQIVTKLVDVVKKKNKGGVAVKAHQVKNHMWIFVNALIENPTFDSQTKENMTLQPKSFGSTCQLSEKFIKAAIGCGIVESILNWVKFKAQVQLNKKCSAVKHNRIKGIPKLDDANDAGGRNSTECTLILTEGDSAKTLAVSGLGVVGRDKYGVFPLRGKILNVREASHKQIMENAEINNIIKIVGLQYKKNYEDEDSLKTLRYGKIMIMTDQDQDGSHIKGLLINFIHHNWPSLLRHRFLEEFITPIVKVSKNKQEMAFYSLPEFEEWKSSTPNHKKWKVKYYKGLGTSTSKEAKEYFADMKRHRIQFKYSGPEDDAAISLAFSKKQIDDRKEWLTNFMEDRRQRKLLGLPEDYLYGQTTTYLTYNDFINKELILFSNSDNERSIPSMVDGLKPGQRKVLFTCFKRNDKREVKVAQLAGSVAEMSSYHHGEMSLMMTIINLAQNFVGSNNLNLLQPIGQFGTRLHGGKDSASPRYIFTMLSSLARLLFPPKDDHTLKFLYDDNQRVEPEWYIPIIPMVLINGAEGIGTGWSCKIPNFDVREIVNNIRRLMDGEEPLPMLPSYKNFKGTIEELAPNQYVISGEVAILNSTTIEISELPVRTWTQTYKEQVLEPMLNGTEKTPPLITDYREYHTDTTVKFVVKMTEEKLAEAERVGLHKVFKLQTSLTCNSMVLFDHVGCLKKYDTVLDILRDFFELRLKYYGLRKEWLLGMLGAESAKLNNQARFILEKIDGKIIIGNKLEKFIKSDSEGNDRTVKAGRSRKVHEKNGGGEE

SEQ ID NO: 909462 - protein, 760 aa, Homo sapiens
  misc_feature (758)..(758): Xaa can be any naturally occurring amino acid
MEVSPLQPVNENMQVNKIKKNEDAKKRLSVERIYQKKTQLEHILLRPDTYIGSVELVTQQMWVYDEDVGINYREVTFVPGLYKIFDEILVNAADNKQRDPKMSCIRVTIDPENNLISIWNNGKGIPVVEHKVEKMYVPALIFGQLLTSSNYDDDEKKVTGGRNGYGAKLCNIFSTKFTVETASREYKKMFKQTWMDNMGRAGEMELKPFNGEDYTCITFQPDLSKFKMQSLDKDIVALMVRRAYDIAGSTKDVKVFLNGNKLPVKGFRSYVDMYLKDKLDETGNSLKVIHEQVNHRWEVCLTMSEKGFQQISFVNSIATSKGGRHVDYVADQIVTKLVDVVKKKNKGGVAVKAHQVKNHMWIFVNALIENPTFDSQTKENMTLQPKSFGSTCQLSEKFIKAAHLYSRFLIDPFFPNMIPNMNLLVFKAIGCGIVESILNWVKFKAQVQLNKKCSAVKHNRIKGIPKLDDANDAGGRNSTECTLILTEGDSAKTLAVSGLGVVGRDKYGVFPLRGKILNVREASHKQIMENAEINNIIKIVGLQYKKNYEDEDSLKTLRYGKIMIMTDQDQDGSHIKGLLINFIHHNWPSLLRHRFLEEFITPIVKVSKNKQEMAFYSLPEFEEWKSSTPNHKKWKVKYYKGLGTSTSKEAKEYFADMKRHRIQFKYSGPEDDAAISLAFSKKQIDDRKEWLTNFMEDRRQRKLLGLPEDYLYGQTTTYLTYNDFINKELILFSNSDNPGGTIPLLLGGNGFWKTPGSXKK

SEQ ID NO: 909463 - protein, 145 aa, Homo sapiens
HPAFVTGKPNAALWLSAWIMILEGGGVMNLNPGNNLLHQPPAWTDSYSTCNVSSGFFGGQWHEIHPQYWTKYQVWEWLQHLLDTNQLDANCIPFQEFDINGEHLCSMSLQEFTRAAGTAGQLLYSNLQHLKWNGDSLFLCLSLPC

SEQ ID NO: 909464 - protein, 300 aa, Homo sapiens
MILEGGGVMNLNPGNNLLHQPPAWTDSYSTCNVSSGFFGGQWHEIHPQYWTKYQVWEWLQHLLDTNQLDANCIPFQEFDINGEHLCSMSLQEFTRAAGTAGQLLYSNLQHLKWNGQCSSDLFQSTHNVIVKTEQTEPSIMNTWKDENYLYDTNYGSTVDLLDSKTFCRAQISMTTTSHLPVAESPDMKKEQDPPAKCHTKKHNPRGTHLWEFIRDILLNPDKNPGLIKWEDRSEGVFRFLKSEAVAQLWGKKKNNSSMTYEKLSRAMRYYYKREILERVDGRRLVYKFGKNARGWRENEN

SEQ ID NO: 909465 - protein, 277 aa, Homo sapiens
MILEGGGVMNLNPGNNLLHQPPAWTDSYSTCNVSSGFFGGQWHEIHPQYWTKYQVWEWLQHLLDTNQLDANCIPFQEFDINGEHLCSMSLQEFTRAAGTAGQLLYSNLQHLKWNGQCSSDLFQSTHNVIVKTEQTEPSIMNTWKDENYLYDTNYGSTVAESPDMKKEQDPPAKCHTKKHNPRGTHLWEFIRDILLNPDKNPGLIKWEDRSEGVFRFLKSEAVAQLWGKKKNNSSMTYEKLSRAMRYYYKREILERVDGRRLVYKFGKNARGWRENEN

SEQ ID NO: 909466 - protein, 743 aa, Homo sapiens
MCHVLLDFPCFSLVGCNSLCPLPLSLIFPEREFLPNIYFQGNCKLSQPCYMPSDAGLSFPLPQNFGQTMDVFLSEHESHIQMVSTYEVQQYLSSLMNCLLHWYLNVPSCECTIFEMYLPTPQMPTLFLLQKYIPLNKYMVSIYYDKVSEVIFEVIQRQVKQSVTSSIQFTKENKTALRDLYRKAEHDKAIRNTKHVSWREEDSEPLKQVGGIGNDFTGWSEFERWVGIQQELRGRTQAELKEQHREKTSYWLLEEELVKSLNAIARQLYTYISVGDEDYYKVTEEGSDIMIAIMTRLGQWDISPVSRSIIWTTLRKSKGIVEKRTLISGLIFSGKWSEFGGVCVCVCVCVCMYKREKMKRVSEREEEENDLGMDNKLINCRNDSNALAFMIFYFGGGGGMSSEHFSSLVLIQCPGVGSRLEEDMKMHFCSITHAGTYTDCGCVSEISGSQQYIPVSDTMARNSQGSLMRLLPVFAVSSGFFGGQWHEIHPQYWTKYQVWEWLQHLLDTNQLDANCIPFQEFDINGEHLCSMSLQEFTRAAGTAGQLLYSNLQHLKWNGQCSSDLFQSTHNVIVKTEQTEPSIMNTWKDENYLYDTNYGSTVDLLDSKTFCRAQISMTTTSHLPVAESPDMKKEQDPPAKCHTKKHNPRGTHLWEFIRDILLNPDKNPGLIKWEDRSEGVFRFLKSEAVAQLWGKKKNNSSMTYEKLSRAMRYYYKREILERVDGRRLVYKFGKNARGWRENEN

SEQ ID NO: 909467 - protein, 157 aa, Homo sapiens
MNTGKRNYYIHSRAQYLLDSKTFCRAQISMTTTSHLPVAESPDMKKEQDPPAKCHTKKHNPRGTHLWEFIRDILLNPDKNPGLIKWEDRSEGVFRFLKSEAVAQLWGKKKNNSSMTYEKLSRAMRYYYKREILERVDGRRLVYKFGKNARGWRENEN

SEQ ID NO: 909468 - protein, 217 aa, Homo sapiens
MEIMILEGGGVMNLNPGNNLLHQPPAWTDSYSTCNVSSGFFGGQWHEIHPQYWTKYQVWEWLQHLLDTNQLDANCIPFQEFDINGEHLCSMSLQEFTRAAGTAGQLLYSNLQHLKWNGQCSSDLFQSTHNVIVKTEQTEPSIMNTWKDENYLYDTNYGSTVDLLDSKTFCRAQISMTTTSHLPVAESPDMKKEQDSNSKTKNNNNKKSRSHGTCIHM

SEQ ID NO: 909469 - protein, 300 aa, Homo sapiens; identical to SEQ ID NO: 909464

SEQ ID NO: 909470 - protein, 303 aa, Homo sapiens
MEIMILEGGGVMNLNPGNNLLHQPPAWTDSYSTCNVSSGFFGGQWHEIHPQYWTKYQVWEWLQHLLDTNQLDANCIPFQEFDINGEHLCSMSLQEFTRAAGTAGQLLYSNLQHLKWNGQCSSDLFQSTHNVIVKTEQTEPSIMNTWKDENYLYDTNYGSTVDLLDSKTFCRAQISMTTTSHLPVAESPDMKKEQDPPAKCHTKKHNPRGTHLWEFIRDILLNPDKNPGLIKWEDRSEGVFRFLKSEAVAQLWGKKKNNSSMTYEKLSRAMRYYYKREILERVDGRRLVYKFGKNARGWRENEN

SEQ ID NO: 909471 - protein, 251 aa, Homo sapiens
MAVADGGEAAGCNLTSSYLDANCIPFQEFDINGEHLCSMSLQEFTRAAGTAGQLLYSNLQHLKWNGQCSSDLFQSTHNVIVKTEQTEPSIMNTWKDENYLYDTNYGSTVDLLDSKTFCRAQISMTTTSHLPVAESPDMKKEQDPPAKCHTKKHNPRGTHLWEFIRDILLNPDKNPGLIKWEDRSEGVFRFLKSEAVAQLWGKKKNNSSMTYEKLSRAMRYYYKREILERVDGRRLVYKFGKNARGWRENEN

SEQ ID NO: 909472 - protein, 350 aa, Homo sapiens
MNPRGLFQDFNPSKFLIYTCLLLFSVLLPLRLDGIIQWSYWAVFAPIWLWKLLVVAGASVGAGVWARNPRYRTEGEACVEFKAMLIAVGIHLLLLMFEVLVCDRVERGTHFWLLVFMPLFFVSPVSVAACVWGFRHDRSLELEILCSVNILQFIFIALKLDRIIHWPWLVVFVPLWILMSFLCLVVLYYIVWSLLFLRSLDVVAEQRRTHVTMAISWITIVVPLLTFEVLLVHRLDGHNTFSYVSIFVPLWLSLLTLMATTFRRKGGNHWWFGIRRDFCQFLLEIFPFLREYGNISYDLHHEDSEDAEETSVPEAPKIAPIFGKKARVVITQSPGKYVPPPPKLNIDMPD

SEQ ID NO: 909473 - protein, 350 aa, Homo sapiens; identical to SEQ ID NO: 909472

SEQ ID NO: 909474 - protein, 350 aa, Homo sapiens; identical to SEQ ID NO: 909472

SEQ ID NO: 909475 - protein, 350 aa, Homo sapiens; identical to SEQ ID NO: 909472

SEQ ID NO: 909476 - protein, 350 aa, Homo sapiens; identical to SEQ ID NO: 909472

SEQ ID NO: 909477 - protein, 350 aa, Homo sapiens; identical to SEQ ID NO: 909472

SEQ ID NO: 909478 - protein, 333 aa, Homo sapiens
MEDLEEDVRFIVDETLDFGGLSPSDSREEEDITVLVTPEKPLRRGLSHRSDPNAVAPAPQGVRLSLGPLSPEKLEEILDEANRLAAQLEQCALQDRESAGEGLGPRRVKPSPRRETFVLKDSPVRDLLPTVNSLTRSTPSPSSLTPRLRSNDRKGSVRALRATSGKRPSNMKRESPTCNLFPASKSPASSPLTRSTPPVRGRAGPSGRAAASPPTPIRSVLAPQPSTSNSQRLPRPQGAAAKSSSQLPIPSAIPRPASRMPLTSRSVPPGRGALPPDSLSTRKGLPRPSTAGHRVRESGHKVPVSQRLNLPVMGATRSNLQPPRKVAVPGPTR

SEQ ID NO: 909479 - protein, 317 aa, Homo sapiens
MEDLEEDVRFIVDETLDFGGLSPSDSREEEDITVLVTPEKPLRRGLSHRSDPNAVAPAPQGVRLSLGPLSPEKLEEILDEANRLAAQLEQCALQDRESAGEGLGPRRVKPSPRRETFVLKDSPVRDLLPTVNSLTRSTPSPSSLTPRLRSNDRKGSVRALRATSGKRPSNMKRESPTCNLFPASKSPASSPLTRSTPPVRGRAGPSGRAAASEETRAAKLRGAAAKSSSQLPIPSAIPRPASRMPLTSRSVPPGRGALPPDSLSTRKGLPRPSTAGHRVRESGHKVPVSQRLNLPVMGATRSNLQPPRKVAVPGPTR

SEQ ID NO: 909480 - protein, 310 aa, Homo sapiens
MEDLEEDVRFIVDETLDFGGLSPSDSREEEDITVLVTPEKPLRRGLSHRSDPNAVAPAPQGVRLSLGPLSPEKLEEILDEANRLAAQLEQCALQDRESAGEGLGPRRVKPSPRRETFVLKDSPVRDLLPTVNSLTRSTPSPSSLTPRLRSNDRKGSVRALRATSGKRPSNMKRESPTCNLFPASKSPASSPLTRSTPPVRGRAGPSGRAAASEETRAAKLRACQPNATHQPECATWQRCPTSGFSVNSKRASKTKHCRTQSAGKWTQGSCFPATKSSCHGCHSQQSAAPQESGSPRTYQVKRSGQQARLQ

SEQ ID NO: 909481 - protein, 333 aa, Homo sapiens; identical to SEQ ID NO: 909478

SEQ ID NO: 909482 - protein, 415 aa, Homo sapiens
MEDLEEDVRFIVDETLDFGGLSPSDSREEEDITVLVTPEKPLRRGLSHRSDPNAVAPAPQGVRLSLGPLSPEKLEEILDEANRLAAQLEQCALQDRESAGEGLGPRRVKPSPRRETFVLKDSPVRDLLPTVNSLTRSTPSPSSLTPRLRSNDRKGSVRALRATSGKRPSNMKRESPTCNLFPASKSPASSPLTRSTPPVRGRAGPSGRAAASEETRAAKLRVSGSGEFVGLTLKFLHPSPPGPPTPIRSVLAPQPSTSNSQRLPRPQGAAAKSSSQLPIPSAIPRPASRMPLTSRSVPPGRGALPPDSLSTRKGLPRPSTAGHRVRESGHKGKRSGGRMPALAQRVLTLPELSTVTTFAILIAIQLEDGETELQRGYGAGQSLSLSFQIPHGQGESTNPTLAPFIQYFFSRSVKL

SEQ ID NO: 909483 - protein, 333 aa, Homo sapiens; identical to SEQ ID NO: 909478

SEQ ID NO: 909484 - protein, 160 aa, Homo sapiens
MEDLEEDVRFIVDETLDFGGLSPSDRSHPLAICSLHPKAQHLLLLPDRLPQSGGEPGPVGEQQPAHPPPSDPSWPHSLLPATLNACPGRREQLLNLPVNCPFPRPSPGLPAECHSPAGVCHLAEVPYLRILCQLEKGFQDQALQDTECGKVDTRFLFPSD

SEQ ID NO: 909485 - protein, 310 aa, Homo sapiens; identical to SEQ ID NO: 909480

SEQ ID NO: 909486 - protein, 175 aa, Homo sapiens
MEDLEEDVRFIVDETLDFGGLSPSDSREEEDITVLVTPEKPLRRGLSHRSDPNAVAPAPQGVRLSLGPLSPEKLEEILDEANRLAAQLEQCALQDRESAGEGLGPRRVKPSPRRETFVLKDSPVRDLLPTVNSLTRSTPSPSSLTPRLRSNDRKGSVRALRATSGKRPSNMKRVS

SEQ ID NO: 909487 - protein, 139 aa, Homo sapiens
MEDLEEDVRFIVDETLDFGGLSPSDSREEEDITVLVTPEKPLRRGLSHRSDPNAVAPAPQGVRLSLGPLSPEKLEEILDEANRLAAQLEQCALQDRESAGEGLGPRRVKPSPRRETFVLKDSPVRDLLPTVNFSGLKED

SEQ ID NO: 909488 - protein, 98 aa, Homo sapiens
HEGCLEVGGAGLKAANRAIMSHKQIYYSDKYDDEEFEYRHVMLPKDIAKLVPKTHLMSESEWRNLGVQQSQGWVHYMIHEPEPHILLFRRPLPKKPKK

SEQ ID NO: 909489 - protein, 333 aa, Homo sapiens; identical to SEQ ID NO: 909478

SEQ ID NO: 909490 - protein, 363 aa, Homo sapiens
MEDLEEDVRFIVDETLDFGGLSPSDSREEEDITVLVTPEKPLRRGLSHRSDPNAVAPAPQGVRLSLGPLSPEKLEEILDEANRLAAQLEQCALQDRESAGEGLGPRRVKPSPRRETFVLKDSPVRDLLPTVNSLTRSTPSPSSLTPRLRSNDRKGSVRALRATSGKRPSNMKRESPTCNLFPASKSPASSPLTRSTPPVRGRAGPSGRAAASEETRAAKLRVSGSGEFVGLTLKFLHPSPPGPPTPIRSVLAPQPSTSNSQRLPRPQGAAAKSSSQLPIPSAIPRPASRMPLTSRSVPPGRGALPPDSLSTRKGLPRPSTAGHRVRESGHKVPVSQRLNLPVMGATRSNLQPPRKVAVPGPTR

SEQ ID NO: 909491 - protein, 333 aa, Homo sapiens; identical to SEQ ID NO: 909478

SEQ ID NO: 909492 - protein, 333 aa, Homo sapiens; identical to SEQ ID NO: 909478

SEQ ID NO: 909493 - protein, 333 aa, Homo sapiens; identical to SEQ ID NO: 909478

SEQ ID NO: 909494 - protein, 269 aa, Homo sapiens
MEDLEEDVRFIVDETLDFGGLSPSDSREEEDITVLVTPEKPLRRGLSHRSDPNAVAPAPQGVRLSLGPLSPEKLEEILDEANRLAAQLEQCALQDRESAGEGLGPRRVKPSPRRETFVLKDSPVRDLLPTVNSLTRSTPSPSSLTPRLRSNDRKGSVRALRATSGKRPSNMKRAHPPPSDPSWPHSLLPATLNACPGRREQLLNLPVNCPFPRPSPGLPAECHSPAGVCHLAEVPYLRILCQLEKGFQDQALQDTECGKVDTRFLFPSD

SEQ ID NO: 909495 - protein, 317 aa, Homo sapiens; identical to SEQ ID NO: 909479

SEQ ID NO: 909496 - protein, 205 aa, Homo sapiens
MEDLEEDVRFIVDETLDFGGLSPSDSREEEDITVLVTPEKPLRRGLSHRSDPNAVAPAPQGVRLSLGPLSPEKLEEILDEANRLAAQLEQCALQDRESAGEGLGPRRVKPSPRRETFVLKDSPVRDLLPTVNSLTRSTPSPSSLTPRLRSNDRKGSVRALRATSGKRPSNMKRSHHLQSVLIQKPDLLSYDDPSREAAMKTEGQR

SEQ ID NO: 909497 - protein, 139 aa, Homo sapiens; identical to SEQ ID NO: 909487

SEQ ID NO: 909498 - protein, 471 aa, Homo sapiens
MTGQARFHRGAEACRAIRQCRSRRPRAAHPEGRAGSGRGSRHASPGVRRGGFSLLLLNLEEYYFEQHRANHILHKGSHHERKIRGSLKICSKSVIFEPDSISQPIIKIPLRDCIKIGKHGENGANRHFTKAKSGGISLIFSQVYFIKEHNVVAPYKIERGKMEYVFELDVPGKVEDVVETLLQLHRASCLDKLGDQTAMITAILQSRLARTSFDKNRFQNISEKLHMECKAEMVTPLVTNPGHVCITDTNLYFQPLNGYPKPVVQITLQDVRRIYKRRHGLMPLGLEVFCTEDDLCSDIYLKFYEPQDRDDLYFYIATYLEHHVAEHTAESYMLQWQRGHLSNYQYLLHLNNLADRSCNDLSQYPVFPWIIHDYSSSELDLSNPGTFRDLSKPVGALNKERLERLLTRYQEMPEPKFMYGSHYSSPGYVLFYLVRIAPEYMLCLQNGRFDNADRMFNRFDTNALLIIFNTF

SEQ ID NO: 909499 - protein, 479 aa, Homo sapiens
  misc_feature (462)..(462): Xaa can be any naturally occurring amino acid
MTGQARFHRGAEACRAIRQCRSRRPRAAHPEGRAGSGRGSRHASPGVRRGGFSLLLLNLEEYYFEQHRANHILHKGSHHERKIRGSLKICSKSVIFEPDSISQPIIKIPLRDCIKIGKHGENGANRHFTKAKSGGISLIFSQVYFIKEHNVVAPYKIERGKMEYVFELDVPGKVEDVVETLLQLHRASCLDKLGDQTAMITAILQSRLARTSFDKNRFQNISEKLHMECKAEMVTPLVTNPGHVCITDTNLYFQPLNGYPKPVVQITLQDVRRIYKRRHGLMPLGLEVFCTEDDLCSDIYLKFYEPQDRDDLYFYIATYLEHHVAEHTAESYMLQWQRGHLSNYQYLLHLNNLADRSCNDLSQYPVFPWIIHDYSSSELDLSNPGTFRDLSKPVGALNKERLERLLTRYQEMPEPKFMYGSHYSSPGYVLFYLVRIAPEYMLCLQNGRFDNADRMFNSYLAXNFGKKTGSWNGWQPGIF

SEQ ID NO: 909500 - protein, 310 aa, Homo sapiens
MEYVFELDVPGKVEDVVETLLQLHRASCLDKLGDQTAMITAILQSRLARTSFDKNRFQNISEKLHMECKAEMVTPLVTNPGHVCITDTNLYFQPLNGYPKPVVQITLQDVRRIYKRRHGLMPLGLEVFCTEDDLCSDIYLKFYEPQDRDDLYFYIATYLEHHVAEHTAESYMLQWQRGHLSNYQYLLHLNNLADRSCNDLSQYPVFPWIIHDYSSSELDLSNPGTFRDLSKPVGALNKERLERLLTRYQEMPEPKFMYGSHYSSPGYVLFYLVRIAPEYMLCLQNGRFDNADRMFNRFDTNALLIIFNTF

SEQ ID NO: 909501 - protein, 440 aa, Homo sapiens
MAFIRKKQQEQQLQLYSKERFSLLLLNLEEYYFEQHRANHILHKGSHHERKIRGSLKICSKSVIFEPDSISQPIIKIPLRDCIKIGKHGENGANRHFTKAKSGGISLIFSQVYFIKEHNVVAPYKIERGKMEYVFELDVPGKVEDVVETLLQLHRASCLDKLGDQTAMITAILQSRLARTSFDKNRFQNISEKLHMECKAEMVTPLVTNPGHVCITDTNLYFQPLNGYPKPVVQITLQDVRRIYKRRHGLMPLGLEVFCTEDDLCSDIYLKFYEPQDRDDLYFYIATYLEHHVAEHTAESYMLQWQRGHLSNYQYLLHLNNLADRSCNDLSQYPVFPWIIHDYSSSELDLSNPGTFRDLSKPVGALNKERLERLLTRYQEMPEPKFMYGSHYSSPGYVLFYLVRIAPEYMLCLQNGRFDNADRMFNRFDTNALLIIFNTF

SEQ ID NO: 909502 - protein, 524 aa, Homo sapiens
MTGQARFHRGAEACRAIRQCRSRRPRAAHPEGRAGSGRGSRHASPGVRRGGFSLLLLNLEEYYFEQHRANHILHKGSHHERKIRGSLKICSKSVIFEPDSISQPIIKIPLRDCIKIGKHGENGANRHFTKAKSGGISLIFSQVYFIKEHNVVAPYKIERGKMEYVFELDVPGKVEDVVETLLQLHRASCLDKLGDQTAMITAILQSRLARTSFDKNRFQNISEKLHMECKAEMVTPLVTNPGHVCITDTNLYFQPLNGYPKPVVQITLQDVRRIYKRRHGLMPLGLEVFCTEDDLCSDIYLKFYEPQDRDDLYFYIATYLEHHVAEHTAESYMLQWQRGHLSNYQYLLHLNNLADRSCNDLSQYPVFPWIIHDYSSSELDLSNPGTFRDLSKPVGALNKERLERLLTRYQEMPEPKFMYGSHYSSPGYVLFYLVRIAPEYMLCLQNGRFDNADRMFNSIAETWKNCLDGATDFKELIPEFYGDDVSFLVNSLKLDLGKRQGGQMVDDVELPPWASSPEDFLQKA

SEQ ID NO: 909503 - protein, 180 aa, Homo sapiens
MTGQARFHRGAEACRAIRQCRSRRPRAAHPEGRAGSGRGSRHASPGVRRGGFSLLLLNLEEYYFEQHRANHILHKGSHHERKIRGSLKICSKSVIFEPDSISQPIIKIPLRDCIKIGKHGENGANRHFTKAKSGGISLIFSQVYFIKEHNVVAPYKIERVSKAFHVFPAIYIVILNNKIL

SEQ ID NO: 909504 - protein, 80 aa, Homo sapiens
SGRAHGMWARLTALLYPQVCIPFDQANLDRQACQSGYRIQSSPNRLNRGRPSTTWAADGDFKIKVCGLVTGNQPSPVAPQ

SEQ ID NO: 909505 - protein, 102 aa, Homo sapiens
MACGLVASNLNLKPGECLRVRGEVAPDAKELRAEPGQRQQQPVPALQPSLPTPDGDRQNTIVCNSKGTAGPGGPKQREAVFPFPALGRCCRGVHHLFDQGQP

SEQ ID NO: 909506 - protein, 102 aa, Homo sapiens; identical to SEQ ID NO: 909505

SEQ ID NO: 909507 - protein, 102 aa, Homo sapiens; identical to SEQ ID NO: 909505

SEQ ID NO: 909508 - protein, 102 aa, Homo sapiens; identical to SEQ ID NO: 909505

SEQ ID NO: 909509 - protein, 102 aa, Homo sapiens; identical to SEQ ID NO: 909505

SEQ ID NO: 909510 - protein, 59 aa, Homo sapiens
MGGGYEQQAPLWPRNKRKQAKGGNTERSTHAAERDEPSRGQSRGDSKGEQMRAPKVRDD

SEQ ID NO: 909511 - protein, 122 aa, Homo sapiens
MACGLVASNLNLKPGECLRVRGEVAPDAKELRAEPGQRQQQPVPALQPSLPTPDGDRQNTIVCNSKGTAGPGGPKQREAVFPFPALGRCCRGVHHLRPADGDFKIKVCGLVTGNQPSPVAPQ

SEQ ID NO: 909512 - protein, 118 aa, Homo sapiens
MACGLVASNLNLKPGECLRVRGEVAPDAKELRAEPGQRQQQPVPALQPSLPTPDGDRQNTIVCNSKGTAGPGGPSSCRLSIPSALKCGEVCITFDRPPDRKLPDDIQSSHRFLRPYYC

SEQ ID NO: 909513 - protein, 101 aa, Homo sapiens
MACGLVASNLNLKPGECLRVRGEVAPDAKELRAEPGQRQQQPVPALQPSLPTPDGDRQNTIVCNSKGTAGPGGPTLDAVSGVGCSHALDAVSALMQSARDV

SEQ ID NO: 909514 - protein, 100 aa, Homo sapiens
MACGLVASNLNLKPGECLRVRGEVAPDAKELRAEPGQRQQQPVPALQPSLQTPDGDRQNTIVCNSKGTPKEQRPQKSKDSKRAKTPKEQRPKELRPHKSL

SEQ ID NO: 909515 - protein, 165 aa, Homo sapiens
MTARYEAGWLSLGWSLLTAGAPAREHPPGLNHGLWSGRQQPSFVLNLGKDSNNLCLHFNPRFQRPTAIAKTPSCATAKGRRGLGDRSSGRLSFPFQPWEGVAEVCITFDQANLDRQACQSGYRIQSSPNRLNRGRPSTTWAADGDFKIKVCGLVTGNQPSPVAPQ

SEQ ID NO: 909516 - protein, 102 aa, Homo sapiens; identical to SEQ ID NO: 909505

SEQ ID NO: 909517 - protein, 116 aa, Homo sapiens
  misc_feature (50)..(50): Xaa can be any naturally occurring amino acid
MPGHNAQRARHEEQRQARENTEAPERRDRREAGKHGAARSTNTVDNRGHXPRGDVSRHEPQSDRGRREQATDRENVNAATLKHTEERHRRQGEETISADMERRRDSGKADRRRRMN

SEQ ID NO: 909518 - protein, 102 aa, Homo sapiens; identical to SEQ ID NO: 909505

SEQ ID NO: 909519 - protein, 102 aa, Homo sapiens; identical to SEQ ID NO: 909505

SEQ ID NO: 909520 - protein, 102 aa, Homo sapiens; identical to SEQ ID NO: 909505

SEQ ID NO: 909521 - protein, 163 aa, Homo sapiens
MACGLVASNLNLKPGECLRVRGEVAPDAKELRAEPGQRQQQPVPALQPSLPTPDGDRQNTIVCNSKGTAGPGGPKQREAVFPFPALGRCCRGVHHLRPGATVTCQSLARLDTEFPKFIQIGLQPWEGHRTTIGSIDRSTFERSTMLWFFDLKDQPKSPLAPPK

SEQ ID NO: 909522 - protein, 112 aa, Homo sapiens
MACGLVASNLNLKPGECLRVRGEVAPDAKELRAEPGQRQQQPVPALQPSLPTPDGDRQNTIVCNSKGTAGPGGPKQREAVFPFPALGRCCRWAADRNRGPGTGAGWAGAGLG

SEQ ID NO: 909523 - protein, 114 aa, Homo sapiens
APENAEKLPGPETSCPGWALLGNLKPGECLRVRGEVAPDAKELRAEPGQRQQQPVPALQPSLPTPDGDRQNTIVCNSKGTAGPGGPKQREAVFPFPALGRCCRGVHHLFDQGQP

SEQ ID NO: 909524 - protein, 130 aa, Homo sapiens
MPTRYPSFVLNLGKDSNNLCLHFNPRFQRPTAIAKTPSCATAKGRRGLGDRSSGRLSFPFQPWEGVAEVCITFDQANLDRQACQSGYRIQSSPNRLNRGRPSTTWAADGDFKIKVCGLVTGNQPSPVAPQ

SEQ ID NO: 909525 - protein, 75 aa, Homo sapiens
AREREREREREREVCITFDQANLDRQACQSGYRIQSSPNRLNRGRPSTTWAADGDFKIKVCGLVTGNQPSPVAPQ

SEQ ID NO: 909526 - protein, 559 aa, Homo sapiens
LIEGRPAQVAGAKPQSGVGISRLGLGPRLLRDPPLGPSRSPRGSSGRLSWREKVDKSYFQEKMTFNSFEGSKTCVPADINKEEEFVEEFNRLKTFANFPSGSPVSASTLARAGFLYTGEGDTVRCFSCHAAVDRWQYGDSAVGRHRKVSPNCRFINGFYLENSATQSTNSGIQNGQYKVENYLGSRDHFALDRPSETHADYLLRTGQVVDISDTIYPRNPAMYSEEARLKSFQNWPDYAHLTPRELASAGLYYTGIGDQVQCFCCGGKLKNWEPCDRAWSEHRRHFPNCFFVLGRNLNIRSESDAVSSDRNFPNSTNLPRNPSMADYEARIFTFGTWIYSVNKEQLARAGFYALGEGDKVKCFHCGGGLTDWKPSEDPWEQHAKWYPGCKYLLEQKGQEYINNIHLTHSLEECLVRTTEKTPSLTRRIDDTIFQNPMVQEAIRMGFSFKDIKKIMEEKIQISGSNYKSLEVLVADLVNAQKDSMQDESSQTSLQKEISTEEQLRRLQEEKLCKICMDRNIAIVFVPCGHLVTCKQCAEAVDKCPMCYTVITFKQKIFMS

SEQ ID NO: 909527 - protein, 559 aa, Homo sapiens; identical to SEQ ID NO: 909526

SEQ ID NO: 909528 - protein, 147 aa, Homo sapiens
MVSRVRTTEKTPSLTRRIDDTIFQNPMVQEAIRMGFSFKDIKKIMEEKIQISGSNYKSLEVLVADLVNAQKDSMQDESSQTSLQKEISTEEQLRRLQEEKLCKICMDRNIAIVFVPCGHLVTCKQCAEAVDKCPMCYTVITFKQYPD

SEQ ID NO: 909529 - protein, 256 aa, Homo sapiens
LIEGRPAQVAGAKPQSGVGISRLGLGPRLLRDPPLGPSRSPRGSSGRLSWRGEGDKVKCFHCGGGLTDWKPSEDPWEQHAKWYPGCKYLLEQKGQEYINNIHLTHSLEECLVRTTEKTPSLTRRIDDTIFQNPMVQEAIRMGFSFKDIKKIMEEKIQISGSNYKSLEVLVADLVNAQKDSMQDESSQTSLQKEISTEEQLRRLQEEKLCKICMDRNIAIVFVPCGHLVTCKQCAEAVDKCPMCYTVITFKQKIFMS

SEQ ID NO: 909530 - protein, 990 aa, Homo sapiens
ANSFDDRFLVTAGADGNIFVFNIFSEFMLRKDMKAKVPSPRFGIETEPIPEDIEDPKAYSIENARRKREHDKLMKEVGEIKARKREQIKALRSEFCNLLEMNEKLPKHMQFKRTDFDVDSQIRAEMHRKTAFKIQQVEKELAWEKEKHELGLMKLKNRFRDPLESDTIVVHAILSDHKISSYRLVQPSKYSKFKRASQSERKPSKLDRFEKEGPGRKDSQRDAGGSVTIQEESIIEKGKKFRPKTLSEIIVENQIEKTRKLILKAERAQLKIQQRKKEWEELYKSKPGDDYEDPKDLQAIKEAQVYMGDFNLKTAPDYKIPEHMRINAAKKEEELGHLDSLVHGNKRHMNKCILSLRDLKVAVVEEIQCLVQELKNIQSTLHISKHIPIPKIPQIHPEEVPEKRFQYDEETLLNFKQQQMKSKDEKSPGVEQTGSGGPVGGFLKLSSRKDGDLTTRDSISRSSKASTFSLDIPKCLEFEKAEPTDVELEIMKRDEIKHVYMQQYLVNRIKELVVTFDAELRLLRHQKLKLDTQMKLSDLHHVTLFQEILLLKNFEKQENILQERVNSLDKEEQYMQWKINETLKEMEEKKNEITKLQEQEKALYAGFQAAIGENNKFANFLMKVLKKRIKRVKKKEVEGDADEDEESEESSEEESSLESDEDESESEDEVFDDSICPTNCDVALFELALHLREKRLDIEEALVEEKKIVDNLKKEYDTLSKKVKIVATNLNAAEEALEAYQREKQQRLNELLVVIPLKLHQIEYVVFGEIPSDLSGTLVFSNHALRRLQERIRELQEENSKQQKLNKEWRERRKQLIREKREMTKTIHKMEETVRQLMISKFGRVVNLEALQTLSVNTTLEELKIRKLRKELANAKEMKMWEEKIAQMRWELMMKTKEHTRKLYQMNDLCIEKKKLDSRLNTLQNQQGNAFQGPREADVVAREEVTELIQLQAERISALKEEIALLRRKGGLILPPIQSPREKEIQPADL

SEQ ID NO: 909531 - protein, 934 aa, Homo sapiens
ANSFDDRFLVTAGADGNIFVFNIFSEFMLRKDMKAKVPSPRFGIETEPIPEDIEDPKAYSIENARRKREHDKLMKEVGEIKARKREQIKALRSEFCNLLEMNEKLPKHMQFKRTDFDVDSQIRAEMHRKTAFKIQQVEKELAWEKEKHELGLMKLKNRFRDPLESDTIVVHAILSDHKISSYRLVQPSKYSKFKRASQSERKPSKLDRFEKEGPGRKDSQRDAGGSVTIQEESIIEKGKKFRPKTLSEIIVENQIEKTRKLILKAERAQLKIQQRKKEWEELYKSKPGDDYEDPKDLQAIKEAQVYMGDFNLKTAPDYKIPEHMRINAAKKEEELGHLDSLVHGNKRHMNKCILSLRDLKVAVVEEIQCLVQELKNIQSTLHISKHIPIPKIPQIHPEEVPEKRFQYDEETLLNFKQQQMKSKDEKSPGVEQTGSGGPVGGFLKLSSRKDGDLTTRDSISRSSKASTFSLDIPKCLEFEKAEPTDVELEIMKRDEIKHVYMQQYLVNRIKELVVTFDAELRLLRHQKLKLDTQMKLSDLHHVTLFQEILLLKNFEKQENILQERVNSLDKEEQYMQWKINETLKEMEEKKNEITKLQEQEKALYAGFQAAIGENNKFANFLMKVLKKRIKRVKKKEVEGDADEDEESEESSEEESSLESDEDESESEDEVFDDSICPTNCDVALFELALHLREKRLDIEEALVEEKKIVDNLKKEYDTLSKKVKIVATNLNAAEEALEAYQREKQQRLNELLVVIPLKLHQIEYVVFGEIPSDLSGTLVFSNHALRRLQERIRELQEENSKQQKLNKEWRERRKQLIREKREMTKTIHKMEETVRQLMISKFGRVVNLEALQTLSVNTTLEELKIRKLRKELANAKEMKMWEEKIAQMRWELMMKTKEHTRKLYQMNDLCIEKKKLDSRLNTLQNQQNPGNGLS

SEQ ID NO: 909532 - protein, 132 aa, Homo sapiens
ALEELFISPKAHISNGGILAEELKAPEIKEQWLFRVTVRPALITDTQYKGMEFFTCQMMLQQGAVFFQQGNAFQGPREADVVAREEVTELIQLQAERISALKEEIALLRRKGGLILPPIQSPREKEIQPADL

SEQ ID NO: 909533 - protein, 128 aa, Homo sapiens
MDYYRKYAAIFLVTLSVFLHVLHSAPDVQDCPECTLQENPFFSQPGAPILQCMGCCFSRAYPTPLRSKKTMLVQKNVTSESHLLCSLNPYNRVTVMGGFKRGEPTRACPLAVLVIITNLKLFLPKCCL

SEQ ID NO: 909534 - protein, 128 aa, Homo sapiens; identical to SEQ ID NO: 909533

SEQ ID NO: 909535 - protein, 128 aa, Homo sapiens; identical to SEQ ID NO: 909533

SEQ ID NO: 909536 - protein, 128 aa, Homo sapiens; identical to SEQ ID NO: 909533

SEQ ID NO: 909537 - protein, 128 aa, Homo sapiens; identical to SEQ ID NO: 909533

SEQ ID NO: 909538 - protein, 128 aa, Homo sapiens; identical to SEQ ID NO: 909533

SEQ ID NO: 909539 - protein, 128 aa, Homo sapiens; identical to SEQ ID NO: 909533

SEQ ID NO: 909540 - protein, 128 aa, Homo sapiens; identical to SEQ ID NO: 909533

SEQ ID NO: 909541 - protein, 157 aa, Homo sapiens
FLFFVSVVFVWCVSFFFSLVCLIKLTTSAMDYYRKYAAIFLVTLSVFLHVLHSAPDVQDCPECTLQENPFFSQPGAPILQCMGCCFSRAYPTPLRSKKTMLVQKNVTSESHLLCSLNPYNRVTVMGGFKSGEPTRACPLAVLVIITNLKLFLPKCCL

SEQ ID NO: 909542 - protein, 159 aa, Homo sapiens
MDYYRKYAAIFLVTLSVFLHVLHSAPDVQETGFHHVAQAALKLLSSSNPPTKASQSARITDCPECTLQENPFFSQPGAPILQCMGCCFSRAYPTPLRSKKTMLVQKNVTSESHLLCSLNPYNRVTVMGGFKSGEPTRACPLAVLVIITNLKLFLPKCCL

SEQ ID NO: 909543 - protein, 128 aa, Homo sapiens; identical to SEQ ID NO: 909533

SEQ ID NO: 909544 - protein, 128 aa, Homo sapiens; identical to SEQ ID NO: 909533

SEQ ID NO: 909545 - protein, 128 aa, Homo sapiens; identical to SEQ ID NO: 909533

SEQ ID NO: 909546 - protein, 128 aa, Homo sapiens; identical to SEQ ID NO: 909533

SEQ ID NO: 909547 - protein, 128 aa, Homo sapiens; identical to SEQ ID NO: 909533

SEQ ID NO: 909548 - protein, 128 aa, Homo sapiens; identical to SEQ ID NO: 909533

SEQ ID NO: 909549 - protein, 128 aa, Homo sapiens; identical to SEQ ID NO: 909533

SEQ ID NO: 909550 - protein, 152 aa, Homo sapiens
  misc_feature (7)..(7): Xaa can be any naturally occurring amino acid
LERIKQXHNQTPSRETHGITLESAMDYYRKYAAIFLVTLSVFLHVLHSAPDVQDCPECTLQENPFFSQPGAPILQCMGCCFSRAYPTPLRSKKTMLVQKNVTSESHLLCSLNPYNRVTVMGGFKSGEPTRACPLAVLVIITNLKLFLPKCCL

SEQ ID NO: 909551 - protein, 128 aa, Homo sapiens; identical to SEQ ID NO: 909533

SEQ ID NO: 909552 - protein, 102 aa, Homo sapiens
MDYYRKYAAIFLVTLSVFLHVLHSAPDVQDCPECTLQENPFFSQPGAPILQCMGCCFSRAYPTPLRSKKTMLVQKNVTSESHLLCSLNPYNRVRTSRSPEAF

SEQ ID NO: 909553 - protein, 452 aa, Homo sapiens
MQRQAPYNIRRSSTSGDTEEEEEEEVVPFSSDEQKRRSEAASGVLRRTAPREHSYVLSAAKKSTGSPTQETQAPFIAKRVEVVEEDGPSEKSQDPPALARSTPGSNSSRGEEIVRLQILTPRAGLRLVAPDVEGMSSSATSVSAVPADRKSNSTAAQEDAKADPKGALADYEGKDVATRVGEAWQERPGAPRGGQGDPAVPAQQPADPSTPERQSSPSGSEQLVRRESCGSSVLTDFEGKDVATKVGEAWQDRPGAPRGGQGDPAVPTQQPADPSTPEQQNSPSGSEQFVRRESCTSRVRSPSSCMVTVTVTATSEQPHIYIPAPASELDSSSTTKGILFVKEYVNASEVSSGKPVSARYSNVSSIEDSFAMEKKPPCGSTPYSERTTGGICTYCNREIRDCPKITLEHLGICCHEYCFKCGICSKPMGDLLDQIFIHRDTIHCGKCYEKLF

SEQ ID NO: 909554 - protein, 491 aa, Homo sapiens
MQRQAPYNIRRSSTSGDTEEEEEEEVVPFSSDEQKRRSEAASGVLRRTAPREHSYVLSAAKKSTGSPTQETQAPFIAKRVEVVEEDGPSEKSQDPPALARSTPGSNRSSPGNKDKEAPCSRELQRDLAGEEAFRAPNTDAARSSAQLSDGNVGSGATGSRPEGLAAVDIGSERGSSSATSVSAVPADRKSNSTAAQEDAKADPKGALADYEGKDVATRVGEAWQERPGAPRGGQGDPAVPAQQPADPSTPERQSSPSGSEQLVRRESCGSSVLTDFEGKDVATKVGEAWQDRPGAPRGGQGDPAVPTQQPADPSTPEQQNSPSGSEQFVRRESCTSRVRSPSSCMVTVTVTATSEQPHIYIPAPASELDSSSTTKGILFVKEYVNASEVSSGKPVSARYSNVSSIEDSFAMEKKPPCGSTPYSERTTGGICTYCNREIRDCPKITLEHLGICCHEYCFKCGICSKPMGDLLDQIFIHRDTIHCGKCYEKLF

SEQ ID NO: 909555 - protein, 550 aa, Homo sapiens
MQRQAPYNIRRSSTSGDTEEEEEEEVVPFSSDEQKRRSEAASGVLRRTAPREHSYVLSAAKKSTGSPTQETQAPFIAKRVEVVEEDGPSEKSQDPPALARSTPGSNSADGGRTKASRAIWIECLPSMPSPAGSQELSSRGEEIVRLQILTPRAGLRLVAPDVEGMRSSPGNKDKEAPCSRELQRDLAGEEAFRAPNTDAARSSAQLSDGNVGSGATGSRPEGLAAVDIGSERGSSSATSVSAVPADRKSNSTAAQEDAKADPKGALADYEGKDVATRVGEAWQERPGAPRGGQGDPAVPAQQPADPSTPERQSSPSGSEQLVRRESCGSSVLTDFEGKDVATKVGEAWQDRPGAPRGGQGDPAVPTQQPADPSTPEQQNSPSGSEQFVRRESCTSRVRSPSSCMVTVTVTATSEQPHIYIPAPASELDSSSTTKGILFVKEYVNASEVSSGKPVSARYSNVSSIEDSFAMEKKPPCGSTPYSERTTGGICTYCNREIRDCPKITLEHLGICCHEYCFKCGICSKPMGDLLDQIFIHRDTIHCGKCYEKLF

SEQ ID NO: 909556 - protein, 520 aa, Homo sapiens
MQRQAPYNIRRSSTSGDTEEEEEEEVVPFSSDEQKRRSEAASGVLRRTAPREHSYVLSAAKKSTGSPTQETQAPFIAKRVEVVEEDGPSEKSQDPPALARSTPGSNSSRGEEIVRLQILTPRAGLRLVAPDVEGMRSSPGNKDKEAPCSRELQRDLAGEEAFRAPNTDAARSSAQLSDGNVGSGATGSRPEGLAAVDIGSERGSSSATSVSAVPADRKSNSTAAQEDAKADPKGALADYEGKDVATRVGEAWQERPGAPRGGQGDPAVPAQQPADPSTPERQSSPSGSEQLVRRESCGSSVLTDFEGKDVATKVGEAWQDRPGAPRGGQGDPAVPTQQPADPSTPEQQNSPSGSEQFVRRESCTSRVRSPSSCMVTVTVTATSEQPHIYIPAPASELDSSSTTKGILFVKEYVNASEVSSGKPVSARYSNVSSIEDSFAMEKKPPCGSTPYSERTTGGICTYCNREIRDCPKITLEHLGICCHEYCFKCGICSKPMGDLLDQIFIHRDTIHCGKCYEKLF

SEQ ID NO: 909557 - protein, 422 aa, Homo sapiens
MQRQAPYNIRRSSTSGDTEEEEEEEVVPFSSDEQKRRSEAASGVLRRTAPREHSYVLSAAKKSTGSPTQETQAPFIAKRVEVVEEDGPSEKSQDPPALARSTPGSNSADGGRTKASRAIWIECLPSMPSPAGSQELRSSPGNKDKEAPCSRELQRDLAGEEAFRAPNTDAASSSATSVSAVPADRKSNSTAAQEDAKADPKGVLTDFEGKDVATKVGEAWQDRPGAPRGGQGDPAVPTQQPADPSTPEQQNSPSGSEQFVRRESCTSRVRSPSSCMVTVTVTATSEQPHIYIPAPASELDSSSTTKGILFVKEYVNASEVSSGKPVSARYSNVSSIEDSFAMEKKPPCGSTPYSERTTGGICTYCNREIRDCPKITLEHLGICCHEYCFKCGICSKPMGDLLDQIFIHRDTIHCGKCYEKLF

SEQ ID NO: 909558 - protein, 491 aa, Homo sapiens; identical to SEQ ID NO: 909554

SEQ ID NO: 909559 - protein, 491 aa, Homo sapiens; identical to SEQ ID NO: 909554

SEQ ID NO: 909560 - protein, 458 aa, Homo sapiens
MQRQAPYNIRRSSTSGDTEEEEEEEVVPFSSDEQKRRSEAASGVLRRTAPREHSYVLSAAKKSTGSPTQETQAPFIAKRVEVVEEDGPSEKSQDPPALARSTPGSNRSSPGNKDKEAPCSRELQRDLAGEEAFRAPNTDAASSSATSVSAVPADRKSNSTAAQEDAKADPKGALADYEGKDVATRVGEAWQERPGAPRGGQGDPAVPAQQPADPSTPERQSSPSGSEQLVRRESCGSSVLTDFEGKDVATKVGEAWQDRPGAPRGGQGDPAVPTQQPADPSTPEQQNSPSGSEQFVRRESCTSRVRSPSSCMVTVTVTATSEQPHIYIPAPASELDSSSTTKGILFVKEYVNASEVSSGKPVSARYSNVSSIEDSFAMEKKPPCGSTPYSERTTGGICTYCNREIRDCPKITLEHLGICCHEYCFKCGICSKPMGDLLDQIFIHRDTIHCGKCYEKLF

SEQ ID NO: 909561 - protein, 552 aa, Homo sapiens
MQRQAPYNIRRSSTSGDTEEEEEEEVVPFSSDEQKRRSEAASGVLRRTAPREHSYVLSAAKKSTGSPTQETQAPFIAKRVEVVEEDGPSEKSQDPPALARSTPGSNSSRGEEIVRLQILTPRAGLRLVAPDVEGMRSSPGNKDKEAPCSRELQRDLAGEEAFRAPNTDAARSSAQLSDGNVGSGATGSRPEGLAAVDIGSERGRLCAAASFASFLEDQDGHSANSQSCKPRPAAISSSATSVSAVPADRKSNSTAAQEDAKADPKGALADYEGKDVATRVGEAWQERPGAPRGGQGDPAVPAQQPADPSTPERQSSPSGSEQLVRRESCGSSVLTDFEGKDVATKVGEAWQDRPGAPRGGQGDPAVPTQQPADPSTPEQQNSPSGSEQFVRRESCTSRVRSPSSCMVTVTVTATSEQPHIYIPAPASELDSSSTTKGILFVKEYVNASEVSSGKPVSARYSNVSSIEDSFAMEKKPPCGSTPYSERTTGGICTYCNREIRDCPKITLEHLGICCHEYCFKCGICSKPMGDLLDQIFIHRDTIHCGKCYEKLF

SEQ ID NO: 909562 - protein, 322 aa, Homo sapiens
ELGLGGDSLEAMPVPAARGRPRITNGPEELAAPSPAALADYEGKDVATRVGEAWQERPGAPRGGQGDPAVPAQQPADPSTPERQSSPSGSEQLVRRESCGSSVLTDFEGKDVATKVGEAWQDRPGAPRGGQGDPAVPTQQPADPSTPEQQNSPSGSEQFVRRESCTSRVRSPSSCMVTVTVTATSEQPHIYIPAPASELDSSSTTKGILFVKEYVNASEVSSGKPVSARYSNVSSIEDSFAMEKKPPCGSTPYSERTTGGICTYCNREIRDCPKITLEHLGICCHEYCFKCGICSKPMGDLLDQIFIHRDTIHCGKCYEKLF

SEQ ID NO: 909563 - protein, 491 aa, Homo sapiens; identical to SEQ ID NO: 909554

SEQ ID NO: 909564 - protein, 101 aa, Homo sapiens
SLIHMDCQVCEAQYTCAATSSGCLNVQDYLKKRLIDLKAHLMIGHGAECQSPVLILDAQGLAVLQGSSFLSRGQQVKLEPEMPLCPLRAPKISASSRTYQK

SEQ ID NO: 909565 - protein, 485 aa, Homo sapiens
RHCSCSPRGRRSNPDPAAPAPSAAAASAPQSGERSPEPAAPGWLQLLQVTVLLPSLHVLRMVWWYLGKIQPGPEMKCKRLCISRLLITNRRARLRFKFSKVAAPNPIPVPFFQCEGHSFHEEGKCTYISIDQVPRTYAIMISRPAWLWGAEMGANEHGVCIANEAINTREPAAEIEALLGMDLVRLGLERGETAKEALDVIVSLLEEHGQGGNYFEDANSCHSFQSAYLIVDRDEAWVLETIGKYWAAEKVTEGVRCICSQLSLTTKMDAEHPELRSYAQSQGWWTGEGEFNFSEVFSPVEDHLDCGAGKDSLEKQEESITVQTMMNTLRDKASGVCIDSEFFLTTASGVSVLPQNRSSPCIHYFTGTPDPSRSIFKPFIFVDDVKLVPKTQSPCFGDDDPAKKEPRFQEKPDRRHELYKAHEWARAIIESDQEQGRKLRSTMLELEKQGLEAMEEILTSSEPLDPAEVGDLFYDCVDTEIKFFK

SEQ ID NO: 909566 - protein, 485 aa, Homo sapiens; identical to SEQ ID NO: 909565

SEQ ID NO: 909567 - protein, 485 aa, Homo sapiens; identical to SEQ ID NO: 909565

SEQ ID NO: 909568 - protein, 428 aa, Homo sapiens
RPLLQLPGPLPTRRMAAAPPSYCFVAFPPRAKDGLVVFGKNSARPRDEVQEVVYFSAADHEPESKVECTYISIDQVPRTYAIMISRPAWLWGAEMGANEHGVCIANEAINTREPAAEIEALLGMDLVRLGLERGETAKEALDVIVSLLEEHGQGGNYFEDANSCHSFQSAYLIVDRDEAWVLETIGKYWAAEKVTEGVRCICSQLSLTTKMDAEHPELRSYAQSQGWWTGEGEFNFSEVFSPVEDHLDCGAGKDSLEKQEESITVQTMMNTLRDKASGVCIDSEFFLTTASGVSVLPQNRSSPCIHYFTGTPDPSRSIFKPFIFVDDVKLVPKTQSPCFGDDDPAKKEPRFQEKPDRRHELYKAHEWARAIIESDQEQGRKLRSTMLELEKQGLEAMEEILTSSEPLDPAEVGDLFYDCVDTEIKFFK

SEQ ID NO: 909569 - protein, 414 aa, Homo sapiens
MAAAPPSYCFVAFPPRAKDGLVVFGKNSARPRDEVQEVVYFSAADHEPESKVECTYISIDQVPRTYAIMISRPAWLWGAEMGANEHGVCIANEAINTREPAAEIEALLGMDLVRLGLERGETAKEALDVIVSLLEEHGQGGNYFEDANSCHSFQSAYLIVDRDEAWVLETIGKYWAAEKVTEGVRCICSQLSLTTKMDAEHPELRSYAQSQGWWTGEGEFNFSEVFSPVEDHLDCGAGKDSLEKQEESITVQTMMNTLRDKASGVCIDSEFFLTTASGVSVLPQNRSSPCIHYFTGTPDPSRSIFKPFIFVDDVKLVPKTQSPCFGDDDPAKKEPRFQEKPDRRHELYKAHEWARAIIESDQEQGRKLRSTMLELEKQGLEAMEEILTSSEPLDPAEVGDLFYDCVDTEIKFFK

SEQ ID NO: 909570 - protein, 414 aa, Homo sapiens; identical to SEQ ID NO: 909569

SEQ ID NO: 909571 - protein, 414 aa, Homo sapiens; identical to SEQ ID NO: 909569

SEQ ID NO: 909572 - protein, 266 aa, Homo sapiens
MAAAPPSYCFVAFPPRAKDGLVVFGKNSARPRDEVQEVVYFSAADHEPESKVECTYISIDQVPRTYAIMISRPAWLWGAEMGANEHGVCIANEAINTREPAAEIEALLGMDLVRLGLERGETAKEALDVIVSLLEEHGQGGNYFEDANSCHSFQSAYLIVDRDEAWVLETIGKYWAAEKVTEGVRCICSQLSLTTKMDAEHPELRSYAQSQGWWTGEGEFNFSEVFSPVEDHLDCGAGKDSLEKQEGELVSPSRFSFSYPFSCSCF

SEQ ID NO: 909573 - protein, 162 aa, Homo sapiens
ASSVPETLTRDIGKYWAAEKVTEGVRCICSQLSLTTKMDAEHPELRSYAQSQGWWTGEGEFNFSEVFSPVEDHLDCGAGKDSLEKQEESITVQTMMNTLRDKASGVCIDSEFFLTTASGVSVLPQNRSSPCIHYFTGTPDPSRSIFKPLIFVDDVSVSGPSW

SEQ ID NO: 909574 - protein, 485 aa, Homo sapiens; identical to SEQ ID NO: 909565

SEQ ID NO: 909575 - protein, 414 aa, Homo sapiens; identical to SEQ ID NO: 909569

SEQ ID NO: 909576 - protein, 255 aa, Homo sapiens
ASSVPETLTRDIGKYWAAEKVTEGVRCICSQLSLTTKMDAEHPELRSYAQSQGWWTGEGEFNFSEVFSPVEDHLDCGAGKDSLEKQEESITVQTMMNTLRDKASGVCIDSEFFLTTASGVSVLPQNRSSPCIHYFTGTPDPSRSIFKPFIFVDDVKLVPKTQSPCFGDDDPAKKEPRFQEKPDRRHELYKAHEWARAIIESDQEQGRKLRSTMLELEKQGLEAMEEILTSSEPLDPAEVGDLFYDCVDTEIKFFK

SEQ ID NO: 909577 - protein, 414 aa, Homo sapiens; identical to SEQ ID NO: 909569

SEQ ID NO: 909578 - protein, 414 aa, Homo sapiens; identical to SEQ ID NO: 909569

SEQ ID NO: 909579 - protein, 282 aa, Homo sapiens
MISPVLLPACFSTEDHYSAAVPFLDKWPTTLSRHLGGPCQVDAHCSAGHSCIFTVSGTSSCCPFPEAVACGDGHHCCPRGFHCSADGRSCFQRSGNNSVGAIQCPDSQFECPDFSTCCVMVDGSWGCCPMPQASCCEDRVHCCPHGAFCDLVHTRCITPTGTHPLAKKLPAQRTNRAVALSSSVMCPDARSRCPDGSTCCELAQWEVWLLPNAQQARVVPIPALWPRPVCCLIRVGLSRDRPRLSLSAGPWVSLPRRARAPAARGGGHSSVGPSSGFTATPA

SEQ ID NO: 909580 - protein, 111 aa, Homo sapiens
MASSQGGPALLQPVPADVVSSQGVPSILQPAPAEVISSQATPPLLQPAPQLSVDLTEVEVLGEDNVENINPRTSEQHRQGSDGNHTIPASSLHSMTNFISGLQRLHGMLDS

SEQ ID NO: 909581 - protein, 490 aa, Homo sapiens
MPTALPATPASLPSQGLPVAAPSQRPWHAGMAITAAHGASTAVQTGDPASKDQVTTPWVPSSALIVSSNARTSPRAVLWSMAPGGAAPCPRLPAVKTGCTAVRTVPSATWFTPAASHPRAPTPWQRSSLPRGLTGQWPCPARSCVRTHGPGALMVLPAVSLPSGKYGCCPMPNATCCSDHLHCCPQDTVCDLIQSKCLSKENATTDLLTKLPAHTVGDVKCDMEVSCPDGYTCCRLQSGAWGCCPFTQAVCCEDHIHCCPAGFTCDTQKGTCEQGPHQVPWMEKAPAHLSLPDPQALKRDVPCDNVSSCPSSDTCCQLTSGEWGCCPIPEAVCCSDHQHCCPQGYTCVAEGQCQRGSEIVAGLEKMPARRASLSHPRDIGCDQHTSCPVGQTCCPSLGGSWACCQLPHAVCCEDRQHCCPAGYTCNVKARSCEKEVVSAQPATFLARSPHVGVKDVECGEGHFCHDNQTCCRDNRQGWACCPYRQGRLLC

SEQ ID NO: 909582 - protein, 139 aa, Homo sapiens
QSHTTLEGNMVESALIGQRASLSHPRDIGCDQHTSCPVGQTCCPSLGGSWACCQLPHAVCCEDRQHCCPAGYTCNVKARSCEKEVVSAQPATFLARSPHVGVKDVECGEGHFCHDNQTCCRDNRQGWACCPYRQGRLLC

SEQ ID NO: 909583 - protein, 490 aa, Homo sapiens; identical to SEQ ID NO: 909581

SEQ ID NO: 909584 - protein, 337 aa, Homo sapiens
MVLPAVSLPSGKYGCCPMPNATCCSDHLHCCPQDTVCDLIQSKCLSKENATTDLLTKLPAHTVGDVKCDMEVSCPDGYTCCRLQSGAWGCCPFTQAVCCEDHIHCCPAGFTCDTQKGTCEQGPHQVPWMEKAPAHLSLPDPQALKRDVPCDNVSSCPSSDTCCQLTSGEWGCCPIPEAVCCSDHQHCCPQGYTCVAEGQCQRGSEIVAGLEKMPARRASLSHPRDIGCDQHTSCPVGQTCCPSLGGSWACCQLPHAVCCEDRQHCCPAGYTCNVKARSCEKEVVSAQPATFLARSPHVGVKDVECGEGHFCHDNQTCCRDNRQGWACCPYRQGRLLC

SEQ ID NO: 909585 - protein, 626 aa, Homo sapiens
MPTALPATPASLPSQGLPVAAPSQRPWHAGMAITAAHGASTAVQTGDPASKDQVTTPWVPSSALIVSSNARTSPRAVLWSMAPGGAAPCPRLPAVKTGCTAVRTVPSATWFTPAASHPRAPTPWQRSSLPRGLTGQWPCPARSCVRTHGPGALMVLPAVSLPSGKYGCCPMPNATCCSDHLHCCPQDTVCDLIQSKCLSKENATTDLLTKLPAHTVGDVKCDMEVSCPDGYTCCRLQSGAWGCCPFTQAVCCEDHIHCCPAGFTCDTQKGTCEQGPHQVPWVALTAGLVAGTRCPDGQFCPVACCLDPGGASYSCCRPLLDKWPTTLSRHLGGPCQVDAHCSAGHSCIFTVSGTSSCCPFPEAVACGDGHHCCPRGFHCSADGRSCFQRSGNNSVGAIQCPDSQFECPDFSTCCVMVMEKAPAHLSLPDPQALKRDVPCDNVSSCPSSDTCCQLTSGEWGCCPIPEAVCCSDHQHCCPQGYTCVAEGQCQRGSEIVAGLEKMPARRASLSHPRDIGCDQHTSCPVGQTCCPSLGGSWACCQLPHAVCCEDRQHCCPAGYTCNVKARSCEKEVVSAQPATFLARSPHVGVKDVECGEGHFCHDNQTCCRDNRQGWACCPYRQGRLLC

SEQ ID NO: 909586 - protein, 282 aa, Homo sapiens
VLSAAHTVGDVKCDMEVSCPDGYTCCRLQSGAWGCCPFTQAVCCEDHIHCCPAGFTCDTQKGTCEQGPHQVPWMEKAPAHLSLPDPQALKRDVPCDNVSSCPSSDTCCQLTSGEWGCCPIPEAVCCSDHQHCCPQGYTCVAEGQCQRGSEIVAGLEKMPARRASLSHPRDIGCDQHTSCPVGQTCCPSLGGSWACCQLPHAVCCEDRQHCCPAGYTCNVKARSCEKEVVSAQPATFLARSPHVGVKDVECGEGHFCHDNQTCCRDNRQGWACCPYRQGRLLC

SEQ ID NO: 909587 - protein, 389 aa, Homo sapiens
MPTALPATPASLPSQGLPVAAPSQRPWHAGMAITAAHGASTAVQTGDPASKDQVTTPWVPSSALIVSSNARTSPRAVLWSMAPGGAAPCPRLPAVKTGCTAVRTVPSATWFTPAASHPRAPTPWQRSSLPRGLTGQWPCPARSCVRTHGPGALMVLPAVSLPSGKYGCCPMPNATCCSDHLHCCPQDTVCDLIQSKCLSKENATTDLLTKLPAHTVGDVKCDMEVSCPDGYTCCRLQSGAWGCCPFTQAVCCEDHIHCCPAGFTCDTQKGTCEQGPHQVPWMEKAPAHLSLPDPQALKRDVPCDNVSSCPSSDTCCQLTSGEWGCCPIPEAVCCSDHQHCCPQGYTCVAEGQCQRGSEIVAGLEKMPARRASLSHPSLPPSWPVALTWV

SEQ ID NO: 909588 - protein, 584 aa, Homo sapiens
MPTALPATPASLPSQGLPVAAPSQRPWHAGMAITAAHGASTAVQTGDPASKDQVTTPWVPSSALIVSSNARTSPRAVLWSMAPGGAAPCPRLPAVKTGCTAVRTVPSATWFTPAASHPRAPTPWQRSSLPRGLTGQWPCPARSCVRTHGPGALMVLPAVSLPSGKYGCCPMPNATCCSDHLHCCPQDTVCDLIQSKCLSKENATTDLLTKLPAHTVGDVKCDMEVSCPDGYTCCRLQSGAWGCCPFTQAVCCEDHIHCCPAGFTCDTQKGTCEQGPHQVPWMEKAPAHLSLPDPQALKRDVPCDNVSSCPSSDTCCQLTSGEWGCCPIPEAVCCSDHQHCCPQGYTCVAEGQCQRGSEIVAGLEKMPARRASLSHPRDIGCDQHTSCPVGQTCCPSLGGSWACCQLPHAVCCEDRQHCCPAGYTCNVKARSCEKEVVSAQPATFLARSPHVGVKDVECGEGHFCHDNQTCCRDNRQGWACCPYRQGQCQPPSWGWVWPGTRSHLVQPSRPPLTIQGVCCADRRHCCPAGFPLRSQGYQVFAQGGPALGRPFEGPSLETAAVRDSTEDSAALGTPLGGCPLLRPP

SEQ ID NO: 909589 - protein, 490 aa, Homo sapiens; identical to SEQ ID NO: 909581

SEQ ID NO: 909590 - protein, 271 aa, Homo sapiens
KAGFRIGRGDRGVGRRQTMWTLVSWVALTAGLVAGTRCPDGQFCPVACCLDPGGASYSCCRPLLDKWPTTLSRHLGGPCQVDAHCSAGHSCIFTVSGTSSCCPFPEAVACGDGHHCCPRGFHCSADGRSCFQRSGNNSVGAIQCPDSQFECPDFSTCCVMVDGSWGCCPMPQASCCEDRVHCCPHGAFCDLVHTRCITPTGTHPLAKKLPAQRTNRAVALSSSVMCPDARSRCPDGSTCCELAQWEVWLLPNAQRHLLLRSPALLPPRHCV

SEQ ID NO: 909591 - protein, 433 aa, Homo sapiens
MPTALPATPASLPSQGLPVAAPSQRPWHAGMAITAAHGASTAVQTGDPASKDQVTTPWVPSSALIVSSNARTSPRAVLWSMAPGGAAPCPRLPAVKTGCTAVRTVPSATWFTPAASHPRAPTPWQRSSLPRGLTGQWPCPARSCVRTHGPGALMVLPAVSLPSGKYGCCPMPNATCCSDHLHCCPQDTVCDLIQSKCLSKENATTDLLTKLPAHTVGDVKCDMEVSCPDGYTCCRLQSGAWGCCPFTQAVCCEDHIHCCPAGFTCDTQKGTCEQGPHQVPWMEKAPAHLSLPDPQALKRDVPCDNVSSCPSSDTCCQLTSGEWGCCPIPEAVCCSDHQHCCPQGYTCVAEGQCQRGSEIVAGLEKMPARRASLSHPRDIGCDQHTSCPVGQTCCPSLGRGLPGSNRHSRRGLKWNTVNHTRGVNTRGLILISV

SEQ ID NO: 909592 - protein, 271 aa, Homo sapiens; identical to SEQ ID NO: 909590

SEQ ID NO: 909593 - protein, 271 aa, Homo sapiens; identical to SEQ ID NO: 909590

SEQ ID NO: 909594 - protein, 271 aa, Homo sapiens; identical to SEQ ID NO: 909590

SEQ ID NO: 909595 - protein, 271 aa, Homo sapiens; identical to SEQ ID NO: 909590

SEQ ID NO: 909596 - protein, 273 aa, Homo sapiens
KAGFRIGRGDRGVGRRQTMWTLVSWVALTAGLVAGTRCPDGQFCPVACCLDPGGASYSCCRPLLDKWPTTLSRHLGGPCQVDAHCSAGHSCIFTVSGTSSCCPFPEAVACGDGHHCCPRGFHCSADGRSCFQRSGNNSVGAIQCPDSQFECPDFSTCCVMVDGSWGCCPMPQASCCEDRVHCCPHGAFCDLVHTRCITPTGTHPLAKKLPAQRTNRAVALSSSVMCPDARSRCPDGSTCCELAQWEVWLLPNAQQATGVRSLTGAQDMVWLIR

SEQ ID NO: 909597 - protein, 279 aa, Homo sapiens
KAGFRIGRGDRGVGRRQTMWTLVSWVALTAGLVAGTRCPDGQFCPVACCLDPGGASYSCCRPLLDKWPTTLSRHLGGPCQVDAHCSAGHSCIFTVSGTSSCCPFPEAVACGDGHHCCPRGFHCSADGRSCFQRSGNNSVGAIQCPERLVLDGSIEFPAVPCLSSQGPAHLLWLCNHLGFIISSLRVSVRPGEYREETNIWLKPSFSCCENKWMSLSPPSCCSGLAALRPGHWAPRPRKVFPVKDFDDDGQAETAALTDRLLALYPQILFDSVHTCTGIV

SEQ ID NO: 909598 - protein, 255 aa, Homo sapiens
MWTLVSWVALTAGLVAGTRCPDGQFCPVACCLDPGGASYSCCRPLLDKWPTTLSRHLGGPCQVDAHCSAGHSCIFTVSGTSSCCPFPEAVACGDGHHCCPRGFHCSADGRSCFQRSGNNSVGAIQCPDSQFECPDFSTCCVMVDGSWGCCPMPQASCCEDRVHCCPHGAFCDLVHTRCITPTGTHPLAKKLPAQRTNRAVALSSSVMCPDARSRCPDGSTCCELAQWEVWLLPNAQQATGVRSLTGAQDMVWLIR

SEQ ID NO: 909599 - protein, 229 aa, Homo sapiens
MWTLVSWVALTAGLVAGTRCPDGQFCPVACCLDPGGASYSCCRPLLDKWPTTLSRHLGGPCQVDAHCSAGHSCIFTVSGTSSCCPFPEAVACGDGHHCCPRGFHCSADGRSCFQRSGNNSVGAIQCPDSQFECPDFSTCCVMVDGSWGCCPMPQASCCEDRVHCCPHGAFCDLVHTRCITPTGTHPLAKKLPAQRTNRADGPLSSSGQCCPGRNVSPGGPWNGVPTLAC

SEQ ID NO: 909600 - protein, 253 aa, Homo sapiens
MWTLVSWVALTAGLVAGTRCPDGQFCPVACCLDPGGASYSCCRPLLDKWPTTLSRHLGGPCQVDAHCSAGHSCIFTVSGTSSCCPFPEAVACGDGHHCCPRGFHCSADGRSCFQRSGNNSVGAIQCPDSQFECPDFSTCCVMVDGSWGCCPMPQASCCEDRVHCCPHGAFCDLVHTRCITPTGTHPLAKKLPAQRTNRAVALSSSVMCPDARSRCPDGSTCCELAQWEVWLLPNAQRHLLLRSPALLPPRHCV

SEQ ID NO: 909601 - protein, 158 aa, Homo sapiens
  misc_feature (142)..(142): Xaa can be any naturally occurring amino acid
TLLRVTRKPRGTAVYVVLPDPQALKRDVPCDNVSSCPSSDTCCQLTSGEWGCCPIPEAVCCSDHQHCCPQGYTCVAEGQCQRGSEIVAGLEKMPARRASLSHPRDIGCDQHTSCPVGQTCCPSLGGSWACCQLPHCEDLQHXLPRLAYTTQPMNSGEQ

SEQ ID NO: 909602 - protein, 410 aa, Homo sapiens
MAPGGAAPCPRLPAVKTGCTAVRTVPSATWFTPAASHPRAPTPWQRSSLPRGLTGQWPCPARSCVRTHGPGALMVLPAVSLPSGKYGCCPMPNATCCSDHLHCCPQDTVCDLIQSKCLSKENATTDLLTKLPAHTVGDVKCDMEVSCPDGYTCCRLQSGAWGCCPFTQAVCCEDHIHCCPAGFTCDTQKGTCEQGPHQVPWMEKAPAHLSLPDPQALKRDVPCDNVSSCPSSDTCCQLTSGEWGCCPIPEAVCCSDHQHCCPQGYTCVAEGQCQRGSEIVAGLEKMPARRASLSHPRDIGCDQHTSCPVGQTCCPSLGGSWACCQLPHAVCCEDRQHCCPAGYTCNVKARSCEKEVVSAQPATFLARSPHVGVKDVECGEGHFCHDNQTCCRDNRQGWACCPYRQGRLLC

SEQ ID NO: 909603 - protein, 403 aa, Homo sapiens
MPTALPATPASLPSQGLPVAAPSQRPWHAGMAITAAHGASTAVQTGDPASKDQVTTPWVPSSALIVSSNARTSPRAVLWSMAPGGAAPCPRLPAVKTGCTAVCDLIQSKCLSKENATTDLLTKLPAHTVGDVKCDMEVSCPDGYTCCRLQSGAWGCCPFTQAVCCEDHIHCCPAGFTCDTQKGTCEQGPHQVPWMEKAPAHLSLPDPQALKRDVPCDNVSSCPSSDTCCQLTSGEWGCCPIPEAVCCSDHQHCCPQGYTCVAEGQCQRGSEIVAGLEKMPARRASLSHPRDIGCDQHTSCPVGQTCCPSLGGSWACCQLPHAVCCEDRQHCCPAGYTCNVKARSCEKEVVSAQPATFLARSPHVGVKDVECGEGHFCHDNQTCCRDNRQGWACCPYRQGRLLC

SEQ ID NO: 909604 - protein, 490 aa, Homo sapiens; identical to SEQ ID NO: 909581

SEQ ID NO: 909605 - protein, 490 aa, Homo sapiens; identical to SEQ ID NO: 909581

SEQ ID NO: 909606 - protein, 490 aa, Homo sapiens; identical to SEQ ID NO: 909581

SEQ ID NO: 909607 - protein, 412 aa, Homo sapiens
MPTALPATPASLPSQGLPVAAPSQRPWHAGMAITAAHGASTAVQTGDPASKDQVTTPWVPSSALIVSSNARTSPRAVLWSMAPGGAAPCPRLPAVKTGCTAVRTVPSATWFTPAASHPRAPTPWQRSSLPRGLTGQWPCPARSCVRTHGPGALMVLPAVSLPSGKYGCCPMPNATCCSDHLHCCPQDTVCDLIQSKCLSKENATTDLLTKLPAHTVGDVKCDMEVSCPDGYTCCRLQSGAWGCCPFTQAVCCEDHIHCCPAGFTCDTQKGTCEQGPHQVPWMEKAPAHLSLPDPQALKRDVPCDNVSSCPSSDTCCQLTSGEWGCCPIPEAVCCEDRQHCCPAGYTCNVKARSCEKEVVSAQPATFLARSPHVGVKDVECGEGHFCHDNQTCCRDNRQGWACCPYRQGRLLC

SEQ ID NO: 909608 - protein, 402 aa, Homo sapiens
MPTALPATPASLPSQGLPVAAPSQRPWHAGMAITAAHGASTAVQTGDPASKDQVTTPWVPSSALIVSSNARTSPRAVLWSMAPGGAAPCPRLPAVKTGCTAVRTVPSATWFTPAASHPRAPTPWQRSSLPRGLTGQWPCPARSCVRTHGPGALMVLPAVSLPSGKYGCCPMPNATCCSDHLHCCPQDTVCDLIQSKCLSKENATTDLLTKLPAHTVGDVKCDMEVSCPDGYTCCRLQSGAWGCCPFTQAVCCEDHIHCCPAGFTCDTQKGTCEQGPHQVPWMEKAPAHLSLPDPQALKRDVPCDNVSSCPSSDTCCQLTSGEWGCCPIPEKGVCVRTPGWWPRGNVLLREARNETAEEKRARVLSPQTGPPAGDPPREGTLGTTGTRPKPPGRTPPGPPPGP

SEQ ID NO: 909609 - protein, 271 aa, Homo sapiens; identical to SEQ ID NO: 909590

SEQ ID NO: 909610 - protein, 271 aa, Homo sapiens; identical to SEQ ID NO: 909590

SEQ ID NO: 909611 - protein, 270 aa, Homo sapiens
KAGFRIGRGDRGVGRRQTMWTLVSWVALTAGLVAGTRCPDGQFCPVACCLDPGGASYSCCRPLLDKWPTTLSRHLGGPCQVDAHCSAGHSCIFTVSGTSSCCPFPEAVACGDGHHCCPRGFHCSADGRSCFQRSGNNSVGAIQCPDSQFECPDFSTCCVMVDGSWGCCPMPQASCCEDRVHCCPHGAFCDLVHTRCITPTGTHPLAKKLPAQRTNRAVALSSSVMCPDARSRCPDGSTCCELAQWEVWLLPNAQQALCRHCCAQNGCRPY

SEQ ID NO: 909612 - protein, 306 aa, Homo sapiens
MGESPSLSGLVVSWVILSTGNNSVGAIQCPDSQFECPDFSTCCVMVDGSWGCCPMPQVQIWGRWGYVEGSGGRVGGQGQGVKTESGPFFLRLPAVKTGCTAVRTVPSATWFTPAASHPRAPTPWQRSSLPRGLTGQGEEVGEHQARGWGGASLTPSVGKSFLHPGCPSRLLLFQWPCPARSCVRTHGPGALMVLPAVSLPSGKYGCCPMPNLSEGLEPAWLCAPSHLALTRTLQGLCGMGLAGCLLGAWLMQGSCYPLVGDWGSASHQPGCSLCATEPGSDKDPPLSPLSHLLLRSPALLPPRHCV

SEQ ID NO: 909613 - protein, 58 aa, Homo sapiens
WFCMTFRKVFSNSVKTRKFRFVAELKGLDPARVNVPVIGGHAGKTIIPLISQVHAYDP

SEQ ID NO: 909614 - protein, 282 aa, Homo sapiens
DRKSGHSREAPESRRWAVWRSLESLPRHQLLCLPVGAPPAPAMLSALARPASAALRRSFSTSAQNNAKVAVLGASGGIGQPLSLLLKNSPLVSRLTLYDIAHTPGVAADLSHIETKAAVKGYLGPEQLPDCLKGCDVVVIPAGVPRKPGMTRDDLFNTNATIVATLTAACAQHCPEAMICVIANPVNSTIPITAEVFKKHGVYNPNKIFGVTTLDIVRANTFVAELKGLDPARVNVPVIGGHAGKTIIPLISQCTPKVDFPQDQLTALTGADPGGRHGGGQG

SEQ ID NO: 909615 - protein, 282 aa, Homo sapiens; identical to SEQ ID NO: 909614

SEQ ID NO: 909616 - protein, 277 aa, Homo sapiens
KARYEAGCESAEVWRSLESLPRHQLLCLPVGAPPAPAMLSALARPASAALRRSFSTSAQNNAKVAVLGASGGIGQPLSLLLKNSPLVSRLTLYDIAHTPGVAADLSHIETKAAVKGYLGPEQLPDCLKGCDVVVIPAGVPRKPGMTRDDLFNTNATIVATLTAACAQHCPEAMICVIANPVNSTIPITAEVFKKHGVYNPNKIFGVTTLDIVRANTFVAELKGLDPARVNVPVIGGHAGKTIIPLISQCTPKVDFPQDQLTALTGADPGGRHGGGQG

SEQ ID NO: 909617 - protein, 282 aa, Homo sapiens; identical to SEQ ID NO: 909614

SEQ ID NO: 909618 - protein, 282 aa, Homo sapiens; identical to SEQ ID NO: 909614

SEQ ID NO: 909619 - protein, 282 aa, Homo sapiens; identical to SEQ ID NO: 909614

SEQ ID NO: 909620 - protein, 282 aa, Homo sapiens; identical to SEQ ID NO: 909614

SEQ ID NO: 909621 - protein, 240 aa, Homo sapiens
MLSALARPASAALRRSFSTSAQNNAKVAVLGASGGIGQPLSLLLKNSPLVSRLTLYDIAHTPGVAADLSHIETKAAVKGYLGPEQLPDCLKGCDVVVIPAGVPRKPGMTRDDLFNTNATIVATLTAACAQHCPEAMICVIANPVNSTIPITAEVFKKHGVYNPNKIFGVTTLDIVRANTFVAELKGLDPARVNVPVIGGHAGKTIIPLISQCTPKVDFPQDQLTALTGADPGGRHGGGQG

SEQ ID NO: 909622 - protein, 282 aa, Homo sapiens; identical to SEQ ID NO: 909614

SEQ ID NO: 909623 - protein, 282 aa, Homo sapiens; identical to SEQ ID NO: 909614

SEQ ID NO: 909624 - protein, 244 aa, Homo sapiens
HVHATAIKGAVHATAIKGAVHATAIKGAVHATAIKNSSFNEQPLSLLLKNSPLVSRLTLYDIAHTPGVAADLSHIETKAAVKGYLGPEQLPDCLKGCDVVVIPAGVPRKPGMTRDDLFNTNATIVATLTAACAQHCPEAMICVIANPVNSTIPITAEVFKKHGVYNPNKIFGVTTLDIVRANTFVAELKGLDPARVNVPVIGGHAGKTIIPLISQCTPKVDFPQDQLTALTGADPGGRHGGGQG

SEQ ID NO: 909625 - protein, 304 aa, Homo sapiens
DRKSGHSREAPESRRWAVWRSLESLPRHQLLCLPVGAPPAPAMLSALARPASAALRRSFSTSAQNNAKVAVLGASGGIGQPLSLLLKNSPLVSRLTLYDIAHTPGVAADLSHIETKAAVKGTGRADPGDLLPVPSEARIRVLSYLGPEQLPDCLKGCDVVVIPAGVPRKPGMTRDDLFNTNATIVATLTAACAQHCPEAMICVIANPVNSTIPITAEVFKKHGVYNPNKIFGVTTLDIVRANTFVAELKGLDPARVNVPVIGGHAGKTIIPLISQCTPKVDFPQDQLTALTGADPGGRHGGGQG

SEQ ID NO: 909626 - protein, 226 aa, Homo sapiens
RPEVRSLSRGPREQALGSVEVVGVTSASPAPVPASRCPSRSSHALRPRPACQRCSPPQLQHLGPGYLGPEQLPDCLKGCDVVVIPAGVPRKPGMTRDDLFNTNATIVATLTAACAQHCPEAMICVIANPVNSTIPITAEVFKKHGVYNPNKIFGVTTLDIVRANTFVAELKGLDPARVNVPVIGGHAGKTIIPLISQCTPKVDFPQDQLTALTGADPGGRHGGGQG

SEQ ID NO: 909627 - protein, 230 aa, Homo sapiens
DRKSGHSREAPESRRWAVWRSLESLPRHQLLCLPVGAPPAPAMLSALARPASAALRRSFSTSAQNNAKVAVLGASGGIGQPLSLLLKNSPLVSRLTLYDIAHTPGVAADLSHIETKAAVKGYLGPEQLPDCLKGCDVVVIPAGVPRKPGMTRDDLFNTNATIVATLTAACAQHCPEAMICVIANPVNSTIPITAEVFKKHGVYNPNKMVWIQLESTSLSLVAMLGRPSSP

SEQ ID NO: 909628 - protein, 204 aa, Homo sapiens
DRKSGHSREAPESRRWAVWRSLESLPRHQLLCLPVGAPPAPAMLSALARPASAALRRSFSTSAQNNAKVAVLGASGGIGQPLSLLLKNSPLVSRLTLYDIAHTPGVAADLSHIETKAAVKGYLGPEQLPDCLKGCDVVVIPAGVPRKPGMTRDDLFNTNATIVATLTAACAQHCPEAMICVIANPVNSTIPIPHIIGENHVPDM

SEQ ID NO: 909629 - protein, 80 aa, Homo sapiens
GRVGREDELGDGIRDHLLLKRGDFADAQVSGEDDLGCHPRAEGLHQEGGRFREDPEVSRCDGWPVSLIYEGIMSLQSRCR

SEQ ID NO: 909630 - protein, 282 aa, Homo sapiens; identical to SEQ ID NO: 909614

SEQ ID NO: 909631 - protein, 282 aa, Homo sapiens; identical to SEQ ID NO: 909614

SEQ ID NO: 909632 - protein, 282 aa, Homo sapiens; identical to SEQ ID NO: 909614

SEQ ID NO: 909633 - protein, 282 aa, Homo sapiens; identical to SEQ ID NO: 909614

SEQ ID NO: 909634 - protein, 262 aa, Homo sapiens
QLLRFRTHASRCLPVGAPPAPAMLSALARPASAALRRSFSTSAQNNAKVAVLGASGGIGQPLSLLLKNSPLVSRLTLYDIAHTPGVAADLSHIETKAAVKGYLGPEQLPDCLKGCDVVVIPAGVPRKPGMTRDDLFNTNATIVATLTAACAQHCPEAMICVIANPVNSTIPITAEVFKKHGVYNPNKIFGVTTLDIVRANTFVAELKGLDPARVNVPVIGGHAGKTIIPLISQCTPKVDFPQDQLTALTGADPGGRHGGGQG

SEQ ID NO: 909635 - protein, 282 aa, Homo sapiens; identical to SEQ ID NO: 909614

SEQ ID NO: 909636 - protein, 282 aa, Homo sapiens; identical to SEQ ID NO: 909614

SEQ ID NO: 909637 - protein, 282 aa, Homo sapiens; identical to SEQ ID NO: 909614

SEQ ID NO: 909638 - protein, 282 aa, Homo sapiens; identical to SEQ ID NO: 909614

SEQ ID NO: 909639 - protein, 195 aa, Homo sapiens
DRKSGHSREAPESRRWAVWRSLESLPRHQLLCLPVGAPPAPAMLSALARPASAALRRSFSTSAQNNAKVAVLGASGGIGQPLSLLLKNSPLVSRLTLYDIAHTPGVAADLSHIETKAAVKGYLGPEQLPDCLKGCDVVVIPAGVPRKPGMTRDDLFNTNATIVATLTAACAQHCPEAMICVIANPVIHHPHKREV

SEQ ID NO: 909640 - protein, 238 aa, Homo sapiens
MALVPCQVLRMAILLSYCSILCNYKAIEMPSHQTYGGSWKFLTFIDLVIQAVFFGICVLTDLSSLLTRGSGNQEQERQLKKLISLRDWMLAVLAFPVGVFVVAVFWIIYAYDREMIYPKLLDNFIPGWLNHGMHTTVLPFILIEMRTSHHQYPSRSSGLTAICTFSVGYILWVCWVHHVTGMWVYPFLEHIGPGARIIFFGSTTILMNFLYLLGEVLNNYIWDTQKSMEEEKEKPKLE

SEQ ID NO: 909641 - protein, 135 aa, Homo sapiens
MIYPKLLDNFIPGWLNHGMHTTVLPFILIEMRTSHHQYPSRSSGLTAICTFSVGYILWVCWVHHVTGMWVYPFLEHIGPGARIIFFGSTTILMNFLYLLGEVLNNYIWDTQKSCAFGSAAIWQYESLKSRGPELF

SEQ ID NO: 909642 - protein, 238 aa, Homo sapiens; identical to SEQ ID NO: 909640

SEQ ID NO: 909643 - protein, 238 aa, Homo sapiens; identical to SEQ ID NO: 909640

SEQ ID NO: 909644 - protein, 238 aa, Homo sapiens; identical to SEQ ID NO: 909640

SEQ ID NO: 909645 - protein, 209 aa, Homo sapiens
IDFSTEYAFKYVTDHGLQVIQAVFFGICVLTDLSSLLTRGSGNQEQERQLKKLISLRDWMLAVLAFPVGVFVVAVFWIIYAYDREMIYPKLLDNFIPGWLNHGMHTTVLPFILIEMRTSHHQYPSRSSGLTAICTFSVGYILWVCWVHHVTGMWVYPFLEHIGPGARIIFFGSTTILMNFLYLLGEVLNNYIWDTQKSMEEEKEKPKLE

SEQ ID NO: 909646 - protein, 239 aa, Homo sapiens
MALVPCQVLRMAILLSYCSILCNYKAIEMPSHQTYGGSWKFLTFIDLVIQAVFFGICVLTDLSSLLTRGSGNQEQERQLKKLISLRDWMLAVLAFPVGVFVVAVFWIIYAYDREMIYPKLLDNFIPGWLNHGMHTTVLPFILIEMRTSHHQYPSRSSGLTAICTFSVGYILWVCWVHHVTGMWVYPFLEHIGPGARIIFFGSTTILMNFLYLLGEVLNNYIWDTQKNMKIKFMYLGPSS

SEQ ID NO: 909647 - protein, 220 aa, Homo sapiens
APARPAPPSRPPSLPPSRSRPLANMALVPCQVLRMAILLSYCSILCNYKAIEMPSHQTYGGSWKFLTFIDLVIQAVFFGICVLTDLSSLLTRGSGNQEQERQLKKLISLRDWMLAVLAFPVGVFVVAVFWIIYAYDREMIYPKLLDNFIPGWLNHGMGVLGASCNWHVGVPFPGTHWPRSQNHLLWVYNHLNELPVPAGRSSEQLYLGYTEKYGRRERKA

SEQ ID NO: 909648 - protein, 238 aa, Homo sapiens; identical to SEQ ID NO: 909640

SEQ ID NO: 909649 - protein, 239 aa, Homo sapiens; identical to SEQ ID NO: 909646

SEQ ID NO: 909650 - protein, 249 aa, Homo sapiens
MALVPCQVLRMAILLSYCSILCNYKAIEMPSHQTYGGSWKFLTFIDLVIQAVFFGICVLTDLSSLLTRGSGNQEQERQLKKLISLRDWMLAVLAFPVGVFVVAVFWIIYAYDREMIYPKLLDNFIPGWLNHGMHTTVLPFILIEMRTSHHQYPSRSSGLTAICTFSVGYILWVCWVHHVTGMWVYPFLEHIGPGARIIFFGSTTILMNFLYLLGEVLNNYIWDTQKSCAFGSAAIWQYESLKSRGPELF

SEQ ID NO: 909651 - protein, 257 aa, Homo sapiens
MALVPCQVLRMAILLSYCSILCNYKAIEMPSHQTYGGSWKFLTFIDLVIQAVFFGICVLTDLSSLLTRGSGNQEQERQLKKLISLRDWMLAVLAFPVGVFVVAVFWIIYAYDREMIYPKLLDNFIPGWLNHGMHTTVLPFILIEMRTSHHQYPSRSSGLTAICTFSVGYILWVCWVHHVTGMWVYPFLEHIGPGARIIFFGSTTILMNFLYLLGEDPLAPIRHGKAIPYSFLFRKALPFYDIAIANIRLFFLRDEVA

SEQ ID NO: 909652 - protein, 137 aa, Homo sapiens
MALVPCQVLRMAILLSYCSILCNYKAIEMPSHQTYGGSWKFLTFIDLVIQAVFFGICVLTDLSSLLTRGSGNQEQERQLKKLISLRDWMLAVLAFPVGVFVVAVFWIIYAYDREMIYPKLLDNFIPGWLNHGMHFKA

SEQ ID NO: 909653 - protein, 271 aa, Homo sapiens
SGSVPSLRAVTLTTKVCRFILEVTETTNLPADTNSRHIIKVLRMAILLSYCSILCNYKAIEMPSHQTYGGSWKFLTFIDLVIQAVFFGICVLTDLSSLLTRGSGNQEQERQLKKLISLRDWMLAVLAFPVGVFVVAVFWIIYAYDREMIYPKLLDNFIPGWLNHGMHTTVLPFILIEMRTSHHQYPSRSSGLTAICTFSVGYILWVCWVHHVTGMWVYPFLEHIGPGARIIFFGSTTILMNFLYLLGEVLNNYIWDTQKSMEEEKEKPKLE

SEQ ID NO: 909654 - protein, 71 aa, Homo sapiens
APARPAPPSRPPSLPPSRSRPLANMALVPCQVLRMAILLSYCSILCNYKAIEMPSHQTYGGSWKFLTFIDL

SEQ ID NO: 909655 - protein, 238 aa, Homo sapiens; identical to SEQ ID NO: 909640

SEQ ID NO: 909656 - protein, 283 aa, Homo sapiens
PTSHRARFPLEISAHFPSPRSTQRSHPHLGCLGGASWPGVPGPCERRSRMTKVLRMAILLSYCSILCNYKAIEMPSHQTYGGSWKFLTFIDLVIQAVFFGICVLTDLSSLLTRGSGNQEQERQLKKLISLRDWMLAVLAFPVGVFVVAVFWIIYAYDREMIYPKLLDNFIPGWLNHGMHTTVLPFILIEMRTSHHQYPSRSSGLTAICTFSVGYILWVCWVHHVTGMWVYPFLEHIGPGARIIFFGSTTILMNFLYLLGEVLNNYIWDTQKSMEEEKEKPKLE

SEQ ID NO: 909657 - protein, 318 aa, Homo sapiens
SGSVPSLRAVTLTTKVCRFILEVTETTNLPADTNSRHIIKVLRMAILLSYCSILCNYKAIEMPSHQTYGGSWKFLTFIDLMESHSVTRLECSGTISAHCNLCLLCSSYSPASASRVAGTTGVCHHARVIQAVFFGICVLTDLSSLLTRGSGNQEQERQLKKLISLRDWMLAVLAFPVGVFVVAVFWIIYAYDREMIYPKLLDNFIPGWLNHGMHTTVLPFILIEMRTSHHQYPSRSSGLTAICTFSVGYILWVCWVHHVTGMWVYPFLEHIGPGARIIFFGSTTILMNFLYLLGEVLNNYIWDTQKSMEEEKEKPKLE

SEQ ID NO: 909658 - protein, 186 aa, Homo sapiens
MALVPCQVLRMAILLSYCSILCNYKAIEMPSHQTYGGSWKFLTFIDLFVVAVFWIIYAYDREMIYPKLLDNFIPGWLNHGMHTTVLPFILIEMRTSHHQYPSRSSGLTAICTFSVGYILWVCWVHHVTGMWVYPFLEHIGPGARIIFFGSTTILMNFLYLLGEVLNNYIWDTQKSMEEEKEKPKLE

SEQ ID NO: 909659 - protein, 101 aa, Homo sapiens
CRLISEDPAGCFHQYPSRSSGLTAICTFSVGYILWVCWVHHVTGMWVYPFLEHIGPGARIIFFGSTTILMNFLYLLGEVLNNYIWDTQKSMEEEKEKPKLE

SEQ ID NO: 909660 - protein, 269 aa, Homo sapiens
APARPAPPSRPPSLPPSRSRPLANMALVPCQVLRMAILLSYCSILCNYKAIEMPSHQTYGGSWKFLTFIDLVIQAVFFGICVLTDLSSLLTRGSGNQEQERQLKKLISLRDWMLAVLAFPVGVFVVAVFWIIYAYDREMIYPKLLDNFIPGWLNHGMHTTVLPFILIEMRTSHHQYPSRSSGLTAICTFSVGYILWVCWVHHVTGMWVYPFLEHIGPGARIIFFGSTTILMNFLYLLGEVLNNYIWDTQKKPPSWQDMKIKFMYLGPSS

SEQ ID NO: 909661 - protein, 258 aa, Homo sapiens
MALVPCQVLRMAILLSYCSILCNYKAIEMPSHQTYGGSWKFLTFIDLVIQAVFFGICVLTDLSSLLTRGSGNQEQERQLKKLISLRDWMLAVLAFPVGVFVVAVFWIIYAYDREMIYPKLLDNFIPGWLNHGMHTTVLPFILIEMRTSHHQYPSRSSGLTAICTFSVGYILWVCWVHHVTGMWVYPFLEHIGPGARIIFFGSTTILMNFLYLLGEVLNNYIWDTQKSKYCLREHKTRELLPATVYAETEGKFHCSLFF

SEQ ID NO: 909662 - protein, 779 aa, Homo sapiens [sequence omitted]

SEQ ID NO: 909663 - protein, 526 aa, Homo sapiens
MLPTWWIVSSWLVWGVILFVYLVIRALRLWRTAKLQVTLKKYSVHLEDMATNSRAFTNLVRKALRLIQETEVISRGFTLVSAACPFNKAGQHPSQHLIGLRKAVYRTLRANFQAARLATLYMLKNYPLNSESDNVTNYICVVPFKELGLGLSEEQISEEEAHNFTDGFSLPALKVLFQLWVAQSSEFFRRVIILEDELEKLVCTKETQELVSEAYPILEQKLKLIQPHVQASNNCWEEAISQVDKLLRRNTDKKGKPEIACENPHCTVVPLKQPTLHIADKDPIPEEQELEAYVDDIDIDSDFRKDDFYYLSQEDKERQKREHEESKRVLQELKSVLGFKASEAERQKWKQLLFSDHAVLKSLSPVDPVEPISNSEPSMNSDMGKVSKNDTEEESNKSATTDNEISRTEYLCENSLEGKNKDNSSNEVFPQGAEERMCYQCESEDEPQADGSGLTTAPPTPRDSLQPSIKQRLARLQLSPDFTFTAGLAAEVAARSLSFTTMQEQTFGDEEEEQIIEENKNEIEEK

SEQ ID NO: 909664 - protein, 565 aa, Homo sapiens
MLKEWAIKQGILLKVAETIKSWIFFSQCNKKDDLLHKLDIGFRLDSLHTILQQEVLLQEDVELIELLDPSILSAGQSQQQENGHLPTLCSLATPNIWDLSMLFAFISLLVMLPTWWIVSSWLVWGVILFVYLVIRALRLWRTAKLQVTLKKYSVHLEDMATNSRAFTNLVRKALRLIQETEVISRGFTLVSAACPFNKAGQHPSQHLIGLRKAVYRTLRANFQAARLATLYMLKNYPLNSESDNVTNYICVVPFKELGLGLSEEQISEEEAHNFTDGFSLPALKVLFQLWVAQSSEFFRRLALLLSTANSPPGPLLTPALLPHRILSDVTQGLPHAHSACLEELKRSYEFYRYFETQHQSVPQCLSKTQQKSRELNNVHTAVRSLQLHLKALLNEVIILEDELEKLVCTKETQELVSEAYPILEQKLKLIQPHVQASNNCWEEAISQVDKLLRRNTDKKGKPEIACENPHCTVVPLKQPTLHIADKDPIPEEQELEAYVDDIDIDSDFRKDDFYYLSQEDKERQKREHEESKRVLQELKSVLGFKASEAERQKWKQLLFSDHGKH

SEQ ID NO: 909665 - protein, 731 aa, Homo sapiens
MLKEWAIKQGILLKVAETIKSWIFFSQCNKKDDLLHKLDIGFRLDSLHTILQQEVLLQEDVELIELLDPSILSAGQSQQQENGHLPTLCSLATPNIWDLSMLFAFISLLVMLPTWWIVSSWLVWGVILFVYLVIRALRLWRTAKLQVTLKKYSVHLEDMATNSRAFTNLVRKALRLIQETEVISRGFTLVSAACPFNKAGQHPSQHLIGLRKAVYRTLRANFQAARLATLYMLKNYPLNSESDNVTNYICVVPFKELGLGLSEEQISEEEAHNFTDGFSLPALKVLFQLWVAQSSEFFRRLALLLSTANSPPGPLLTPALLPHRILSDVTQGLPHAHSACLEELKRSYEFYRYFETQHQSVPQCLSKTQQKSRELNNVHTAVRSLQLHLKALLNEVIILEDELEKLVCTKETQELVSEAYPILEQKLKLIQPHVQASNNCWEEAISQVDKLLRRNTDKKGKPEIACENPHCTVVPLKQPTLHIADKDPIPEEQELEAYVDDIDIDSDFRKDDFYYLSQEDKERQKREHEESKRVLQELKSVLGFKASEAERQKWKQLLFSDHAVLKSLSPVDPVEPISNSEPSMNSDMGKVSKNDTEEESNKSATTDNEISRTEYLCENSLEGKNKDNSSNEVFPQGAEERMCYQCESEDEPQADGSGLTTAPPTPRDSLQPSIKQRLARLQLSPDFTFTAGLAAEVAARSLSFTTMQEQTFGDEEEEQIIEENKNEIEEK

SEQ ID NO: 909666 - protein, 731 aa, Homo sapiens; identical to SEQ ID NO: 909665

SEQ ID NO: 909667 - protein, 573 aa, Homo sapiens
MLKEWAIKQGILLKVAETIKSWIFFSQCNKKDDLLHKLDIGFRLDSLHTILQQEVLLQEDVELIELLDPSILSAGQSQQQENGHLPTLCSLATPNIWDLSMLFAFISLLVMLPTWWIVSSWLVWGVILFVYLVIRALRLWRTAKLQVTLKKYSVHLEDMATNSRAFTNLVRKALRLIQETEVISRGFTLVSAACPFNKAGQHPSQHLIGLRKAVYRTLRANFQAARLATLYMLKNYPLNSESDNVTNYICVVPFKELGLGLSEEQISEEEAHNFTDGFSLPALKVLFQLWVAQSSEFFRRLALLLSTANSPPGPLLTPALLPHRILSDVTQGLPHAHSACLEELKRSYEFYRYFETQHQSVPQCLSKTQQKSRELNNVHTAVRSLQLHLKALLNEVIILEDELEKLVCTKETQELVSEAYPILEQKLKLIQPHVQASNNCWEEAISQVDKLLRRNTDKKGKPEIACENPHCTVVPLKQPTLHIADKDPIPEEQELEAYVDDIDIDSDFRKDDFYYLSQEDKERQKREHEESKRVLQELKSVLGFKASEAERQKWKQLLFSDHVFLHIALKLCY

SEQ ID NO: 909668 - protein, 621 aa, Homo sapiens
MLPTWWIVSSWLVWGVILFVYLVIRALRLWRTAKLQVTLKKYSVHLEDMATNSRAFTNLVRKALRLIQETEVISRGFTLVSAACPFNKAGQHPSQHLIGLRKAVYRTLRANFQAARLATLYMLKNYPLNSESDNVTNYICVVPFKELGLGLSEEQISEEEAHNFTDGFSLPALKVLFQLWVAQSSEFFRRLALLLSTANSPPGPLLTPALLPHRILSDVTQGLPHAHSACLEELKRSYEFYRYFETQHQSVPQCLSKTQQKSRELNNVHTAVRSLQLHLKALLNEVIILEDELEKLVCTKETQELVSEAYPILEQKLKLIQPHVQASNNCWEEAISQVDKLLRRNTDKKGKPEIACENPHCTVVPLKQPTLHIADKDPIPEEQELEAYVDDIDIDSDFRKDDFYYLSQEDKERQKREHEESKRVLQELKSVLGFKASEAERQKWKQLLFSDHAVLKSLSPVDPVEPISNSEPSMNSDMGKVSKNDTEEESNKSATTDNEISRTEYLCENSLEGKNKDNSSNEVFPQGAEERMCYQCESEDEPQADGSGLTTAPPTPRDSLQPSIKQRLARLQLSPDFTFTAGLAAEVAARSLSFTTMQEQTFGDEEEEQIIEENKNEIEEK

SEQ ID NO: 909669 - protein, 779 aa, Homo sapiens [sequence omitted]

SEQ ID NO: 909670 - protein, 189 aa, Homo sapiens
MLKEWAIKQGILLKVAETIKSWIFFSQCNKKDDLLHKLDIGFRLDSLHTILQQEVLLQEDVELIELLDPSILSAGQSQQQENGHLPTLCSLATPNIWDLSMLFAFISLLVMLPTWWIVSSWLVWGVILFVYLVIRALRLWRTAKLQVTLKKYSVHLEDMATNSRAFTNLVRKALPPCRNRLLVMRRKNK

SEQ ID NO: 909671 - protein, 692 aa, Homo sapiens
MLKEWAIKQGILLKVAETIKSWIFFSQCNKKDDLLHKLDIGFRLDSLHTILQQEVLLQEDVELIELLDPSILSAGQSQQQENGHLPTLCSLATPNIWDLSMLFAFISLLVMLPTWWIVSSWLVWGVILFVYLVIRALRLWRTAKLQVTLKKYSVHLEDMATNSRAFTNLVRKALRLIQETEVISRGFTLVSAACPFNKAGQHPSQHLIGLRKAVYRTLRANFQAARLATLYMLKNYPLNSESDNVTNYICVVPFKELGLGLSEEQISEEEAHNFTDGFSLPALKVLFQLWVAQSSEFFRRLALLLSTANSPPGPLLTPALLPHRILSDVTQGLPHAHSACLEELKRSYEFYRYFETQHQSVPQCLSKTQQKSRELNNVHTAVRSLQLHLKALLNEVIILEDELEKLVCTKETQELVSEAYPILEQKLKLIQPHVQASNNCWEEAISQVDKLLRRNTDKKGKPEIACENPHCTVVPLKQPTLHIADKDPIPEEQELEAYVDDIDIDSDFRKDDFYYLSQEDKERQKREHEESKRVLQELKSVLGFKASEAERQKWKQLLFSDHAVLKSLSPVDPVEPISNSEPSMNSDMGKVSKNDTEEESNKSATTDNEISRTEYLCENSLEGKNKDNSSNEVFPQGAEERMCYQCESEDEPQADGSGLTTAPPTPRDSLQPSIKQRLARLQLSPDFTFTAG

SEQ ID NO: 909672 - protein, 287 aa, Homo sapiens
MTPEFDEEVVFENSPLYQYLQDLGHTDFEICSSLSPKTEKCTTEGQQKPPTRVLPKQGILLKVAETIKSWIFFSQCNKKDDLLHKLDIGFRLDSLHTILQQEVLLQEDVELIELLDPSILSAGQSQQQENGHLPTLCSLATPNIWDLSMLFAFISLLVMLPTWWIVSSWLVWGVILFVYLVIRALRLWRTAKLQVTLKKYSVHLEDMATNSRAFTNLVRKALRLIQETEVISRGFTLVSAACPFNKAGQHPSQHLIGLRKAVYRTLRANFQAARLATLYMLKNTPEL

SEQ ID NO: 909673 - protein, 463 aa, Homo sapiens
AQLRYGKPRFPQALWLVWGVILFVYLVIRALRLWRTAKLQVTLKKYSVHLEDMATNSRAFTNLVRKALRLIQETEVISRGFTLVSAACPFNKAGQHPSQHLIGLRKAVYRTLRANFQAARLATLYMLKNYPLNSESDNVTNYICVVPFKELGLGLSEEQISEEEAHNFTDGFSLPALKVLFQLWVAQSSEFFRRLALLLSTANSPPGPLLTPALLPHRILSDVTQGLPHAHSACLEELKRSYEFYRYFETQHQSVPQCLSKTQQKSRELNNVHTAVRSLQLHLKALLNEVIILEDELEKLVCTKETQELVSEAYPILEQKLKLIQPHVQASNNCWEEAISQVDKLLRRNTDKKGKPEIACENPHCTVVPLKQPTLHIADKDPIPEEQELEAYVDDIDIDSDFRKDDFYYLSQEDKERQKREHEESKRVLQELKSVLGFKASEAERQKWKQLLFSDHGVKSAWN

SEQ ID NO: 909674 - protein, 104 aa, Homo sapiens
MTPEFDEEVVFENSPLYQYLQDLGHTDFEICSSLSPKTEKCTTEGQQKPPTRVLPKVRTHAHSFWPNLLHFTLLAIQILLKHFHILPHTGKTIYFINSTKLSVR

SEQ ID NO: 909675 - protein, 779 aa, Homo sapiens [sequence omitted]

SEQ ID NO: 909676 - protein, 621 aa, Homo sapiens; identical to SEQ ID NO: 909668

SEQ ID NO: 909677 - protein, 500 aa, Homo sapiens
MLKNYPLNSESDNVTNYICVVPFKELGLGLSEEQISEEEAHNFTDGFSLPALKVLFQLWVAQSSEFFRRLALLLSTANSPPGPLLTPALLPHRILSDVTQGLPHAHSACLEELKRSYEFYRYFETQHQSVPQCLSKTQQKSRELNNVHTAVRSLQLHLKALLNEVIILEDELEKLVCTKETQELVSEAYPILEQKLKLIQPHVQASNNCWEEAISQVDKLLRRNTDKKGKPEIACENPHCTVVPLKQPTLHIADKDPIPEEQELEAYVDDIDIDSDFRKDDFYYLSQEDKERQKREHEESKRVLQELKSVLGFKASEAERQKWKQLLFSDHAVLKSLSPVDPVEPISNSEPSMNSDMGKVSKNDTEEESNKSATTDNEISRTEYLCENSLEGKNKDNSSNEVFPQGAEERMCYQCESEDEPQADGSGLTTAPPTPRDSLQPSIKQRLARLQLSPDFTFTAGLAAEVAARSLSFTTMQEQTFGDEEEEQIIEENKNEIEEK

SEQ ID NO: 909678 - protein, 569 aa, Homo sapiens
MLKEWAIKQGILLKVAETIKSWIFFSQCNKKDDLLHKLDIGFRLDSLHTILQQEVLLQEDVELIELLDPSILSAGQSQQQENGHLPTLCSLATPNIWDLSMLFAFISLLVMLPTWWIVSSWLVWGVILFVYLVIRALRLWRTAKLQVTLKKYSVHLEDMATNSRAFTNLVRKALRLIQETEVISRGFTLVSAACPFNKAGQHPSQHLIGLRKAVYRTLRANFQAARLATLYMLKNYPLNSESDNVTNYICVVPFKELGLGLSEEQISEEEAHNFTDGFSLPALKVLFQLWVAQSSEFFRRLALLLSTANSPPGPLLTPALLPHRILSDVTQGLPHAHSACLEELKRSYEFYRYFETQHQSVPQCLSKTQQKSRELNNVHTAVRSLQLHLKALLNEVIILEDELEKLVCTKETQELVSEAYPILEQKLKLIQPHVQASNNCWEEAISQVDKLLRRNTDKKGKPEIACENPHCTVVPLKQPTLHIADKDPIPEEQELEAYVDDIDIDSDFRKDDFYYLSQEDKERQKREHEESKRVLQELKSVLGFKASEAERQKWKQLLFSDHGVKSAWN

SEQ ID NO: 909679 - protein, 580 aa, Homo sapiens
MLKEWAIKQGILLKVAETIKSWIFFSQCNKKDDLLHKLDIGFRLDSLHTILQQEVLLQEDVELIELLDPSILSAGQSQQQENGHLPTLCSLATPNIWDLSMLFAFISLLVMLPTWWIVSSWLVWGVILFVYLVIRALRLWRTAKLQVTLKKYSVHLEDMATNSRAFTNLVRKALRLIQETEVISRGFTLVSAACPFNKAGQHPSQHLIGLRKAVYRTLRANFQAARLATLYMLKNYPLNSESDNVTNYICVVPFKELGLGLSEEQISEEEAHNFTDGFSLPALKVLFQLWVAQSSEFFRRLALLLSTANSPPGPLLTPALLPHRILSDVTQGLPHAHSACLEELKRSYEFYRYFETQHQSVPQCLSKTQQKSRELNNVHTAVRSLQLHLKALLNEVIILEDELEKLVCTKETQELVSEAYPILEQKLKLIQPHVQASNNCWEEAISQVDKLLRRNTDKKGKPEIACENPHCTVVPLKQPTLHIADKDPIPEEQELEAYVDDIDIDSDFRKDDFYYLSQEDKERQKREHEESKRVLQELKSVLGFKASEAERQKWKQLLFSDHAVLKSLSPVEPCGIFTLG

SEQ ID NO: 909680 - protein, 462 aa, Homo sapiens
MARVLGAPVALGLWSLCWSLAIATPLPPTSAHGNVAEGETKPDPDVTERCSDGWSFDATTLDDNGTMLFFKGEFVWKSHKWDRELISERWKNFPSPVDAAFRQGHNSVFLIKGDKVWVYPPEKKEKGYPKLLQDEFPGIPSPLDAAVECHRGECQAEGVLFFQGDREWFWDLATGTMKERSWPAVGNCSSALRWLGRYYCFQGNQFLRFDPVRGEVPPRYPRDVRDYFMPCPGRGHGHRNGTGHGNSTHHGPEYMRCSPHLVLSALTSDNHGATYAFSGTHYWRLDTSRDGWHSWPIAHQWPQGPSAVDAAFSWEEKLYLVQGTQVYVFLTKGGYTLVSGYPKRLEKEVGTPHGIILDSVDAAFICPGSSRLHIMAGRRLWWLDLKSGAQATWTELPWPHEKVDGALCMEKSLGPNSCSANGPGLYLIHGPNLYCYSDVEKLNAAKALPQPQNVTSLLGCTH

SEQ ID NO: 909681 - protein, 444 aa, Homo sapiens
MARVLGAPVALGLWSLCWSLAIATPLPPTSAHGNVAEGETKPDPDVTERCSDGWSFDATTLDDNGTMLFFKGEFVWKSHKWDRELISERWKNFPSPVDAAFRQGHNSVFLIKGDKVWVYPPASPLDAAVECHRGECQAEGVLFFQGDREWFWDLATGTMKERSWPAVGNCSSALRWLGRYYCFQGNQFLRFDPVRGEVPPRYPRDVRDYFMPCPGRGHGHRNGTGHGNSTHHGPEYMRCSPHLVLSALTSDNHGATYAFSGTHYWRLDTSRDGWHSWPIAHQWPQGPSAVDAAFSWEEKLYLVQGTQVYVFLTKGGYTLVSGYPKRLEKEVGTPHGIILDSVDAAFICPGSSRLHIMAGRRLWWLDLKSGAQATWTELPWPHEKVDGALCMEKSLGPNSCSANGPGLYLIHGPNLYCYSDVEKLNAAKALPQPQNVTSLLGCTH

SEQ ID NO: 909682 - protein, 462 aa, Homo sapiens
MLVSGHCHPSSSVSKAGTRSEGLSSGLGTSAHGNVAEGETKPDPDVTERCSDGWSFDATTLDDNGTMLFFKGEFVWKSHKWDRELISERWKNFPSPVDAAFRQGHNSVFLIKGDKVWVYPPEKKEKGYPKLLQDEFPGIPSPLDAAVECHRGECQAEGVLFFQGDREWFWDLATGTMKERSWPAVGNCSSALRWLGRYYCFQGNQFLRFDPVRGEVPPRYPRDVRDYFMPCPGRGHGHRNGTGHGNSTHHGPEYMRCSPHLVLSALTSDNHGATYAFSGTHYWRLDTSRDGWHSWPIAHQWPQGPSAVDAAFSWEEKLYLVQGTQVYVFLTKGGYTLVSGYPKRLEKEVGTPHGIILDSVDAAFICPGSSRLHIMAGRRLWWLDLKSGAQATWTELPWPHEKVDGALCMEKSLGPNSCSANGPGLYLIHGPNLYCYSDVEKLNAAKALPQPQNVTSLLGCTH

SEQ ID NO: 909683 - protein, 462 aa, Homo sapiens; identical to SEQ ID NO: 909680

SEQ ID NO: 909684 - protein, 366 aa, Homo sapiens
MARVLGAPVALGLWSLCWSLAIATPLPPTSAHGNVAEGETKPDPDVTERCSDGWSFDATTLDDNGTMLFFKGEFVWKSHKWDRELISERWKNFPSPVDAAFRQGHNSVFLIKGDKVWVYPPEKKEKGYPKLLQDEFPGIPSPLDAAVECHRGECQAEGVLFFQGQSRLESKNLEKWWVGSDARTHYWRLDTSRDGWHSWPIAHQWPQGPSAVDAAFSWEEKLYLVQGTQVYVFLTKGGYTLVSGYPKRLEKEVGTPHGIILDSVDAAFICPGSSRLHIMAGRRLWWLDLKSGAQATWTELPWPHEKVDGALCMEKSLGPNSCSANGPGLYLIHGPNLYCYSDVEKLNAAKALPQPQNVTSLLGCTH

SEQ ID NO: 909685 - protein, 409 aa, Homo sapiens
MARVLGAPVALGLWSLCWSLAIATPLPPTSAHGNVAEGETKPDPDVTERCSDGWSFDATTLDDNGTMLFFKGEFVWKSHKWDRELISERWKNFPSPVDAAFRQGHNSVFLIKGDKVWVYPPEKKEKGYPKLLQDEFPGIPSPLDAAVECHRGECQAEGVLFFQGDREWFWDLATGTMKERSWPAVGNCSSALRWLGRYYCFQGNQFLRFDPVRGEVPPRYPRDVRDYFMPCPGRGHGHRNGTGHGNSTHHGPEYMRCSPHLVLSALTSDNHGATYAFSGTHYWRLDTSRDGWHSWPIAHQWPQGPSAVDAAFSWEEKLYLVQGTQVYVFLTKGGYTLVSGYPKRLEKEVGTPHGIILDSVDAAFICPGSSRLHIMAGRRLWWLDLKSGAQATWTELPWPHEKVDVMWRN

SEQ ID NO: 909686 - protein, 387 aa, Homo sapiens
MARVLGAPVALGLWSLCWSLAIATPLPPTSAHGNVAEGETKPDPDVTERCSDGWSFDATTLDDNGTMLFFKGEFVWKSHKWDRELISERWKNFPSPVDAAFRQGHNSVFLIKGDKVWVYPPEKKEKGYPKLLQDEFPGIPSPLDAAVECHRGECQAEGVLFFQGDREWFWDLATGTMKERSWPAVGNCSSALRWLGRYYCFQGNQFLRFDPVRGEVPPRYPRDVRDYFMPCPGRGHGHRNGTGHGNSTHHGPEYMRCSPHLVLSALTSDNHGATYAFSGTHYWRLDTSRDGWHSWPIAHQWPQGPSAVDAAFSWEEKLYLVQYPSKRLSEAAGEGSRDPSWDYPGLCGCGLYLPWVFSAPYHGRTAAVVAGPEVRSPSHVDRASLAP

SEQ ID NO: 909687 - protein, 174 aa, Homo sapiens
MARVLGAPVALGLWSLCWSLAIATPLPPTSAHGNVAEGETKPDPDVTERCSDGWSFDATTLDDNGTMLFFKGEFVWKSHKWDRELISERWKNFPSPVDAAFRQGHNSVFLIKGDKVWVYPPEKKEKGYPKLLQDEFPGIPSPLDAAVECHRGECQAEGVLFFQGQSRLESKNLE

SEQ ID NO: 909688 - protein, 250 aa, Homo sapiens
MARVLGAPVALGLWSLCWSLAIATPLPPTSAHGNVAEGETKPDPDVTERCSDGWSFDATTLDDNGTMLFFKGEFVWKSHKWDRELISERWKNFPSPVDAAFRQGHNSVFLIKGDKVWVYPPEKKEKGYPKLLQDEFPGIPSPLDAAVECHRGECQAEGVLFFQGDREWFWDLATGTMKERSWPAVGNCSSALRWLGRYYCFQGNQFLRFDPVRGEVPPRYPRDVRDYFMPCPGRGHGHRNGTGHGNIYAL

SEQ ID NO: 909689 - protein, 387 aa, Homo sapiens; identical to SEQ ID NO: 909686

SEQ ID NO: 909690 - protein, 549 aa, Homo sapiens
MARVLGAPVALGLWSLCWSLAIATPLPPTSAHGNVAEGETKPDPDVTERCSDGWSFDATTLDDNGTMLFFKGEFVWKSHKWDRELISERWKNFPSPVDAAFRQGHNSVFLIKGDKVWVYPPEKKEKGYPKLLQDEFPGIPSPLDAAVECHRGECQAEGVLFFQGDREWFWDLATGTMKERSWPAVGNCSSALRWLGRYYCFQGNQFLRFDPVRGEVPPRYPRDVRDYFMPCPGRGEKALALETCQNSSTFPELVDLTCPSSHFNSVLRHLALNLAPFPFWIFPLPSYGETHTPLTPAISSTLDLTLTSGLLLCSPHPFLSPGHGHRNGTGHGNSTHHGPEYMRCSPHLVLSALTSDNHGATYAFSGTHYWRLDTSRDGWHSWPIAHQWPQGPSAVDAAFSWEEKLYLVQGTQVYVFLTKGGYTLVSGYPKRLEKEVGTPHGIILDSVDAAFICPGSSRLHIMAGRRLWWLDLKSGAQATWTELPWPHEKVDGALCMEKSLGPNSCSANGPGLYLIHGPNLYCYSDVEKLNAAKALPQPQNVTSLLGCTH

SEQ ID NO: 909691 - protein, 444 aa, Homo sapiens
MLFQRFRNVCFPVGRKLRRVEKGSETFGTSAHGNVAEGETKPDPDVTERCSDGWSFDATTLDDNGTMLFFKGEFVWKSHKWDRELISERWKNFPSPVDAAFRQGHNSVFLIKGDKVWVYPPASPLDAAVECHRGECQAEGVLFFQGDREWFWDLATGTMKERSWPAVGNCSSALRWLGRYYCFQGNQFLRFDPVRGEVPPRYPRDVRDYFMPCPGRGHGHRNGTGHGNSTHHGPEYMRCSPHLVLSALTSDNHGATYAFSGTHYWRLDTSRDGWHSWPIAHQWPQGPSAVDAAFSWEEKLYLVQGTQVYVFLTKGGYTLVSGYPKRLEKEVGTPHGIILDSVDAAFICPGSSRLHIMAGRRLWWLDLKSGAQATWTELPWPHEKVDGALCMEKSLGPNSCSANGPGLYLIHGPNLYCYSDVEKLNAAKALPQPQNVTSLLGCTH

SEQ ID NO: 909692 - protein, 439 aa, Homo sapiens
MARVLGAPVALGLWSLCWSLAIATPLPPTSAHGNVAEGETKPDPDVTERCSDGWSFDATTLDDNGTMLFFKGEFVWKSHKWDRELISERWKNFPSPVDAAFRQGHNSVFLIKGDKVWVYPPEKKEKGYPKLLQDEFPGIPSPLDAAVECHRGECQAEGVLFFQGDREWFWDLATGTMKERSWPAVGNCSSALRWLGRYYCFQGNQFLRFDPVRGEVPPRYPRDVRDYFMPCPGRGHGHRNGTGHGNSTHHGPEYMRCSPHLVLSALTSDNHGATYAFSGTHYWRLDTSRDGWHSWPIAHQWPQGPSAVDAAFSWEEKLYLVQGTQVYVFLTKGGYTLVSGYPKRLEKEVGTPHGIILDSVDAAFICPGSSRLHIMAGRRLWWLDLKSGAQATWTELPWPHEKVDVHGPNLYCYSDVEKLNAAKALPQPQNVTSLLGCTH

SEQ ID NO: 909693 - protein, 373 aa, Homo sapiens
MKERSWPAVGNCSSALRWLGRYYCFQGNQFLRFDPVRGEVPPRYPRDVRDYFMPCPGRGEKALALETCQNSSTFPELVDLTCPSSHFNSVLRHLALNLAPFPFWIFPLPSYGETHTPLTPAISSTLDLTLTSGLLLCSPHPFLSPGHGHRNGTGHGNSTHHGPEYMRCSPHLVLSALTSDNHGATYAFSGTHYWRLDTSRDGWHSWPIAHQWPQGPSAVDAAFSWEEKLYLVQGTQVYVFLTKGGYTLVSGYPKRLEKEVGTPHGIILDSVDAAFICPGSSRLHIMAGRRLWWLDLKSGAQATWTELPWPHEKVDGALCMEKSLGPNSCSANGPGLYLIHGPNLYCYSDVEKLNAAKALPQPQNVTSLLGCTH

SEQ ID NO: 909694 - protein, 121 aa, Homo sapiens
TLYREFNWSPRAVLWPLQLSMARVLGAPVALGLWSLCWSLAIATPLPPTSAHGNVAEGETKPDPDVTERCSDGWSFDATTLDDNEPCVWKSPLALTHVPPMVPACTSSMVPICTATVMWRN

SEQ ID NO: 909695 - protein, 255 aa, Homo sapiens
GPKRGAAPCRRGGAGAGRATPAGAVRGREPAPPWWRRPLAVQRQTHRVGSGLQPGREEGPGLRSGDSGPRRGAHTQAGRPGVRGLCAADQAPRASAPPMAEPLQPDPGAAEDAAAQAVETPGWKAPEDAGPQPGSYEIRHYGPAKWVSTSVESMDWDSAIQTGFTKLNSYIQGKNEKELSHDCILPARAAKQGSCLLSGGRCSREAERPQNIAQVSSLHPNPPQFQALWPSRSRVGPGPVTRSKCNLENTVTCLH

SEQ ID NO: 909696 - protein, 303 aa, Homo sapiens
GPKRGAAPCRRGGAGAGRATPAGAVRGREPAPPWWRRPLAVQRQTHRVGSGLQPGREEGPGLRSGDSGPRRGAHTQAGRPGVRGLCAADQAPRASAPPMAEPLQPDPGAAEDAAAQAVETPGWKAPEDAGPQPGSYEIRHYGPAKWVSTSVESMDWDSAIQTGFTKLNSYIQGKNEKEMKIKMTAPVTSYVEPGSGPFSESTITISLYIPSEQQFDPPRPLESDVFIEDRAEMTVFVRSFDGFSSAQKNQEQLLTLASILREDGKVFDEKVYYTAGYNSPVKLLNRNNEVWLIQKNEPTKENE

SEQ ID NO: 909697 - protein, 303 aa, Homo sapiens; identical to SEQ ID NO: 909696

SEQ ID NO: 909698 - protein, 214 aa, Homo sapiens
GPKRGAAPCRRGGAGAGRATPAGAVRGREPAPPWWRRPLAVQRQTHRVGSGLQPGREEGPGLRSGDSGPRRGAHTQAGRPGVRGLCAADQAPRASAPPMAEPLQPDPGAAEDAAAQAVETPGWKAPEDAGPQPGSYEIRHYGPAKWVSTSVESMDWDSAIQTGFTKLNSYIQGKNEKEMKIKMTAPVTSYVEPGSGPFSLSMDFLVPKRIKNNF

SEQ ID NO: 909699 - protein, 214 aa, Homo sapiens; identical to SEQ ID NO: 909698

SEQ ID NO: 909700 - protein, 303 aa, Homo sapiens; identical to SEQ ID NO: 909696

SEQ ID NO: 909701 - protein, 303 aa, Homo sapiens; identical to SEQ ID NO: 909696

SEQ ID NO: 909702 - protein, 280 aa, Homo sapiens
GPKRGAAPCRRGGAGAGRATPAGAVRGREPAPPWWRRPLAVQRQTHRVGSGLQPGREEGPGLRSGDSGPRRGAHTQAGRPGVRGLCAADQAPRASAPPMAEPLQPDPGAPGSYEIRHYGPAKWVSTSVESMDWDSAIQTGFTKLNSYIQGKNEKEMKIKMTAPVTSYVEPGSGPFSESTITISLYIPSEQQFDPPRPLESDVFIEDRAEMTVFVRSFDGFSSAQKNQEQLLTLASILREDGKVFDEKVYYTAGYNSPVKLLNRNNEVWLIQKNEPTKENE

SEQ ID NO: 909703 - protein, 222 aa, Homo sapiens
GPKRGAAPCRRGGAGAGRATPAGAVRGREPAPPWWRRPLAVQRQTHRVGSGLQPGREEGPGLRSGDSGPRRGAHTQAGRPGVRGLCAADQAPRASAPPMAEPLQPDPGAAEDAAAQAVETPGWKAPEDAGPQPGSYEIRHYGPAKWVSTSVESMDWDSAIQTGFTKLNSYIQGKNEKEMKIKMTAPVTSYVEPGSGPFREGKRGNVQVKIESGKGASTGVLV

SEQ ID NO: 909704 - protein, 158 aa, Homo sapiens
ERAQPRDPRAGQRVRRDLGDKARPRAQLRRESGGAESVTRPLRAASPAPPPRAARAAMSEEKPKEGVKTENDHINLKVAGQDGSVVQFKIKRHTPLSKLMKAYCERQVRHLAPPQSLPVCALVLCVPGIPRARASRGWTQMQLPEVPSSWMGRRGLVL

SEQ ID NO: 909705 - protein, 147 aa, Homo sapiens
SLWCLLQEGVKTENDHINLKVAGQDGSVVQFKIKRHTPLSKLMKAYCERQGLSMRQIRFRFDGQPINETDTPAQGIILSWKELWTWKQTFFFETESRFVAQARMQWRSLSSLCKLCLLSSRHSPASASQVAGTIGAHHHSRLIFLYF

SEQ ID NO: 909706 - protein, 178 aa, Homo sapiens
ERAQPRDPRAGQRVRRDLGDKARPRAQLRRESGGAESVTRPLRAASPAPPPRAARAAMSEEKPKEGVKTENDHINLKVAGQDGSVVQFKIKRHTPLSKLMKAYCERQGLSMRQIRFRFDGQPINETDTPAQLENGGRGHHRRVPAADGRCAGEQPGRAQFLEGPSPARAVHPRIAVEW

SEQ ID NO: 909707 - protein, 178 aa, Homo sapiens; identical to SEQ ID NO: 909706

SEQ ID NO: 909708 - protein, 121 aa, Homo sapiens
MSEEKPKEGVKTENDHINLKVAGQDGSVVQFKIKRHTPLSKLMKAYCERQGLSMRQIRFRFDGQPINETDTPAQLENGGRGHHRRVPAADGRCAGEQPGRAQFLEGPSPARAVHPRIAVEW

SEQ ID NO: 909709 - protein, 178 aa, Homo sapiens; identical to SEQ ID NO: 909706

SEQ ID NO: 909710 - protein, 177 aa, Homo sapiens
ERAQPRDPRAGQRVRRDLGDKARPRAQLRRESGGAESVTRPLRAASPAPPPRAARAAMSEEKPKEGVKTENDHINLKVAGQDGSVVQFKIKRHTPLSKLMKAYCERQGLSMRQIRFRFDGQPINETDTPAQVRSWLRVVPGRLPICAGWRMEDEDTIDVFQQQTGGVPESSLAGHSF

SEQ ID NO: 909711 - protein, 159 aa, Homo sapiens
ERAQPRDPRAGQRVRRDLGDKARPRAQLRRESGGAESVTRPLRAASPAPPPRAARAAMSEEKPKEGVKTENDHINLKVAGQDGSVVQFKIKRHTPLSKLMKAYCERQGLSMRQIRFRFDGQPINETDTPAQWGCSCWTGIGGKVGREDRLSLAVTGTGD

SEQ ID NO: 909712 - protein, 178 aa, Homo sapiens; identical to SEQ ID NO: 909706

SEQ ID NO: 909713 - protein, 178 aa, Homo sapiens; identical to SEQ ID NO: 909706

SEQ ID NO: 909714 - protein, 178 aa, Homo sapiens; identical to SEQ ID NO: 909706

SEQ ID NO: 909715 - protein, 185 aa, Homo sapiens
HPRNGARKSGEAVLPAQRVSRVHEVPVPPALAASSLGLPALADVAAWPSSAPLTSADLGVVGPPSASVSSQEGVKTENDHINLKVAGQDGSVVQFKIKRHTPLSKLMKAYCERQGLSMRQIRFRFDGQPINETDTPAQLENGGRGHHRRVPAADGRCAGEQPGRAQFLEGPSPARAVHPRIAVEW

SEQ ID NO: 909716 - protein, 93 aa, Homo sapiens
YTNRARVPSGTSKLMKAYSERQGLSMRQIRFRFDGQPINETDTPAQLENGGRGHHRRVPAADGRCAGEQPGRAQFLEGPSPARAVHPRIAVEW

SEQ ID NO: 909717 - protein, 166 aa, Homo sapiens
ERAQPRDPRAGQRVRRDLGDKARPRAQLRRESGGAESVTRPLRAASPAPPPRAARAAMSEEKPKEGVKTENDHINLKVAGQDGSVVQFKIKRHTPLSKLMKAYCERQGLSMRQIRFRFDGQPINETDTPAQLENGGRGHHRLLLNGEHVTMPTTKVSAETRGHSPR

SEQ ID NO: 909718 - protein, 178 aa, Homo sapiens; identical to SEQ ID NO: 909706

SEQ ID NO: 909719 - protein, 1592 aa, Homo sapiens [sequence omitted]

SEQ ID NO: 909720 - protein, 1411 aa, Homo sapiens
RRLLLLNSRPPDHVRIKQMGKNASGQTHYLSLSGFELYGTVNGVCEDQLGKAAKEAEANLRRQRRLVRSQVLKYMVPGARVIRGLDWKWRDQDGSPQGEGTVTGELHNGWIDVTWDAGGSNSYRMGAEGKFDLKLAPGYDPDTVASPKPVSSTVSGTTQSWSSLVKNNCPDKTSAAAGSSSRKGSSSSVCSVASSSDISLGSTKTERRSEIVMEHSIVSGADVHEPIVVLSSAENVPQTEVGSSSSASTSTLTAETGSENAERKLGPDSSVRTPGESSAISMGIVSVSSPDVSSVSELTNKEAASQRPLSSSASNRLSVSSLLAAGAPMSSSASVPNLSSRETSSLESFVRRVANIARTNATNNMNLSRSSSDNNTNTLGRNVMSTATSPLMGAQSFPNLTTPGTTSTVTMSTSSVTSSSNVATATTVLSVGQSLSNTLTTSLTSTSSESDTGQEAEYSLYDFLDSCRASTLLAELDDDEDLPEPDEEDDENEDDNQEDQEYEEVMILRRPSLQRRAGSRSDVTHHAVTSQLPQVPAGAGSRPIGEQEEEEYETKGGRRRTWDDDYVLKRQFSALVPAFDPRPGRTNVQQTTDLEIPPPGTPHSELLEEVECTPSPRLALTLKVTGLGTTREVELPLTNFRSTIFYYVQKLLQLSCNGNVKSDKLRRIWEPTYTIMYREMKDSDKEKENGKMGCWSIEHVEQYLGTDELPKNDLITYLQKNADAAFLRHWKLTGTNKSIRKNRNCSQLIAAYKDFCEHGTKSGLNQGAISTLQSSDILNLTKEQPQAKAGNGQNSCGVEDVLQLLRILYIVASDPYSRISQEDGDEQPQFTFPPDEFTSKKITTKILQQIEEPLALASGALPDWCEQLTSKCPFLIPFETRQLYFTCTAFGASRAIVWLQNRREATVERTRTTSSVRRDDPGEFRVGRLKHERVKVPRGESLMEWAENVMQIHADRKSVLEVEFLGEEGTGLGPTLEFYALVAAEFQRTDLGAWLCDDNFPDDESRHVDLGGGLKPPGYYVQRSCGLFTAPFPQDSDELERITKLFHFLGIFLAKCIQDNRLVDLPISKPFFKLMCMGDIKSNMSKLIYESRGDRDLHCTESQSEASTEEGHDSLSVGSFEEDSKSEFILDPPKPKPPAWFNGILTWEDFELVNPHRARFLKEIKDLAIKRRQILSNKGLSEDEKNTKLQELVLKNPSGSGPPLSIEDLGLNFQFCPSSRIYGFTAVDLKPSGEDEMITMDNAEEYVDLMFDFCMHTGIQKQMEAFRDGFNKVFPMEKLSSFSHEEVQMILCGNQSPSWAAEDIINYTEPKLGYTRDSPGFLRFVRVLCGMSSDERKAFLQFTTGCSTLPPGGLANLHPRLTVVRKVDATDASYPSVNTCVHYLKLPEYSSEEIMRERLLAATMEKGFHLN

SEQ ID NO: 909721 - protein, 1416 aa, Homo sapiens
MLKMEPLATVESLEQYLLKMVAKQWYDFDRSSFVFVRKLREGQNFIFRHQHDFDENGIIYWIGTNAKTAYEWVNPAAYGLVVVTSSEGRNLPYGRLEDILSRDNSALNCHSNDDKNAWFAIDLGLWVIPSAYTLRHARGYGRSALRNWVFQVSKDGQNWTSLYTHVDDCSLNEPGSTATWPLDPPKDEKQGWRHVRIKQMGKNASGQTHYLSLSGFELYGTVNGVCEDQLGKAAKEAEANLRRQRRLVRSQVLKYMVPGARVIRGLDWKWRDQDGSPQGEGTVTGELHNGTTQSWSSLVKNNCPDKTSAAAGSSSRKGSSSSVCSVASSSDISLGSTKTERRSEIVMEHSIVSGADVHEPIVVLSSAENVPQTEVGSSSSASTSTLTAETGSENAERKLGPDSSVRTPGESSAISMGIVSVSSPDVSSVSELTNKEAASQRPLSSSASHQLPVRVTQVRKQNIPYMISLIAAVPVLYWLSSMDDEDLPEPDEEDDENEDDNQEDQEYEEVMILRRPSLQRRAGSRSDVTHHAVTSQLPQVPAGAGSRPIGEQEEEEYETKGGRRRTWDDDYVLKRQFSALVPAFDPRPGRTNVQQTTDLEIPPPGTPHSELLEEVECTPSPRLALTLKVTGLGTTREVELPLTNFRSTIFYYVQKLLQLSCNGNVKSDKLRRIWEPTYTIMYREMKDSDKEKENGKMGCWSIEHVEQYLGTDELPKNDLITYLQKNADAAFLRHWKLTGTNKSIRKNRNCSQLIAAYKDFCEHGTKSGLNQGAISTLQSSDILNLTKEQPQAKAGNGQNSCGVEDVLQLLRILYIVASDPYSRISQEDGDEQPQFTFPPDEFTSKKITTKILQQIEEPLALASGALPDWCEQLTSKCPFLIPFETRQLYFTCTAFGASRAIVWLQNRREATVERTRTTSSVRRDDPGEFRVGRLKHERVKVPRGESLMEWAENVMQIHADRKSVLEVEFLGEEGTGLGPTLEFYALVAAEFQRTDLGAWLCDDNFPDDESRHVDLGGGLKPPGYYVQRSCGLFTAPFPQDSDELERITKLFHFLGIFLAKCIQDNRLVDLPISKPFFKLMCMGDIKSNMSKLIYESRGDRDLHCTESQSEASTEEGHDSLSVGSFEEDSKSEFILDPPKPKPPAWFNGILTWEDFELVNPHRARFLKEIKDLAIKRRQILSNKGLSEDEKNTKLQELVLKNPSGSGPPLSIEDLGLNFQFCPSSRIYGFTAVDLKPSGEDEMITMDNAEEYVDLMFDFCMHTGIQKQMEAFRDGFNKVFPMEKLSSFSHEEVQMILCGNQSPSWAAEDIINYTEPKLGYTRDSPGFLRFVRVLCGMSSDERKAFLQFTTGCSTLPPGGLANLHPRLTVVRKVDATDASYPSVNTCVHYLKLPEYSSEEIMRERLLAATMEKGFHLN

SEQ ID NO: 909722 - protein, 1536 aa, Homo sapiens
MLKMEPLATVESLEQYLLKMVAKQWYDFDRSSFVFVRKLREGQNFIFRHQHDFDENGIIYWIGTNAKTAYEWVNPAAYGLVVVTSSEGRNLPYGRLEDILSRDNSALNCHSNDDKNAWFAIDLGLWVIPSAYTLRHARGYGRSALRNWVFQVSKDGQNWTSLYTHVDDCSLNEPGSTATWPLDPPKDEKQGWRHVRIKQMGKNASGQTHYLSLSGFELYGTVNGVCEDQLGKAAKEAEANLRRQRRLVRSQVLKYMVPGARVIRGLDWKWRDQDGSPQGEGTVTGELHNGTTQSWSSLVKNNCPDKTSAAAGSSSRKGSSSSVCSVASSSDISLGSTKTERRSEIVMEHSIVSGADVHEPIVVLSSAENVPQTEVGSSSSASTSTLTAETGSENAERKLGPDSSVRTPGESSAISMGIVSVSSPDVSSVSELTNKEAASQRPLSSSASNRLSVSSLLAAGAPMSSSASVPNLSSRETSSLESFVRRVANIARTNATNNMNLSRSSSDNNTNTLGRNVMSTATSPLMGAQSFPNLTTPGTTSTVTMSTSSVTSSSNVATATTVLSVGQSLSNTLTTSLTSTSSESDTDFLDSCRASTLLAELDDDEDLPEPDEEDDENEDDNQEDQEYEEVMILRRPSLQRRAGSRSDVTHHAVTSQLPQVPAGAGSRPIGEQEEEEYETKGGRRRTWDDDYVLKRQFSALVPAFDPRPGRTNVQQTTDLEIPPPGTPHSELLEEVECTPSPRLALTLKVTGLGTTREVELPLTNFRSTIFYYVQKLLQLSCNGNVKSDKLRRIWEPTYTIMYREMKDSDKEKENGKMGCWSIEHVEQYLGTDELPKNDLITYLQKNADAAFLRHWKLTGTNKSIRKNRNCSQLIAAYKDFCEHGTKSGLNQGAISTLQSSDILNLTKEQPQAKAGNGQNSCGVEDVLQLLRILYIVASDPYSRISQEDGDEQPQFTFPPDEFTSKKITTKILQQIEEPLALASGALPDWCEQLTSKCPFLIPFETRQLYFTCTAFGASRAIVWLQNRREATVERTRTTSSVRRDDPGEFRVGRLKHERVKVPRGESLMEWAENVMQIHADRKSVLEVEFLGEEGTGLGPTLEFYALVAAEFQRTDLGAWLCDDNFPDDESRHVDLGGGLKPPGYYVQRSCGLFTAPFPQDSDELERITKLFHFLGIFLAKCIQDNRLVDLPISKPFFKLMCMGDIKSNMSKLIYESRGDRDLHCTESQSEASTEEGHDSLSVGSFEEDSKSEFILDPPKPKPPAWFNGILTWEDFELVNPHRARFLKEIKDLAIKRRQILSNKGLSEDEKNTKLQELVLKNPSGSGPPLSIEDLGLNFQFCPSSRIYGFTAVDLKPSGEDEMITMDNAEEYVDLMFDFCMHTGIQKQMEAFRDGFNKVFPMEKLSSFSHEEVQMILCGNQSPSWAAEDIINYTEPKLGYTRDSPGFLRFVRVLCGMSSDERKAFLQFTTGCSTLPPGGLANLHPRLTVVRKVDATDASYPSVNTCVHYLKLPEYSSEEIMRERLLAATMEKGFHLN

SEQ ID NO: 909723 - protein, 1545 aa, Homo sapiens
MLKMEPLATVESLEQYLLKMVAKQWYDFDRSSFVFVRKLREGQNFIFRHQHDFDENGIIYWIGTNAKTAYEWVNPAAYGLVVVTSSEGRNLPYGRLEDILSRDNSALNCHSNDDKNAWFAIDLGLWVIPSAYTLRHARGYGRSALRNWVFQVSKDGQNWTSLYTHVDDCSLNEPGSTATWPLDPPKDEKQGWRHVRIKQMGKNASGQTHYLSLSGFELYGTVNGVCEDQLGKAAKEAEANLRRQRRLVRSQVLKYMVPGARVIRGLDWKWRDQDGSPQGEGTVTGELHNGTTQSWSSLVKNNCPDKTSAAAGSSSRKGSSSSVCSVASSSDISLGSTKTERRSEIVMEHSIVSGADVHEPIVVLSSAENVPQTEVGSSSSASTSTLTAETGSENAERKLGPDSSVRTPGESSAISMGIVSVSSPDVSSVSELTNKEAASQRPLSSSASNRLSVSSLLAAGAPMSSSASVPNLSSRETSSLESFVRRVANIARTNATNNMNLSRSSSDNNTNTLGRNVMSTATSPLMGAQSFPNLTTPGTTSTVTMSTSSVTSSSNVATATTVLSVGQSLSNTLTTSLTSTSSESDTGQEAEYSLYDFLDSCRASTLLAELDDDEDLPEPDEEDDENEDDNQEDQEYEEVMILRRPSLQRRAGSRSDVTHHAVTSQLPQVPAGAGSRPIGEQEEEEYETKGGRRRTWDDDYVLKRQFSALVPAFDPRPGRTNVQQTTDLEIPPPGTPHSELLEEVECTPSPRLALTLKVTGLGTTREVELPLTNFRSTIFYYVQKLLQLSCNGNVKSDKLRRIWEPTYTIMYREMKDSDKEKENGKMGCWSIEHVEQYLGTDELPKNDLITYLQKNADAAFLRHWKLTGTNKSIRKNRNCSQLIAAYKDFCEHGTKSGLNQGAISTLQSSDILNLTKEQPQAKAGNGQNSCGVEDVLQLLRILYIVASDPYSRISQEDGDEQPQFTFPPDEFTSKKITTKILQQIEEPLALASGALPDWCEQLTSKCPFLIPFETRQLYFTCTAFGASRAIVWLQNRREATVERTRTTSSVRRDDPGEFRVGRLKHERVKVPRGESLMEWAENVMQIHADRKSVLEVEFLGEEGTGLGPTLEFYALVAAEFQRTDLGAWLCDDNFPDDESRHVDLGGGLKPPGYYVQRSCGLFTAPFPQDSDELERITKLFHFLGIFLAKCIQDNRLVDLPISKPFFKLMCMGDIKSNMSKLIYESRGDRDLHCTESQSEASTEEGHDSLSVGSFEEDSKSEFILDPPKPKPPAWFNGILTWEDFELVNPHRARFLKEIKDLAIKRRQILSNKGLSEDEKNTKLQELVLKNPSGSGPPLSIEDLGLNFQFCPSSRIYGFTAVDLKPSGEDEMITMDNAEEYVDLMFDFCMHTGIQKQMEAFRDGFNKVFPMEKLSSFSHEEVQMILCGNQSPSWAAEDIINYTEPKLGYTRDSPGFLRFVRVLCGMSSDERKAFLQFTTGCSTLPPGGLANLHPRLTVVRKVDATDASYPSVNTCVHYLKLPEYSSEEIMRERLLAATMEKGFHLN

SEQ ID NO: 909724 - protein, 1545 aa, Homo sapiens; identical to SEQ ID NO: 909723

SEQ ID NO: 909725 - protein, 1545 aa, Homo sapiens; identical to SEQ ID NO: 909723

SEQ ID NO: 909726 - protein, 153 aa, Homo sapiens
MQKQMEAFRDGFNKVFPMEKLSSFSHEEVQMILCGNQSPSWAAEDIINYTEPKLGYTRDSPGFLRFVRVLCGMSSDERKAFLQFTTGCSTLPPGGLANLHPRLTVVRKVDATDASYPSVNTCVHYLKLPEYSSEEIMRERLLAATMEKGFHLN

SEQ ID NO: 909727 - protein, 1107 aa, Homo sapiens
MLKMEPLATVESLEQYLLKMVAKQWYDFDRSSFVFVRKLREGQNFIFRHQHDFDENGIIYWIGTNAKTAYEWVNPAAYGLVVVTSSEGRNLPYGRLEDILSRDNSALNCHSNDDKNAWFAIDLGLWVIPSAYTLRHARGYGRSALRNWVFQVSKDGQNWTSLYTHVDDCSLNEPGSTATWPLDPPKDEKQGWRHVRIKQMGKNASGQTHYLSLSGFELYGTVNGVCEDQLGKAAKEAEANLRRQRRLVRSQVLKYMVPGARVIRGLDWKWRDQDGSPQGEGTVTGELHNGTTQSWSSLVKNNCPDKTSAAAGSSSRKGSSSSVCSVASSSDISLGSTKTERRSEIVMEHSIVSGADVHEPIVVLSSAENVPQTEVGSSSSASTSTLTAETGSENAERKLGPDSSVRTPGESSAISMGIVSVSSPDVSSVSELTNKEAASQRPLSSSASNRLSVSSLLAAGAPMSSSASVPNLSSRETSSLESFVRRVANIARTNATNNMNLSRSSSDNNTNTLGRNVMSTATSPLMGAQSFPNLTTPGTTSTVTMSTSSVTSSSNVATATTVLSVGQSLSNTLTTSLTSTSSESDTGQEAEYSLYDFLDSCRASTLLAELDDDEDLPEPDEEDDENEDDNQEDQEYEEVMILRRPSLQRRAGSRSDVTHHAVTSQLPQVPAGAGSRPIGEQEEEEYETKGGRRRTWDDDYVLKRQFSALVPAFDPRPGRTNVQQTTDLEIPPPGTPHSELLEEVECTPSPRLALTLKVTGLGTTREVELPLTNFRSTIFYYVQKLLQLSCNGNVKSDKLRRIWEPTYTIMYREMKDSDKEKENGKMGCWSIEHVEQYLGTDELPKNDLITYLQKNADAAFLRHWKLTGTNKSIRKNRNCSQLIAAYKDFCEHGTKSGLNQGAISTLQSSDILNLTKEQPQAKAGNGQNSCGVEDVLQLLRILYIVASDPYSRISQEDGDEQPQFTFPPDEFTSKKITTKILQQIEEPLALASGALPDWCEQLTSKCPFLIPFETRQLYFTCTAFGASRAIVWLQNRREATVERTRTTSSVRRDDPGEFRVGRLKHERVKVPRGESLMEWAENVMQIHADRKSVLEVISYKIRFREQE

SEQ ID NO: 909728 - protein, 721 aa, Homo sapiens
MLKMEPLATVESLEQYLLKMVAKQWYDFDRSSFVFVRKLREGQNFIFRHQHDFDENGIIYWIGTNAKTAYEWVNPAAYGLVVVTSSEGRNLPYGRLEDILSRDNSALNCHSNDDKNAWFAIDLGLWVIPSAYTLRHARGYGRSALRNWVFQVSKDGQNWTSLYTHVDDCSLNEPGSTATWPLDPPKDEKQGWRHVRIKQMGKNASGQTHYLSLSGFELYGTVNGVCEDQLGKAAKEAEANLRRQRRLVRSQVLKYMVPGARVIRGLDWKWRDQDGSPQGEGTVTGELHNGTTQSWSSLVKNNCPDKTSAAAGSSSRKGSSSSVCSVASSSDISLGSTKTERRSEIVMEHSIVSGADVHEPIVVLSSAENVPQTEVGSSSSASTSTLTAETGSENAERKLGPDSSVRTPGESSAISMGIVSVSSPDVSSVSELTNKEAASQRPLSSSASNRLSVSSLLAAGAPMSSSASVPNLSSRETSSLESFVRRVANIARTNATNNMNLSRSSSDNNTNTLGRNVMSTATSPLMGAQSFPNLTTPGTTSTVTMSTSSVTSSSNVATATTVLSVGQSLSNTLTTSLTSTSSESDTDFLDSCRASTLLAELDDDEDLPEPDEEDDENEDDNQEDQEYEEVMILRRPSLQRRAGSRSDVTHHAVTSQLPQVPAGAGSRPIGEQEEEEYETNEDIMERINRLASLFYVFSNAVWNLFMTTLSSHLSAPLVNSP

SEQ ID NO: 909729 - protein, 145 aa, Homo sapiens
MLKMEPLATVESLEQYLLKMVAKQWYDFDRSSFVFVRKLREGQNFIFRHQHDFDENGIIYWIGTNAKTAYEWVNPAAYGLVVVTSSEGRNLPYGRLEDILSRDNSALNCHSNDDKNAWFAIDLGLWVIPSAYTLRHARGYGRVHF

SEQ ID NO: 909730 - protein, 124 aa, Homo sapiens
ARGSGNQGCHVYNLRFVTCITSGNQGCHVYNPGFLRFVRVLCGMSSDERKAFLQFTTGCSTLPPGGLANLHPRLTVVRKVDATDASYPSVNTCVHYLKLPEYSSEEIMRERLLAATMEKGFHLN

SEQ ID NO: 909731 - protein, 1545 aa, Homo sapiens; identical to SEQ ID NO: 909723

SEQ ID NO: 909732 - protein, 1545 aa, Homo sapiens; identical to SEQ ID NO: 909723

SEQ ID NO: 909733 - protein, 1545 aa, Homo sapiens; identical to SEQ ID NO: 909723

SEQ ID NO: 909734 - protein, 1545 aa, Homo sapiens; identical to SEQ ID NO: 909723

SEQ ID NO: 909735 - protein, 1381 aa, Homo sapiens
MLKMEPLATVESLEQYLLKMVAKQWYDFDRSSFVFVRKLREGQNFIFRHQHDFDENGIIYWIGTNAKTAYEWVNPAAYGLVVVTSSEGRNLPYGRLEDILSRDNSALNCHSNDDKNAWFAIDLGLWVIPSAYTLRHARGYGRSALRNWVFQVSKDGQNWTSLYTHVDDCSLNEPGSTATWPLDPPKDEKQGWRHVRIKQMGKNASGQTHYLSLSGFELYGTVNGVCEDQLGKAAKEAEANLRRQRRLVRSQVLKYMVPGARVIRGLDWKWRDQDGSPQGEGTVTGELHNGTTQSWSSLVKNNCPDKTSAAAGSSSRKGSSSSVCSVASSSDISLGSTKTERRSEIVMEHSIVSGADVHEPIVVLSSAENVPQTEVGSSSSASTSTLTAETGSENAERKLGPDSSVRTPGESSAISMGIVSVSSPDVSSVSELTNKEAASQRPLSSSASNRLSVSSLLAAGAPMSSSASVPNLSSRETSSLESFVRRVANIARTNATNNMNLSRSSSDNNTNTLGRNVMSTATSPLMGAQSFPNLTTPGTTSTVTMSTSSVTSSSNVATATTVLSVGQSLSNTLTTSLTSTSSESDTGQEAEYSLYDFLDSCRASTLLAELDDDEDLPEPDEEDDENEDDNQEDQEYEEVMILRRPSLQRRAGSRSDVTHHAVTSQLPQVPAGAGSRPIGEQEEEEYETKGGRRRTWDDDYVLKRQFSALVPAFDPRPGRTNVQQTTDLEIPPPGTPHSELLEEVECTPSPRLALTLKVTGLGTTREVELPLTNFRSTIFYYVQKLLQLSCNGNVKSDKLRRIWEPTYTIMYREMKDSDKEKENGKMGCWSIEHVEQYLGTDELPKNDLITYLQKNADAAFLRHWKLTGTNKSIRKNRNCSQLIAAYKDFCEHGTKSGLNQGAISTLQSSDILNLTKEQPQAKAGNGQNSCGVEDVLQLLRILYIVASDPYSRISQEDGDEQPQFTFPPDEFTSKKITTKILQQIEEPLALASGALPDWCEQLTSKCPFLIPFETRQLYFTCTAFGASRAIVWLQNRREATVERTRTTSSVRRDDPGEFRVGRLKHERVKVPRGESLMEWAENVMQIHADRKSVLEVEFLGEEGTGLGPTLEFYALVAAEFQRTDLGAWLCDDNFPDDESRHVDLGGGLKPPGYYVQRSCGLFTAPFPQDSDELERITKLFHFLGIFLAKCIQDNRLVDLPISKPFFKLMCMGDIKSNMSKLIYESRGDRDLHCTESQSEASTEEGHDSLSVGSFEEDSKSEFILDPPKPKPPAWFNGILTWEDFELVNPHRARFLKEIKDLAIKRRQILSNKGLSEDEKNTKLQELVLKNPSGSGPPLSIEDLGLNFQFCPSSRIYGFTAVDLKPSGEDELLGQKSCFLKT

SEQ ID NO: 909736 - protein, 808 aa, Homo sapiens
MLKMEPLATVESLEQYLLKMVAKQWYDFDRSSFVFVRKLREGQNFIFRHQHDFDENGIIYWIGTNAKTAYEWVNPAAYGLVVVTSSEGRNLPYGRLEDILSRDNSALNCHSNDDKNAWFAIDLGLWVIPSAYTLRHARGYGRSALRNWVFQVSKDGQNWTSLYTHVDDCSLNEPGSTATWPLDPPKDEKQGWRHVRIKQMGKNASGQTHYLSLSGFELYGTVNGVCEDQLGKAAKEAEANLRRQRRLVRSQVLKYMVPGARVIRGLDWKWRDQDGSPQGEGTVTGELHNGTTQSWSSLVKNNCPDKTSAAAGSSSRKGSSSSVCSVASSSDISLGSTKTERRSEIVMEHSIVSGADVHEPIVVLSSAENVPQTEVGSSSSASTSTLTAETGSENAERKLGPDSSVRTPGESSAISMGIVSVSSPDVSSVSELTNKEAASQRPLSSSASNRLSVSSLLAAGAPMSSSASVPNLSSRETSSLESFVRRVANIARTNATNNMNLSRSSSDNNTNTLGRNVMSTATSPLMGAQSFPNLTTPGTTSTVTMSTSSVTSSSNVATATTVLSVGQSLSNTLTTSLTSTSSESDTGQEAEYSLYDFLDSCRASTLLAELDDDEDLPEPDEEDDENEDDNQEDQEYEEVMILRRPSLQRRAGSRSDVTHHAVTSQLPQVPAGAGSRPIGEQEEEEYETKGGRRRTWDDDYVLKRQFSALVPAFDPRPGRTNVQQTTDLEIPPPGTPHSELLEEVECTPSPRLALTLKVTGLGTTREVELPLTNFRSTIFYYVQKLLQLSCNGNVKSDKLRRIWEPTYT

SEQ ID NO: 909737 - protein, 598 aa, Homo sapiens
MLKMEPLATVESLEQYLLKMVAKQWYDFDRSSFVFVRKLREGQNFIFRHQHDFDENGIIYWIGTNAKTAYEWVNPAAYGLVVVTSSEGRNLPYGRLEDILSRDNSALNCHSNDDKNAWFAIDLGLWVIPSAYTLRHARGYGRSALRNWVFQVSKDGQNWTSLYTHVDDCSLNEPGSTATWPLDPPKDEKQGWRHVRIKQMGKNASGQTHYLSLSGFELYGTVNGVCEDQLGKAAKEAEANLRRQRRLVRSQVLKYMVPGARVIRGLDWKWRDQDGSPQGEGTVTGELHNGTTQSWSSLVKNNCPDKTSAAAGSSSRKGSSSSVCSVASSSDISLGSTKTERRSEIVMEHSIVSGADVHEPIVVLSSAENVPQTEVGSSSSASTSTLTAETGSENAERKLGPDSSVRTPGESSAISMGIVSVSSPDVSSVSELTNKEAASQRPLSSSASNRLSVSSLLAAGAPMSSSASVPNLSSRETSSLESFVRRVANIARTNATNNMNLSRSSSDNNTNTLGRNVMSTATSPLMGAQSFPNLTTPGTTSTVTMSTSSVTSSSNVATATTVLSVGQSLSNTLTTSLTSTSSESDTGQEAEYSLYGKL

SEQ ID NO: 909738 - protein, 726 aa, Homo sapiens
MNHSPLKTALAYECFQDQDNSTLALPSDQKMKTGTSGRQRVQEQVMMTVKRQKSKSSQSSTLSHSNRGSMYDGLADNYNYGTTSRSSYYSKFQAGNGSWGYPIYNGTLKREPDNRRFSSYSQMENWSRHYPRGSCNTTGAGSDICFMQKIKASRSEPDLYCDPRGTLRKGTLGSKGQKTTQNRYSFYSTCSGQKAIKKCPVRPPSCASKQDPVYIPPISCNKDLSFGHSRASSKICSEDIECSGLTIPKAVQYLSSQDEKYQAIGAYYIQHTCFQDESAKQQVYQLGGICKLVDLLRSPNQNVQQAAAGALRNLVFRSTTNKLETRRQNGIREAVSLLRRTGNAEIQKQLTGLLWNLSSTDELKEELIADALPVLADRVIIPFSGWCDGNSNMSREVVDPEVFFNATGCLRNLSSADAGRQTMRNYSGLIDSLMAYVQNCVAASRCDDKSVENCMCVLHNLSYRLDAEVPTRYRQLEYNARNAYTEKSSTGCFSNKSDKMMNNNYDCPLPEEETNPKGSGWLYHSDAIRTYLNLMGKSKKDATLEACAGALQNLTASKGLMSSGMSQLIGLKEKGLPQIARLLQSGNSDVVRSGASLLSNMSRHPLLHRVMGNQVFPEVTRLLTSHTGNTSNSEDILSSACYTVRNLMASQPQLAKQYFSSSMLNNIINLCRSSASPKAAEAARLLLSDMWSSKELQGVLRQQGFDRNMLGTLAGANSLRNFTSRF

SEQ ID NO: 909739 - protein, 726 aa, Homo sapiens; identical to SEQ ID NO: 909738

SEQ ID NO: 909740 - protein, 726 aa, Homo sapiens; identical to SEQ ID NO: 909738

SEQ ID NO: 909741 - protein, 726 aa, Homo sapiens; identical to SEQ ID NO: 909738

SEQ ID NO: 909742 - protein, 191 aa, Homo sapiens
GRLLLLNSRPRRPGALQNLTASKGLMSSGMSQLIGLKEKGLPQIARLLQSGNSDVVRSGASLLSNMSRHPLLHRVMGNQVFPEVTRLLTSHTGNTSNSEDILSSACYTVRNLMASQPQLAKQYFSSSMLNNIINLCRSSASPKAAEAARLLLSDMWSSKELQGVLRQQGFDRNMLGTLAGANSLRNFTSRF

SEQ ID NO: 909743 - protein, 323 aa, Homo sapiens
MDSKQQCVKLNDGHFMPVLGFGTYAPPEVPRSKALEVTKLAIEAGFRHIDSAHLYNNEEQVGLAIRSKIADGSVKREDIFYTSKLWSTFHRPELVRPALENSLKKAQLDYVDLYLIHSPMSLKPGEELSPTDENGKVIFDIVDLCTTWEAMEKCKDAGLAKSIGVSNFNRRQLEMILNKPGLKYKPVCNQVECHPYFNRSKLLDFCKSKDIVLVAYSALGSQRDKRWVDPNSPVLLEDPVLCALAKKHKRTPALIALRYQLQRGVVVLAKSYNEQRIRQNVQVFEFQLTAEDMKAIDGLDRNLHYFNSDSFASHPNYPYSDEY

SEQ ID NO: 909744 - protein, 321 aa, Homo sapiens
MDSKQQCVKLNDGHFMPVLGFGTYAPPEVPRSKALEVTKLAIEAGFRHIDSAHLYNNEEQVGLAIRSKIADGSVKREDIFYTSKLWSTFHRPELVRPALENSLKKAQLDYVDLYLIHSPMSLKPGEELSPTDENGKVIFDIVDLCTTWEAMEKCKDAGLAKSIGVSNFNRRQLEMILNKPGLKYKPVCNQVECHPYFNRSKLLDFCKSKDIVLVAYSALGSQRDKRWVDPNSPVLLEDPVLCALAKKHKRTPALIALRYQLQRGVVVLAKVKRGLKNGVGHVRVNKVRILRIGPIKKKRALHTWGEPGQRHQQKRAWWSAR

SEQ ID NO: 909745 - protein, 204 aa, Homo sapiens
MSLKPGEELSPTDENGKVIFDIVDLCTTWEAMEKCKDAGLAKSIGVSNFNRRQLEMILNKPGLKYKPVCNQVECHPYFNRSKLLDFCKSKDIVLVAYSALGSQRDKRWVDPNSPVLLEDPVLCALAKKHKRTPALIALRYQLQRGVVVLAKSYNEQRIRQNVQVFEFQLTAEDMKAIDGLDRNLHYFNSDSFASHPNYPYSDEY

SEQ ID NO: 909746 - protein, 204 aa, Homo sapiens; identical to SEQ ID NO: 909745

SEQ ID NO: 909747 - protein, 272 aa, Homo sapiens
MDSKQQCVKLNDGHFMPVLGFGTYAPPEVPRSKALEVTKLAIEAGFRHIDSAHLYNNEEQVGLAIRSKIADGSVKREDIFYTSKLWSTFHRPELVRPALENSLKKAQLDYVDLYLIHSPMSLKPGEELSPTDENGKVIFDIVDLCTTWEAMEKCKDAGLAKSIGVSNFNRRQLEMILNKPGLKYKPVCNQVECHPYFNRSKLLDFCKSKDIVLVAYSALGSQRDKRWVDPNSPVLLEDPVLCALASSVGLWSWPRATMSSASDRTCRFLSSS

SEQ ID NO: 909748 - protein, 134 aa, Homo sapiens
VALTVLSCIYRDLQPTAQIIPHNPFLHRAMEKCKDAGLAKSIGVSNFNRRQLEMILNKPGLKYKPVCNQVSSLGLLSFRFFMPPLPVLLPNICLFCPSYLCEVEDYLESKASVKKGVKISCLYPAWKSIREKLE

SEQ ID NO: 909749 - protein, 251 aa, Homo sapiens
MDSKQQCVKLNDGHFMPVLGFGTYAPPEVPRSKALEVTKLAIEAGFRHIDSAHLYNNEEQVGLAIRSKIADGSVKREDIFYTSKLWSTFHRPELVRPALENSLKKAQLDYVDLYLIHSPMSLKPGEELSPTDENGKVIFDIVDLCTTWEAMEKCKDAGLAKSIGVSNFNRRQLEMILNKPGLKYKPVCNQVECHPYFNRSKLLDFCKSKDIVLVAYSALGSQRDKRWDPTSRGLLEDPSFWPWEHKGPPGC

SEQ ID NO: 909750 - protein, 323 aa, Homo sapiens; identical to SEQ ID NO: 909743

SEQ ID NO: 909751 - protein, 204 aa, Homo sapiens; identical to SEQ ID NO: 909745

SEQ ID NO: 909752 - protein, 310 aa, Homo sapiens
SATVITRYYLWLLLQVPRSKALEVTKLAIEAGFRHIDSAHLYNNEEQVGLAIRSKIADGSVKREDIFYTSKLWSTFHRPELVRPALENSLKKAQLDYVDLYLIHSPMSLKPGEELSPTDENGKVIFDIVDLCTTWEAMEKCKDAGLAKSIGVSNFNRRQLEMILNKPGLKYKPVCNQVECHPYFNRSKLLDFCKSKDIVLVAYSALGSQRDKRWVDPNSPVLLEDPVLCALAKKHKRTPALIALRYQLQRGVVVLAKSYNEQRIRQNVQVFEFQLTAEDMKAIDGLDRNLHYFNSDSFASHPNYPYSDEY

SEQ ID NO: 909753 - protein, 309 aa, Homo sapiens
MDSKQQCVKLNDGHFMPVLGFGTYAPPEVPRSKALEVTKLAIEAGFRHIDSAHLYNNEEQVGLAIRSKIADGSVKREDIFYTSKLWSTFHRPELVRPALENSLKKAQLDYVDLYLIHSPMSLKPGEELSPTDENGAMEKCKDAGLAKSIGVSNFNRRQLEMILNKPGLKYKPVCNQVECHPYFNRSKLLDFCKSKDIVLVAYSALGSQRDKRWVDPNSPVLLEDPVLCALAKKHKRTPALIALRYQLQRGVVVLAKSYNEQRIRQNVQVFEFQLTAEDMKAIDGLDRNLHYFNSDSFASHPNYPYSDEY

SEQ ID NO: 909754 - protein, 226 aa, Homo sapiens
MPGGPGVLQALPATIFLLFLLSAVYLGPGCQALWMHKVPASLMVSLGEDAHFQCPHNSSNNANVTWWRVLHGNYTWPPEFLGPGEDPNGTLIIQNVNKSHGGIYVCRVQEGNESYQQSCGTYLRVRQPPPRPFLDMGEGTKNRIITAEGIILLFCAVVPGTLLLFRKRWQNEKLGLDAGDEYEDENLYEGLNLDDCSMYEDISRGLQGTYQDVGSLNIGDVQLEKP

SEQ ID NO: 909755 - protein, 193 aa, Homo sapiens
KTRLGTRLGGVVLQALPATIFLLFLLSAVYLGPGCQALWMHKVPASLMVSLGEDAHFQCPHNSSNNANVTWWRVLHGNYTWPPEFLGPGEDPNEPPPRPFLDMGEGTKNRIITAEGIILLFCAVVPGTLLLFRKRWQNEKLGLDAGDEYEDENLYEGLNLDDCSMYEDISRGLQGTYQDVGSLNIGDVQLEKP

SEQ ID NO: 909756 - protein, 226 aa, Homo sapiens; identical to SEQ ID NO: 909754

SEQ ID NO: 909757 - protein, 226 aa, Homo sapiens; identical to SEQ ID NO: 909754

SEQ ID NO: 909758 - protein, 309 aa, Homo sapiens
MPGGPGVLQALPATIFLLFLLSAVYLGPGCQALWMHKVPASLMVSLGEDAHFQCPHNSSNNANVTWWRVLHGNYTWPPEFLGPGEDPNGTLIIQNVNKSHGGIYVCRVQEGNESYQQSCGTYLRVRRREWPSPGPYSHCPAGDTRFIFEVGIEPVPSMWVSNRLGQRDGHSPLQSGVSGGSGALQEVGGARRLEEGKRGQGSEPYYLLAEPPPRPFLDMGEGTKNRIITAEGIILLFCAVVPGTLLLFRKRWQNEKLGLDAGDEYEDENLYEGLNLDDCSMYEDISRGLQGTYQDVGSLNIGDVQLEKP

SEQ ID NO: 909759 - protein, 203 aa, Homo sapiens
MPGGPGVLQALPATIFLLFLLSAVYLGPGCQALWMHKVPASLMVSLGEDAHFQCPHNSSNNANVTWWRVLHGNYTWPPEFLGPGEDPNGTLIIQNVNKSHGGIYVCRVQEGNESYQQSCGTYLRVRQPPPRPFLDMGEGTKNRIITAEGIILLFCAVVPGTLLLFRKRWQNEKLGLDAGDEYEDENLYEGLNLDDCSMYEDIG

SEQ ID NO: 909760 - protein, 181 aa, Homo sapiens
MPGGPGVLQALPATIFLLFLLSAVYLGPGCQALWMHKVPASLMVSLGEDAHFQCPHNSSNNANVTWWRVLHGNYTWPPEFLGPGEDPNGTLIIQNVNKSHGGIYVCRVQEGNESYQQSCGTYLRVRQPPPRPFLGHGGGAPKTRIFTPRGGQYPLIWGVEAWEALWFPLKTMGEIGRLWVG

SEQ ID NO: 909761 - protein, 188 aa, Homo sapiens
MPGGPGVLQALPATIFLLFLLSAVYLGPGCQALWMHKVPASLMVSLGEDAHFQCPHNSSNNANVTWWRVLHGNYTWPPEFLGPGEDPNEPPPRPFLDMGEGTKNRIITAEGIILLFCAVVPGTLLLFRKRWQNEKLGLDAGDEYEDENLYEGLNLDDCSMYEDISRGLQGTYQDVGSLNIGDVQLEKP

SEQ ID NO: 909762 - protein, 226 aa, Homo sapiens; identical to SEQ ID NO: 909754

SEQ ID NO: 909763 - protein, 193 aa, Homo sapiens; identical to SEQ ID NO: 909755

SEQ ID NO: 909764 - protein, 188 aa, Homo sapiens; identical to SEQ ID NO: 909761

SEQ ID NO: 909765 - protein, 299 aa, Homo sapiens
MEHFDASLSTYFKALLGPRDTRVKGWFLLDNYIPTFICSVIYLLIVWLGPKYMRNKQPFSCRGILVVYNLGLTLLSLYMFCELVTGVWEGKYNFFCQGTRTAGESDMKIIRVLWWYYFSKLIEFMDTFFFILRKNNHQITVLHVYHHASMLNIWWFVMNWVPCGHSYFGATLNSFIHVLMYSYYGLSSVPSMRPYLWWKKYITQGQLLQFVLTIIQTSCGVIWPCTFPLGWLYFQIGYMISLIALFTNFYIQTYNKKGASRRKDHLKDHQNGSMAAVNGHTNSFSPLENNVKPRKLRKD

SEQ ID NO: 909766 - protein, 221 aa, Homo sapiens
MNYHLVTGVWEGKYNFFCQGTRTAGESDMKIIRVLWWYYFSKLIEFMDTFFFILRKNNHQITVLHVYHHASMLNIWWFVMNWVPCGHSYFGATLNSFIHVLMYSYYGLSSVPSMRPYLWWKKYITQGQLLQFVLTIIQTSCGVIWPCTFPLGWLYFQIGYMISLIALFTNFYIQTYNKKGASRRKDHLKDHQNGSMAAVNGHTNSFSPLENNVKPRKLRKD

SEQ ID NO: 909767 - protein, 193 aa, Homo sapiens
MKIIRVLWWYYFSKLIEFMDTFFFILRKNNHQITVLHVYHHASMLNIWWFVMNWVPCGHSYFGATLNSFIHVLMYSYYGLSSVPSMRPYLWWKKYITQGQLLQFVLTIIQTSCGVIWPCTFPLGWLYFQIGYMISLIALFTNFYIQTYNKKGASRRKDHLKDHQNGSMAAVNGHTNSFSPLENNVKPRKLRKD

SEQ ID NO: 909768 - protein, 262 aa, Homo sapiens
MEHFDASLSTYFKALLGPRDTRVKGWFLLDNYIPTFICSVIYLLIVWLGPKYMRNKQPFSCRGILVVYNLGLTLLSLYMFCELVTGVWEGKYNFFCQGTRTAGESDMKIIRVLWWYYFSKLIEFMDTFFFILRKNNHQITVLHVYHHASMLNIWWFVMNWVPCGHSSVCADNHPDQLRGHLAVHIPSWLVVFPDWIHDFPDCSLHKLLHSDLQQERGLPKERPPEGPPEWVHGCCEWTHQQLFTPGKQCEAKEAAEGLKSKN

SEQ ID NO: 909769 - protein, 299 aa, Homo sapiens; identical to SEQ ID NO: 909765

SEQ ID NO: 909770 - protein, 299 aa, Homo sapiens; identical to SEQ ID NO: 909765

SEQ ID NO: 909771 - protein, 275 aa, Homo sapiens
MEHFDASLSTYFKALLGPRDTRVKGWFLLDNYIPTFICSVIYLLIVWLGPKYMRNKQPFSCRGILVVYNLGLTLLSLYMFCELVTGVWEGKYNFFCQGTRTAGESDMKIIRVLWWYYFSKLIEFMDTFFFILRKNNHQITVLHVYHHASMLNIWWFVMNWVPCGHSYFGATLNSFIHVLMYSYYGLSSVPSMRPYLWWKKYITQGQLLQFVLTIIQTSCGVIWPCTFPLGWLYFQIGYMISLIALFTNFYIQVNLTLLWDLESGAFTNKGPHLFT

SEQ ID NO: 909772 - protein, 121 aa, Homo sapiens
MEHFDASLSTYFKALLGPRDTRVKGWFLLDNYIPTFICSVIYLLIVWLGPKYMRNKQPFSCRGILVVYNLGLTLLSLYMFCELVTGVWEGKYNFFCQGTRTAGESDMKALSSVVPFVGVGG

SEQ ID NO: 909773 - protein, 299 aa, Homo sapiens; identical to SEQ ID NO: 909765

SEQ ID NO: 909774 - protein, 193 aa, Homo sapiens; identical to SEQ ID NO: 909767

SEQ ID NO: 909775 - protein, 143 aa, Homo sapiens
SDLEDPERPPYFGATLNSFIHVLMYSYYGLSSVPSMRPYLWWKKYITQGQLLQFVLTIIQTSCGVIWPCTFPLGWLYFQIGYMISLIALFTNFYIQTYNKKGASRRKDHLKDHQNGSMAAVNGHTNSFSPLENNVKPRKLRKD

SEQ ID NO: 909776 - protein, 299 aa, Homo sapiens; identical to SEQ ID NO: 909765

SEQ ID NO: 909777 - protein, 299 aa, Homo sapiens; identical to SEQ ID NO: 909765

SEQ ID NO: 909778 - protein, 275 aa, Homo sapiens; identical to SEQ ID NO: 909771

SEQ ID NO: 909779 - protein, 418 aa, Homo sapiens
RWVGGASGRGGSSLFCLAAAAPFCAVTPSQRLGLEPGRSPPSFAHHLPTMDPRKVNELRAFVKMCKQDPSVLHTEEMRFLREWVESMGGKVPPATQKAKSEENTKEEKPDSKKVEEDLKADEPSSEESDLEIDKEGVIEPDTDAPQEMGDENAEITEEMMDQANDKKVAAIEALNDGELQKAIDLFTDAIKLNPRLAILYAKRASVFVKLQKPNAAIRDCDRAIEINPDSAQPYKWRGKAHRLLGHWEEAAHDLALACKLDYDEDASAMLKEVQPRAQKIAEHRRKYERKREEREIKERIERVKKAREEHERAQREEEARRQSGAQYGSFPGGFPGGMPGNFPGGMPGMGGGMPGMAGMPGLNEILSDPEVLAAMQDPEVMVAFQDVAQNPANMSKYQSNPKVMNLISKLSAKFGGQA

SEQ ID NO: 909780 - protein, 418 aa, Homo sapiens; identical to SEQ ID NO: 909779

SEQ ID NO: 909781 - protein, 418 aa, Homo sapiens; identical to SEQ ID NO: 909779

SEQ ID NO: 909782 - protein, 388 aa, Homo sapiens
RWVGGASGRGGSSLFCLAAAAPFCAVTPSQRLGLEPGRSPPSFAHHLPTMDPRKVNELRAFVKMCKQDPSVLHTEEEKPDSKKVEEDLKADEPSSEESDLEIDKEGVIEPDTDAPQEMGDENAEITEEMMDQANDKKVAAIEALNDGELQKAIDLFTDAIKLNPRLAILYAKRASVFVKLQKPNAAIRDCDRAIEINPDSAQPYKWRGKAHRLLGHWEEAAHDLALACKLDYDEDASAMLKEVQPRAQKIAEHRRKYERKREEREIKERIERVKKAREEHERAQREEEARRQSGAQYGSFPGGFPGGMPGNFPGGMPGMGGGMPGMAGMPGLNEILSDPEVLAAMQDPEVMVAFQDVAQNPANMSKYQSNPKVMNLISKLSAKFGGQA

SEQ ID NO: 909783 - protein, 418 aa, Homo sapiens; identical to SEQ ID NO: 909779

SEQ ID NO: 909784 - protein, 418 aa, Homo sapiens; identical to SEQ ID NO: 909779

SEQ ID NO: 909785 - protein, 418 aa, Homo sapiens; identical to SEQ ID NO: 909779

SEQ ID NO: 909786 - protein, 418 aa, Homo sapiens; identical to SEQ ID NO: 909779

SEQ ID NO: 909787 - protein, 332 aa, Homo sapiens
RWVGGASGRGGSSLFCLAAAAPFCAVTPSQRLGLEPGRSPPSFAHHLPTMDPRKVNELRAFVKMCKQDPSVLHTEEMRFLREWVESMGGKVPPATQKAKSEENTKEEKPDSKKVEEDLKADEPSSEESDLEIDKEGVIEPDTDAPQEMGDENAEITEEMMDQANDKKVAAIEALNDGELQKAIDLFTDAIKLNPRLAILYAKRASVFVKLQKPNAAIRDCDRAIEINPDSAQPYKWRGKAHRLLGHWEEAAHDLALACKLDYDEDASAMLKEVQPRAQKIAEHRRKYERKREEREIKERIAHEIVGRPSNISLLYYLPTSDTDNSTPAYQRA

SEQ ID NO: 909788 - protein, 78 aa, Homo sapiens
AAAYYYYYCSEFKLLTMYGDMLFKSFKNTHHINLHLSLCVLLLMCRVLLSRNCQCVLGLTQEQFLLDSLFDLFNLIIF

SEQ ID NO: 909789 - protein, 418 aa, Homo sapiens; identical to SEQ ID NO: 909779

SEQ ID NO: 909790 - protein, 418 aa, Homo sapiens; identical to SEQ ID NO: 909779

SEQ ID NO: 909791 - protein, 418 aa, Homo sapiens; identical to SEQ ID NO: 909779

SEQ ID NO: 909792 - protein, 265 aa, Homo sapiens
RWVGGASGRGGSSLFCLAAAAPFCAVTPSQRLGLEPGRSPPSFAHHLPTMDPRKVNELRAFVKMCKQDPSVLHTEEMRFLREWVESMGGKVPPATQKAKSEENTKEEKPDSKKVEEDLKADEPSSEESDLEIDKEGVIEPDTDAPQEMGDENAEITEEMMDQANDKKVAAIEALNDGELQKAIDLFTDAIKLNPRLAILYAKRASVFVKLQKPNAAIRDCDRAIEINPDSAQPYKWRGKAHRHRKLQNIGESMSENVKSERSKKE

SEQ ID NO: 909793 - protein, 418 aa, Homo sapiens; identical to SEQ ID NO: 909779

SEQ ID NO: 909794 - protein, 418 aa, Homo sapiens; identical to SEQ ID NO: 909779

SEQ ID NO: 909795 - protein, 58 aa, Homo sapiens
MLFKSFKNTHHINLHLSLCVLLLMCRVLLSRNCQCVLGLTQEQFLLDSLFDLFNLIIF

SEQ ID NO: 909796 - protein, 611 aa, Homo sapiens
MNNSSSETRGHPHSASSPSERVFPMPLPRKAPLNIPGTPVLEDFPQNDDEKERLQRRRSRVFDLQFSTDSPRLLASPSSRSIDISATIPKFTNTQITEHYSTCIKLSTENIDPMFQKTAASFDECSTAGVFLSTLHCQDYRSELLFPSDVQTLSTGEPLELPELGCVEMTDLKAPLQQCAEDRQICPSLAGFQFTQWDSETHNESVSALVDKFKKNDQVFDINAEVDESDCGDFPDGSLGDDFDANDEPDHTAVGDHEEFRSWKEPCQVQSCQEEMISLGDGDIRTMCPLLSMKPGEYSYFSPRTMSMWAGPDHWRFRPRRKQDAPSQSENKKKSTKKDFEIDFEDDIDFDVYFRKTKAATILTKSTLENQNWRATTLPTDFNYNVDTLVQLHLKPGTRLLKMAQGHRVETEHYEEIEDYDYNNPNDTSNFCPGLQAADSDDEDLDDLFVGPVGNSDLSPYPCHPPKTAQQNGDTPEAQGLDITTYGESNLVAEPQKVNKIEIHYAKTAKKMDMKKLKQSMWSLLTALSGKEADAEANHREAGKEAALAEVADEKMLSGLTKDLQRSLPPVMAQNLSIPLAFACLLHLANEKNLKLEGTEDLSDVLVRQGD

SEQ ID NO: 909797 - protein, 730 aa, Homo sapiens
MGPPGPETRGHPHSASSPSERVFPMPLPRKAPLNIPGTPVLEDFPQNDDEKERLQRRRSRVFDLQFSTDSPRLLASPSSRSIDISATIPKFTNTQITEHYSTCIKLSTENKITTKNAFGLHLIDFMSEILKQKDTEPTNFKVAAGTLDASTKIYAVRVDAVHADVYRVLGGLGKDAPSLEEVEGHVADGSATEMGTTKKAVKPKKKHLHRTIEQNINNLNVSEADRKCEIDPMFQKTAASFDECSTAGVFLSTLHCQDYRSELLFPSDVQTLSTGEPLELPELGCVEMTDLKAPLQQCAEDRQICPSLAGFQFTQWDSETHNESVSALVDKFKKNDQVFDINAEVDESDCGDFPDGSLGDDFDANDEPDHTAVGDHEEFRSWKEPCQVQSCQEEMISLGDGDIRTMCPLLSMKPGEYSYFSPRTMSMWAGPDHWRFRPRRKQDAPSQSENKKKSTKKDFEIDFEDDIDFDVYFRKTKAATILTKSTLENQNWRATTLPTDFNYNVDTLVQLHLKPGTRLLKMAQGHRVETEHYEEIEDYDYNNPNDTSNFCPGLQAADSDDEDLDDLFVGPVGNSDLSPYPCHPPKTAQQNGDTPEAQGLDITTYGESNLVAEPQKVNKIEIHYAKTAKKMDMKKLKQSMWSLLTALSGKEADAEANHREAGKEAALAEVADEKMLSGLTKDLQRSLPPVMAQNLSIPLAFACLLHLANEKNLKLEGTEDLSDVLVRQGD

SEQ ID NO: 909798 - protein, 742 aa, Homo sapiens
GRVGGRRGSTHASGPPGPETRGHPHSASSPSERVFPMPLPRKAPLNIPGTPVLEDFPQNDDEKERLQRRRSRVFDLQFSTDSPRLLASPSSRSIDISATIPKFTNTQITEHYSTCIKLSTENKITTKNAFGLHLIDFMSEILKQKDTEPTNFKVAAGTLDASTKIYAVRVDAVHADVYRVLGGLGKDAPSLEEVEGHVADGSATEMGTTKKAVKPKKKHLHRTIEQNINNLNVSEADRKCEIDPMFQKTAASFDECSTAGVFLSTLHCQDYRSELLFPSDVQTLSTGEPLELPELGCVEMTDLKAPLQQCAEDRQICPSLAGFQFTQWDSETHNESVSALVDKFKKNDQVFDINAEVDESDCGDFPDGSLGDDFDANDEPDHTAVGDHEEFRSWKEPCQVQSCQEEMISLGDGDIRTMCPLLSMKPGEYSYFSPRTMSMWAGPDHWRFRPRRKQDAPSQSENKKKSTKKDFEIDFEDDIDFDVYFRKTKAATILTKSTLENQNWRATTLPTDFNYNVDTLVQLHLKPGTRLLKMAQGHRVETEHYEEIEDYDYNNPNDTSNFCPGLQAADSDDEDLDDLFVGPVGNSDLSPYPCHPPKTAQQNGDTPEAQGLDITTYGESNLVAEPQKVNKIEIHYAKTAKKMDMKKLKQSMWSLLTALSGKEADAEANHREAGKEAALAEVADEKMLSGLTKDLQRSLPPVMAQNLSIPLAFACLLHLANEKNLKLEGTEDLSDVLVRQGD

SEQ ID NO: 909799 - protein, 717 aa, Homo sapiens
MGPPGPERVFPMPLPRKAPLNIPGTPVLEDFPQNDDEKERLQRRRSRVFDLQFSTDSPRLLASPSSRSIDISATIPKFTNTQITEHYSTCIKLSTENKITTKNAFGLHLIDFMSEILKQKDTEPTNFKVAAGTLDASTKIYAVRVDAVHADVYRVLGGLGKDAPSLEEVEGHVADGSATEMGTTKKAVKPKKKHLHRTIEQNINNLNVSEADRKCEIDPMFQKTAASFDECSTAGVFLSTLHCQDYRSELLFPSDVQTLSTGEPLELPELGCVEMTDLKAPLQQCAEDRQICPSLAGFQFTQWDSETHNESVSALVDKFKKNDQVFDINAEVDESDCGDFPDGSLGDDFDANDEPDHTAVGDHEEFRSWKEPCQVQSCQEEMISLGDGDIRTMCPLLSMKPGEYSYFSPRTMSMWAGPDHWRFRPRRKQDAPSQSENKKKSTKKDFEIDFEDDIDFDVYFRKTKAATILTKSTLENQNWRATTLPTDFNYNVDTLVQLHLKPGTRLLKMAQGHRVETEHYEEIEDYDYNNPNDTSNFCPGLQAADSDDEDLDDLFVGPVGNSDLSPYPCHPPKTAQQNGDTPEAQGLDITTYGESNLVAEPQKVNKIEIHYAKTAKKMDMKKLKQSMWSLLTALSGKEADAEANHREAGKEAALAEVADEKMLSGLTKDLQRSLPPVMAQNLSIPLAFACLLHLANEKNLKLEGTEDLSDVLVRQGD

SEQ ID NO: 909800 - protein, 453 aa, Homo sapiens
MGPPGPETRGHPHSASSPSERVFPMPICPSLAGFQFTQWDSETHNESVSALVDKFKKNDQVFDINAEVDESDCGDFPDGSLGDDFDANDEPDHTAVGDHEEFRSWKEPCQVQSCQEEMISLGDGDIRTMCPLLSMKPGEYSYFSPRTMSMWAGPDHWRFRPRRKQDAPSQSENKKKSTKKDFEIDFEDDIDFDVYFRKTKAATILTKSTLENQNWRATTLPTDFNYNVDTLVQLHLKPGTRLLKMAQGHRVETEHYEEIEDYDYNNPNDTSNFCPGLQAADSDDEDLDDLFVGPVGNSDLSPYPCHPPKTAQQNGDTPEAQGLDITTYGESNLVAEPQKVNKIEIHYAKTAKKMDMKKLKQSMWSLLTALSGKEADAEANHREAGKEAALAEVADEKMLSGLTKDLQRSLPPVMAQNLSIPLAFACLLHLANEKNLKLEGTEDLSDVLVRQGD

SEQ ID NO: 909801 - protein, 666 aa, Homo sapiens
MNNSSSETRGHPHSASSPSERVFPMPLPRKAPLNIPGTPVLEDFPQNDDEKERLQRRRSRVFDLQFSTDSPRLLASPSSRSIDISATIPKFTNTQITEHYSTCIKLSTENKITTKNAFGLHLIDFMSEILKQKDTEPTNFKVAAGTLDASTKIYAVRVDAVHADVYRVLGGLGKDAPSLEEVEGHVADGSATEMGTTKKAVKPKKKHLHRTIEQNINNLNVSEADRKCEIDPMFQKTAASFDECSTAGVFLSTLHCQDYRSELLFPSDVQTLSTGEPLELPELGCVEMTDLKAPLQQCAEDRQICPSLAGFQFTQWDSETHNESVSALVDKFKKNDQVFDINAEVDESDCGDFPDGSLGDDFDANDEPDHTAVGDHEEFRSWKEPCQVQSCQEEMISLGDGDIRTMCPLLSMKPGEYSYFSPRTMSMWAGPDHWRFRPRRKQDAPSQSENKKKSTKKDFEIDFEDDIDFDVYFRKTKAATILTKSTLENQNWRATTLPTDFNYNVDTLVQLHLKPGTRLLKMAQGHRVETEHYEEIEDYDYNNPNDTSNFCPGLQAADSDDEDLDDLFVGPVGNSDLSPYPCHPPKTAQQNGDTPEAQGLDITTYGESNLVAEPQKVNKIEIHYAKTAKKMDMKKLKQSMWSLLTALSGKEADAEVRCSCLFSRCP

SEQ ID NO: 909802 - protein, 358 aa, Homo sapiens
LKFKVCVGPGLDKFKNEVTTEEMISLGDGDIRTMCPLLSMKPGEYSYFSPRTMSMWAGPDHWRFRPRRKQDAPSQSENKKKSTKKDFEIDFEDDIDFDVYFRKTKAATILTKSTLENQNWRATTLPTDFNYNVDTLVQLHLKPGTRLLKMAQGHRVETEHYEEIEDYDYNNPNDTSNFCPGLQAADSDDEDLDDLFVGPVGNSDLSPYPCHPPKTAQQNGDTPEAQGLDITTYGESNLVAEPQKVNKIEIHYAKTAKKMDMKKLKQSMWSLLTALSGKEADAEANHREAGKEAALAEVADEKMLSGLTKDLQRSLPPVMAQNLSIPLAFACLLHLANEKNLKLEGTEDLSDVLVRQGD

SEQ ID NO: 909803 - protein, 730 aa, Homo sapiens
MNNSSSETRGHPHSASSPSERVFPMPLPRKAPLNIPGTPVLEDFPQNDDEKERLQRRRSRVFDLQFSTDSPRLLASPSSRSIDISATIPKFTNTQITEHYSTCIKLSTENKITTKNAFGLHLIDFMSEILKQKDTEPTNFKVAAGTLDASTKIYAVRVDAVHADVYRVLGGLGKDAPSLEEVEGHVADGSATEMGTTKKAVKPKKKHLHRTIEQNINNLNVSEADRKCEIDPMFQKTAASFDECSTAGVFLSTLHCQDYRSELLFPSDVQTLSTGEPLELPELGCVEMTDLKAPLQQCAEDRQICPSLAGFQFTQWDSETHNESVSALVDKFKKNDQVFDINAEVDESDCGDFPDGSLGDDFDANDEPDHTAVGDHEEFRSWKEPCQVQSCQEEMISLGDGDIRTMCPLLSMKPGEYSYFSPRTMSMWAGPDHWRFRPRRKQDAPSQSENKKKSTKKDFEIDFEDDIDFDVYFRKTKAATILTKSTLENQNWRATTLPTDFNYNVDTLVQLHLKPGTRLLKMAQGHRVETEHYEEIEDYDYNNPNDTSNFCPGLQAADSDDEDLDDLFVGPVGNSDLSPYPCHPPKTAQQNGDTPEAQGLDITTYGESNLVAEPQKVNKIEIHYAKTAKKMDMKKLKQSMWSLLTALSGKEADAEANHREAGKEAALAEVADEKMLSGLTKDLQRSLPPVMAQNLSIPLAFACLLHLANEKNLKLEGTEDLSDVLVRQGD

SEQ ID NO: 909804 - protein, 730 aa, Homo sapiens; identical to SEQ ID NO: 909803

SEQ ID NO: 909805 - protein, 730 aa, Homo sapiens; identical to SEQ ID NO: 909803

SEQ ID NO: 909806 - protein, 498 aa, Homo sapiens [sequence omitted]

SEQ ID NO: 909807 - protein, 454 aa, Homo sapiens
DFEIDFEDDIDFDVYFRKTKAATILTKSTLENQNVESYHPSYRFQLQSVSALVDKFKKNDQVFDINAEVDESDCGDFPDGSLGDDFDANDEPDHTAVGDHEEFRSWKEPCQVQSCQEEMISLGDGDIRTMCPLLSMKPGEYSYFSPRTMSMWAGPDHWRFRPRRKQDAPSQSENKKKSTKKDFEIDFEDDIDFDVYFRKTKAATILTKSTLENQNWRATTLPTDFNYNVDTLVQLHLKPGTRLLKMAQGHRVETEHYEEIEDYDYNNPNDTSNFCPGLQAADSDDEDLDDLFVGPVGNSDLSPYPCHPPKTAQQNGDTPEAQGLDITTYGESNLVAEPQKVNKIEIHYAKTAKKMDMKKLKQSMWSLLTALSGKEADAEANHREAGKEAALAEVADEKMLSGLTKDLQRSLPPVMAQNLSIPLAFACLLHLANEKNLKLEGTEDLSDVLVRQGD

SEQ ID NO: 909808 - protein, 342 aa, Homo sapiens
MNNSSSETRGHPHSASSPSERVFPMPLPRKAPLNIPGTPVLEDFPQNDDEKERLQRRRSRVFDLQFSTDSPRLLASPSSRSIDISATIPKFTNTQITEHYSTCIKLSTENKITTKNAFGLHLIDFMSEILKQKDTEPTNFKVAAGTLDASTKIYAVRVDAVHADVYRVLGGLGKDAPSLEEVEGHVADGSATEMGTTKKAVKPKKKHLHRTIEQNINNLNVSEADRKCEIDPMFQKTAASFDECSTAGVFLSTLHCQDYRSELLFPSDVQTLSTGEPLELPELGCVEMTDLKAPLQQCAEDRQICPSLAGFQFTQWDSETHNESVSLLLDTAQEALTLLASW

SEQ ID NO: 909809 - protein, 576 aa, Homo sapiens
MKCHYEALGVRRDASEEELKKAYRKLALKWHPDKNLDNAAEAAEQFKLIQAAYDVLSDPQERAWYDNHREALLKGGFDGEYQDDSLDLLRYFTVTCYSGYGDDEKGFYTVYRNVFEMIAKEELESVLEEEVDDFPTFGDSQSDYDTVVHPFYAYWQSFCTQKNFAWKEEYDTRQASNRWEKRAMEKENKKIRDKARKEKNELVRQLVAFIRKRDKRVQAHRKLVEEQNAEKARKAEEMRRQQKLKQAKLVEQYREQSWMTMANLEKELQEMEARYEKEFGDGSDENEMEEHELKDEEDGKDSDEAEDAELYDDLYCPACDKSFKTEKAMKNHEKSKKHREMVALLKQQLEEEEENFSRPQIDENPLDDNSEEEMEDAPKQKLSKKQKKKKQKPAQDVPGKDSYLPAAHFQMAWGKKCVLGERRDGESEHKCAKMLLENRQNYDDNFNVNGPGEGVKVDPEDTNLNQDSAKELEDSPQENVSVTEIIKPCDDPKSEAKSVPKPKGKKTKDMKKPVRVPAEPQTMSVLISCTTCHSEFPSRNKLFDHLKATGHARAPSSSSLNSATSSQSKKEKRKNR

SEQ ID NO: 909810 - protein, 453 aa, Homo sapiens
MKCHYEALGVRRDASEEELKKAYRKLALKWHPDKNLDNAAEAAEQFKLIQAAYDVLSDPQERAWYDNHREALLKGGFDGEYQDDSLDLLRYFTVTCYSGYGDDEKGFYTVYRNVFEMIAKEELESVLEEEVDDFPTFGDSQSDYDTVVHPFYAYWQSFCTQKNFAWKEEYDTRQASNRWEKRAMEKENKKIRDKARKEKNELVRQLVAFIRKRDKRVQAHRKLVEEQNAEKARKAEEMRRQQKLKQAKLVEQYREQSWMTMANLEKELQEMEARYEKEFGDGSDENEMEEHELKDEEDGKDSDEAEDAELYDDLYCPACDKSFKTEKAMKNHEKSKKHREMVALLKQQLEEEEENFSRPQIDENPLDDNSEEEMEDAPKQKLSKKQKKKKQKPAQNYDDNFNVNGPGEGVKVDPEDTNLNQDSAKELEDSPQENVSVTEIIKPCDDPKSEAKR

SEQ ID NO: 909811 - protein, 531 aa, Homo sapiens
MKCHYEALGVRRDASEEELKKAYRKLALKWHPDKNLDNAAEAAEQFKLIQAAYDVLSDPQERAWYDNHREALLKGGFDGEYQDDSLDLLRYFTVTCYSGYGDDEKGFYTVYRNVFEMIAKEELESVLEEEVDDFPTFGDSQSDYDTVVHPFYAYWQSFCTQKNFAWKEEYDTRQASNRWEKRAMEKENKKIRDKARKEKNELVRQLVAFIRKRDKRVQAHRKLVEEQNAEKARKAEEMRRQQKLKQAKLVEQYREQSWMTMANLEKELQEMEARYEKEFGDGSDENEMEEHELKDEEDGKDSDEAEDAELYDDLYCPACDKSFKTEKAMKNHEKSKKHREMVALLKQQLEEEEENFSRPQIDENPLDDNSEEEMEDAPKQKLSKKQKKKKQKPAQNYDDNFNVNGPGEGVKVDPEDTNLNQDSAKELEDSPQENVSVTEIIKPCDDPKSEAKSVPKPKGKKTKDMKKPVRVPAEPQTMSVLISCTTCHSEFPSRNKLFDHLKATGHARAPSSSSLNSATSSQSKKEKRKNR

SEQ ID NO: 909812 - protein, 531 aa, Homo sapiens; identical to SEQ ID NO: 909811

SEQ ID NO: 909813 - protein, 220 aa, Homo sapiens
YENELTLHQNVEADINGLRRVLDELTLCRTDQELQYESLSEEMTYLKKNHEEEMKALQCAAGGNVNVEMNAAPGVDLAVLLNNMRAEYEALAEQNRKDAEAWFNEKSASLQQQISHDSGAATFARSQLTEMRRTLQTLEIQLQSLMATKHSLECSLTETESNYCTQLAQIQAQIGALEEQLHQVRTETEGQKLEYEHLLDVKVHLEKEIETYCRLIDGDG

SEQ ID NO: 909814 - protein, 766 aa, Homo sapiens
MYPQGRHPAPHQPGQPGFKFTVAESCDRIKDEFQFLQAQYHSLKVEYDKLANEKTEMQRHYVMYYEMSYGLNIEMHKQTEIAKRLNTILAQIMPFLSQEHQQQVAQAVERAKQVTMTELNAIIGQQQLQAQHLSHATHGPPVQLPPHPSGLQPPGIPPVTGSSSGLLALGALGSQAHLTVKDEKNHHELDHREENMNNSVSPSESLRASEKHRGSADYSMEAKKRKAEEKDSLSRYDSDGDKSDDLVVDVSNEDPATPRVSPAHSPPENGLDKARSLKKDAPTSPASVASSSSTPSSKTKDLGHNDKSSTPGLKSNTPTPRNDAPTPGTSTTPGLRSMPGKPPGMDPIASALRTPISITSSYAAPFAMMSHHEMNGSLTSPGAYAGLHNIPPQMSAAAAAAAAAYGRSPSELGAVGFDPHPPMRATGLPSSLASIPGGKPAYSFHVSADGQMQPVPFPHDALAGPGIPRHARQINTLSHGEVVCAVTISNPTRHVYTGGKGCVKIWDISQPGSKSPISQLDCLNRDNYIRSCKLLPDGRTLIVGGEASTLTIWDLASPTPRIKAELTSSAPACYALAISPDAKVCFSCCSDGNIAVWDLHNQTLVRQFQGHTDGASCIDISHDGTKLWTGGLDNTVRSWDLREGRQLQQHDFTSQIFSLGYCPTGEWLAVGMESSNVEVLHHTKPDKYQLHLHESCVLSLKFAYCGKWFVSTGKDNLLNAWRTPYGASIFQSKESSSVLSCDISADDKYIVTGSGDKKATVYEVIY

SEQ ID NO: 909815 - protein, 766 aa, Homo sapiens; identical to SEQ ID NO: 909814

SEQ ID NO: 909816 - protein, 652 aa, Homo sapiens
MTELNAIIGQQQLQAQHLSHATHGPPVQLPPHPSGLQPPGIPPVTGSSSGLLALGALGSQAHLTVKDEKNHHELDHREEIQWNNSVSPSESLRASEKHRGSADYSMEAKKRKAEEKDSLSRYDSDGDKSDDLVVDVSNEDPATPRVSPAHSPPENGLDKARSLKKDAPTSPASVASSSSTPSSKTKDLGHNDKSSTPGLKSNTPTPRNDAPTPGTSTTPGLRSMPGKPPGMDPIASALRTPISITSSYAAPFAMMSHHEMNGSLTSPGAYAGLHNIPPQMSAAAAAAAAAYGRSPSELGAVGFDPHPPMRATGLPSSLASIPGGKPAYSFHVSADGQMQPVPFPHDALAGPGIPRHARQINTLSHGEVVCAVTISNPTRHVYTGGKGCVKIWDISQPGSKSPISQLDCLNRDNYIRSCKLLPDGRTLIVGGEASTLTIWDLASPTPRIKAELTSSAPACYALAISPDAKVCFSCCSDGNIAVWDLHNQTLVRQFQGHTDGASCIDISHDGTKLWTGGLDNTVRSWDLREGRQLQQHDFTSQIFSLGYCPTGEWLAVGMESSNVEVLHHTKPDKYQLHLHESCVLSLKFAYCGKWFVSTGKDNLLNAWRTPYGASIFQSKESSSVLSCDISADDKYIVTGSGDKKATVYEVIY

SEQ ID NO: 909817 - protein, 532 aa, Homo sapiens
AARGYVRQYVTLVVDVSNEDPATPRVSPAHSPPENGLDKARSLKKDAPTSPASVASSSSTPSSKTKDLGHNDKSSTPGLKSNTPTPRNDAPTPGTSTTPGLRSMPGKPPGMDPIASALRTPISITSSYAAPFAMMSHHEMNGSLTSPGAYAGLHNIPPQMSAAAAAAAAAYGRSPSELGAVGFDPHPPMRATGLPSSLASIPGGKPAYSFHVSADGQMQPVPFPHDALAGPGIPRHARQINTLSHGEVVCAVTISNPTRHVYTGGKGCVKIWDISQPGSKSPISQLDCLNRDNYIRSCKLLPDGRTLIVGGEASTLTIWDLASPTPRIKAELTSSAPACYALAISPDAKVCFSCCSDGNIAVWDLHNQTLVRQFQGHTDGASCIDISHDGTKLWTGGLDNTVRSWDLREGRQLQQHDFTSQIFSLGYCPTGEWLAVGMESSNVEVLHHTKPDKYQLHLHESCVLSLKFAYCGKWFVSTGKDNLLNAWRTPYGASIFQSKESSSVLSCDISADDKYIVTGSGDKKATVYEVIY

SEQ ID NO: 909818 - protein, 344 aa, Homo sapiens
MRATGLPSSLASIPGGKPAYSFHVSADGQMQPVPFPHDALAGPGIPRHARQINTLSHGEVVCAVTISNPTRHVYTGGKGCVKIWDISQPGSKSPISQLDCLNRDNYIRSCKLLPDGRTLIVGGEASTLTIWDLASPTPRIKAELTSSAPACYALAISPDAKVCFSCCSDGNIAVWDLHNQTLVRQFQGHTDGASCIDISHDGTKLWTGGLDNTVRSWDLREGRQLQQHDFTSQIFSLGYCPTGEWLAVGMESSNVEVLHHTKPDKYQLHLHESCVLSLKFAYCGKWFVSTGKDNLLNAWRTPYGASIFQSKESSSVLSCDISADDKYIVTGSGDKKATVYEVIY

SEQ ID NO: 909819 - protein, 766 aa, Homo sapiens; identical to SEQ ID NO: 909814

SEQ ID NO: 909820 - protein, 147 aa, Homo sapiens
HLESSPVFVCILLIFLCPGRSLAYGRNRHALLNLKNSESSFQTSLSFLFTSLKSILSWLAVEKPADIGSIAELFYLPISLLKFAYCGKWFVSTGKDNLLNAWRTPYGASIFQSKESSSVLSCDISADDKYIVTGSGDKKATVYEVIY

SEQ ID NO: 909821 - protein, 311 aa, Homo sapiens
MYPQGRHPAPHQPGQPGFKFTVAESCDRIKDEFQFLQAQYHSLKVEYDKLANEKTEMQRHYVMYYEMSYGLNIEMHKQTEIAKRLNTILAQIMPFLSQEHQQQVAQAVERAKQVTMTELNAIIGQQQLQAQHLSHATHGPPVQLPPHPSGLQPPGIPPVTGSSSGLLALGALGSQAHLTVKDEKNHHELDHREENMNNSVSPSESLRASEKHRGSADYSMEAKKRKAEEKDSLSRYDSDGDKSDDLVVDVSNEDPATPRVSPAHSPPENGLDKARSLKKDAPTSPASVASSSSTPSSKTKDLGHFCSSSSP

SEQ ID NO: 909822 - protein, 531 aa, Homo sapiens
MYPQGRHPAPHQPGQPGFKFTVAESCDRIKDEFQFLQAQYHSLKVEYDKLANEKTEMQRHYVMYYEMSYGLNIEMHKQTEIAKRLNTILAQIMPFLSQEHQQQVAQAVERAKQVTMTELNAIIGQQQLQAQHLSHATHGPPVQLPPHPSGLQPPGIPPVTGSSSGLLALGALGSQAHLTVKDEKNHHELDHREENMNNSVSPSESLRASEKHRGSADYSMEAKKRKAEEKDSLSRYDSDGDKSDDLVVDVSNEDPATPRVSPAHSPPENGLDKARSLKKDAPTSPASVASSSSTPSSKTKDLGHNDKSSTPGLKSNTPTPRNDAPTPGTSTTPGLRSMPGKPPGMDPIASALRTPISITSSYAAPFAMMSHHEMNGSLTSPGAYAGLHNIPPQMSAAAAAAAAAYGRSPSELGAVGFDPHPPMRATGLPSSLASIPGGKPAYSFHVSADGQMQPVPFPHDALAGPGIPRHARQINTLSHGEVVCAVTISNPTRHVYTGGKGCVKIWDISQPGSVQSLSGSQMSICHLLLRL

SEQ ID NO: 909823 - protein, 498 aa, Homo sapiens
  misc_feature (457)..(457): Xaa can be any naturally occurring amino acid
MYPQGRHPAPHQPGQPGFKFTVAESCDRIKDEFQFLQAQYHSLKVEYDKLANEKTEMQRHYVMYYEMSYGLNIEMHKQTEIAKRLNTILAQIMPFLSQEHQQQVAQAVERAKQVTMTELNAIIGQQQLQAQHLSHATHGPPVQLPPHPSGLQPPGIPPVTGSSSGLLALGALGSQAHLTVKDEKNHHELDHREENMNNSVSPSESLRASEKHRGSADYSMEAKKRKAEEKDSLSRYDSDGDKSDDLVVDVSNEDPATPRVSPAHSPPENGLDKARSLKKDAPTSPASVASSSSTPSSKTKDLGHNDKSSTPGLKSNTPTPRNDAPTPGTSTTPGLRSMPGKPPGMDPIASALRTPISITSSYAAPFAMMSHHEMNGSLTSPGAYAGLHNIPPQMSAAAAAAAAAYGRSPSELELFGAVGFDPHPPMRATGLPSSLASIPGGKPKKSNLELLRISLLXIESWLDAFLKVLEEVIVIAVRGVIHQVVGEHTPEEPHGLQP

SEQ ID NO: 909824 - protein, 349 aa, Homo sapiens
MYPQGRHPAPHQPGQPGFKFTVAESCDRIKDEFQFLQAQYHSLKVEYDKLANEKTEMQRHYVMYYEMSYGLNIEMHKQTEIAKRLNTILAQIMPFLSQEHQQQVAQAVERAKQVTMTELNAIIGQQQLQAQHLSHATHGPPVQLPPHPSGLQPPGIPPVTGSSSGLLALGALGSQAHLTVKDEKNHHELDHREENMNNSVSPSESLRASEKHRGSADYSMEAKKRKAEEKDSLSRYDSDGDKSDDLVVDVSNEDPATPRVSPAHSPPENGLDKARSLKKDAPTSPASVASSSSTPSSKTKDLGHNDKSSTPGLKSNTPTPRNDAPTPGTSTTPGLRSMPGKPPGMDPIV

SEQ ID NO: 909825 - protein, 269 aa, Homo sapiens
MYPQGRHPAPHQPGQPGFKFTVAESCDRIKDEFQFLQAQYHSLKVEYDKLANEKTEMQRHYVMYYEMSYGLNIEMHKQTEIAKRLNTILAQIMPFLSQEHQQQVAQAVERAKQVTMTELNAIIGVRGLPNLPLTQQQLQAQHLSHATHGPPVQLPPHPSGLQPPGIPPVTGSSSGLLALGALGSQAHLTVKDEKNHHELDHREKNMNNSVSPSESLRASEKHRGSADYSMEAKKRKAEEKDSLSRYDSDGEGKGRKKRRKGRKRKRERE

SEQ ID NO: 909826 - protein, 149 aa, Homo sapiens [sequence omitted]

SEQ ID NO: 909827 - protein, 757 aa, Homo sapiens
MYPQGRHPAPHQPGQPGFKFTVAESCDRIKDEFQFLQAQYHSLKVEYDKLANEKTEMQRHYVMYYEMSYGLNIEMHKQTEIAKRLNTILAQIMPFLSQEHQQQVAQAVERAKQVTMTELNAIIGQQQLQAQHLSHATHGPPVQLPPHPSGLQPPGIPPVTGSSSGLLALGALGSQAHLTVKDEKNHHELDHREENMNNSVSPSESLRASEKHRGSADYSMEAKKRKAEEKDSLSRYDSDGDKSDDLVVDVSNEDPATPRVSPAHSPPENGLDKARSLKKDAPTSPASVASSSSTPSSKTKDLGHNDKSSTPGLKSNTPTPRNDAPTPGTSTTPGLRSMPASALRTPISITSSYAAPFAMMSHHEMNGSLTSPGAYAGLHNIPPQMSAAAAAAAAAYGRSPSELGAVGFDPHPPMRATGLPSSLASIPGGKPAYSFHVSADGQMQPVPFPHDALAGPGIPRHARQINTLSHGEVVCAVTISNPTRHVYTGGKGCVKIWDISQPGSKSPISQLDCLNRDNYIRSCKLLPDGRTLIVGGEASTLTIWDLASPTPRIKAELTSSAPACYALAISPDAKVCFSCCSDGNIAVWDLHNQTLVRQFQGHTDGASCIDISHDGTKLWTGGLDNTVRSWDLREGRQLQQHDFTSQIFSLGYCPTGEWLAVGMESSNVEVLHHTKPDKYQLHLHESCVLSLKFAYCGKWFVSTGKDNLLNAWRTPYGASIFQSKESSSVLSCDISADDKYIVTGSGDKKATVYEVIY

SEQ ID NO: 909828 - protein, 766 aa, Homo sapiens; identical to SEQ ID NO: 909814

SEQ ID NO: 909829 - protein, 722 aa, Homo sapiens
EDGISAYVMYYEMSYGLNIEMHKQTEIAKRLNTILAQIMPFLSQEHQQQVAQAVERAKQVTMTELNAIIGVRGLPNLPLTQQQLQAQHLSHATHGPPVQLPPHPSGLQPPGIPPVTGSSSGLLALGALGSQAHLTVKDEKNHHELDHREKNMNNSVSPSESLRASEKHRGSADYSMEAKKRKAEEKDSLSRYDSDGDKSDDLVVDVSNEDPATPRVSPAHSPPENGLDKARSLKKDAPTSPASVASSSSTPSSKTKDLGHNDKSSTPGLKSNTPTPRNDAPTPGTSTTPGLRSMPGKPPGMDPIASALRTPISITSSYAAPFAMMSHHEMNGSLTSPGAYAGLHNIPPQMSAAAAAAAAAYGRSPSELGAVGFDPHPPMRATGLPSSLASIPGGKPAYSFHVSADGQMQPVPFPHDALAGPGIPRHARQINTLSHGEVVCAVTISNPTRHVYTGGKGCVKIWDISQPGSKSPISQLDCLNRDNYIRSCKLLPDGRTLIVGGEASTLTIWDLASPTPRIKAELTSSAPACYALAISPDAKVCFSCCSDGNIAVWDLHNQTLVRQFQGHTDGASCIDISHDGTKLWTGGLDNTVRSWDLREGRQLQQHDFTSQIFSLGYCPTGEWLAVGMESSNVEVLHHTKPDKYQLHLHESCVLSLKFAYCGKWFVSTGKDNLLNAWRTPYGASIFQSKESSSVLSCDISADDKYIVTGSGDKKATVYEVIY

SEQ ID NO: 909830 - protein, 429 aa, Homo sapiens
MPGKPPGMDPIASALRTPISITSSYAAPFAMMSHHEMNGSLTSPGAYAGLHNIPPQMSAAAAAAAAAYGRSPSELGAVGFDPHPPMRATGLPSSLASIPGGKPAYSFHVSADGQMQPVPFPHDALAGPGIPRHARQINTLSHGEVVCAVTISNPTRHVYTGGKGCVKIWDISQPGSKSPISQLDCLNRDNYIRSCKLLPDGRTLIVGGEASTLTIWDLASPTPRIKAELTSSAPACYALAISPDAKVCFSCCSDGNIAVWDLHNQTLVRQFQGHTDGASCIDISHDGTKLWTGGLDNTVRSWDLREGRQLQQHDFTSQIFSLGYCPTGEWLAVGMESSNVEVLHHTKPDKYQLHLHESCVLSLKFAYCGKWFVSTGKDNLLNAWRTPYGASIFQSKESSSVLSCDISADDKYIVTGSGDKKATVYEVIY

SEQ ID NO: 909831 - protein, 335 aa, Homo sapiens
AVTVSHLFRAYSFHVSADGQMQPVPFPHDALAGPGIPRHARQINTLSHGEVVCAVTISNPTRHVYTGGKGCVKIWDISQPGSKSPISQLDCLNRDNYIRSCKLLPDGRTLIVGGEASTLTIWDLASPTPRIKAELTSSAPACYALAISPDAKVCFSCCSDGNIAVWDLHNQTLVRQFQGHTDGASCIDISHDGTKLWTGGLDNTVRSWDLREGRQLQQHDFTSQIFSLGYCPTGEWLAVGMESSNVEVLHHTKPDKYQLHLHESCVLSLKFAYCGKWFVSTGKDNLLNAWRTPYGASIFQSKESSSVLSCDISADDKYIVTGSGDKKATVYEVIY

SEQ ID NO: 909832 - protein, 639 aa, Homo sapiens
MYPQGRHPAPHQPGQPGFKFTVAESCDRIKDEFQFLQAQYHSLKVEYDKLANEKTEMQRHYVMYYEMSYGLNIEMHKQTEIAKRLNTILAQIMPFLSQEHQQQVAQAVERAKQVTMTELNAIIGQQQLQAQHLSHATHGPPVQLPPHPSGLQPPGIPPVTGSSSGLLALGALGSQAHLTVKDEKNHHELDHREENMNNSVSPSESLRASEKHRGSADYSMEAKKRKAEEKDSLSRYDSDGDKSDDLVVDVSNEDPATPRVSPAHSPPENGLDKARSLKKDAPTSPASVASSSSTPSSKTKDLGHNDKSSTPGLKSNTPTPRNDAPTPGTSTTPGLRSMPGKPPGMDPIASALRTPISITSSYAAPFAMMSHHEMNGSLTSPGAYAGLHNIPPQMSAAAAAAAAAYGRSPSELGAVGFDPHPPMRATGLPSSLASIPGGKPAYSFHVSADGQMQPVPFPHDALAGPGIPRHARQINTLSHGEVVCAVTISNPTRHVYTGGKGCVKIWDISQPGSKSPISQLDCLNRDNYIRSCKLLPDGRTLIVGGEASTLTIWDLASPTPRIKAELTSSAPACYALAISPDAKVCFSCCSDGNIAVWDLHNQTLVRQFQGHTDGASCIDISHDVLLLLLPLNNAGSCYK

SEQ ID NO: 909833 - protein, 606 aa, Homo sapiens
MYPQGRHPAPHQPGQPGFKFTVAESCDRIKDEFQFLQAQYHSLKVEYDKLANEKTEMQRHYVMYYEMSYGLNIEMHKQTEIAKRLNTILAQIMPFLSQEHQQQVAQAVERAKQVTMTELNAIIGQQQLQAQHLSHATHGPPVQLPPHPSGLQPPGIPPVTGSSSGLLALGALGSQAHLTVKDEKNHHELDHREENMNNSVSPSESLRASEKHRGSADYSMEAKKRKAEEKDSLSRYDSDGDKSDDLVVDVSNEDPATPRVSPAHSPPENGLDKARSLKKDAPTSPASVASSSSTPSSKTKDLGHNDKSSTPGLKSNTPTPRNDAPTPGTSTTPGLRSMPGKPPGMDPIASALRTPISITSSYAAPFAMMSHHEMNGSLTSPGAYAGLHNIPPQMSAAAAAAAAAYGRSPSELGAVGFDPHPPMRATGLPSSLASIPGGKPAYSFHVSADGQMQPVPFPHDALAGPGIPRHARQINTLSHGEVVCAVTISNPTRHVYTGGKGCVKIWDISQPGSKSPISQLDCLNRDNYIRSCKLLPDGRTLIVGGEASTLTIWDLASPTPRIKAELTSSAPACYALAISPDAKVCFSCCSDGNIAVWDLHNQTLVR

SEQ ID NO: 909834 - protein, 368 aa, Homo sapiens
MYPQGRHPAPHQPGQPGFKFTVAESCDRIKDEFQFLQAQYHSLKVEYDKLANEKTEMQRHYVMYYEMSYGLNIEMHKQTEIAKRLNTILAQIMPFLSQEHQQQVAQAVERAKQVTMTELNAIIGQQQLQAQHLSHATHGPPVQLPPHPSGLQPPGIPPVTGSSSGLLALGALGSQAHLTVKDEKNHHELDHREENMNNSVSPSESLRASEKHRGSADYSMEAKKRKAEEKDSLSRYDSDGDKSDDLVVDVSNEDPATPRVSPAHSPPENGLDKARSLKKDAPTSPASVASSSSTPSSKTKDLGHNDKSSTPGLKSNTPTPRNDAPTPGTSTTPGLRSMPGKPPGMDPIASLSHAHLQFQLRSKDPARV

SEQ ID NO: 909835 - protein, 259 aa, Homo sapiens
MYPQGRHPAPHQPGQPGFKFTVAESCDRIKDEFQFLQAQYHSLKVEYDKLANEKTEMQRHYVMYYEMSYGLNIEMHKQTEIAKRLNTILAQIMPFLSQEHQQQVAQAVERAKQVTMTELNAIIGQQQLQAQHLSHATHGPPVQLPPHPSGLQPPGIPPVTGSSSGLLALGALGSQAHLTVKDEKNHHELDHREENMNNSVSPSESLRASEKHRGSADYSMEAKKRKAEEKDSLSRYDSDGEGKGRKKRRKGRKRKRERE

SEQ ID NO: 909836 - protein, 2540 aa, Homo sapiens
EPSRAALTSGSRSVSTSAFALAARPRPGRGPQQSRAVSLAPAAQSGPGAMGAAAGRSPHLGPAPARRPQRSLLLLQLLLLVAAPGSTQAQAAPFPELCSYTWEAVDTKNNVLYKINICGSVDIVQCGPSSAVCMHDLKTRTYHSVGDSVLRSATRSLLEFNTTVSCDQQGTNHRVQSSIAFLCGKTLGTPEFVTATECVHYFEWRTTAACKKDIFKANKEVPCYVFDEELRKHDLNPLIKLSGAYLVDDSDPDTSLFINVCRDIDTLRDPGSQLRACPPGTAACLVRGHQAFDVGQPRDGLKLVRKDRLVLSYVREEAGKLDFCDGHSPAVTITFVCPSERREGTIPKLTAKSNCRYEIEWITEYACHRDYLESKTCSLSGEQQDVSIDLTPLAQSGGSSYISDGKEYLFYLNVCGETEIQFCNKKQAAVCQVKKSDTSQVKAAGRYHNQTLRYSDGDLTLIYFGGDECSSGFQRMSVINFECNKTAGNDGKGTPVFTGEVDCTYFFTWDTEYACVKEKEDLLCGATDGKKRYDLSALVRHAEPEQNWEAVDGSQTETEKKHFFINICHRVLQEGKARGCPEDAAVCAVDKNGSKNLGKFISSPMKEKGNIQLSYSDGDDCGHGKKIKTNITLVCKPGDLESAPVLRTSGEGGCFYEFEWHTAAACVLSKTEGENCTVFDSQAGFSFDLSPLTKKNGAYKVETKKYDFYINVCGPVSVSPCQPDSGACQVAKSDEKTWNLGLSNAKLSYYDGMIQLNYRGGTPYNNERHTPRATLITFLCDRDAGVGFPEYQEEDNSTYNFRWYTSYACPEEPLECVVTDPSTLEQYDLSSLAKSEGGLGGNWYAMDNSGEHVTWRKYYINVCRPLNPVPGCNRYASACQMKYEKDQGSFTEVVSISNLGMAKTGPVVEDSGSLLLEYVNGSACTTSDGRQTTYTTRIHLVCSRGRLNSHPIFSLNWECVVSFLWNTEAACPIQTTTDTDQACSIRDPNSGFVFNLNPLNSSQGYNVSGIGKIFMFNVCGTMPVCGTILGKPASGCEAETQTEELKNWKPARPVGIEKSLQLSTEGFITLTYKGPLSAKGTADAFIVRFVCNDDVYSGPLKFLHQDIDSGQGIRNTYFEFETALACVPSPVDCQVTDLAGNEYDLTGLSTVRKPWTAVDTSVDGRKRTFYLSVCNPLPYIPGCQGSAVGSCLVSEGNSWNLGVVQMSPQAAANGSLSIMYVNGDKCGNQRFSTRITFECAQISGSPAFQLQDGCEYVFIWRTVEACPVVRVEGDNCEVKDPRHGNLYDLKPLGLNDTIVSAGEYTYYFRVCGKLSSDVCPTSDKSKVVSSCQEKREPQGFHKVAGLLTQKLTYENGLLKMNFTGGDTCHKVYQRSTAIFFYCDRGTQRPVFLKETSDCSYLFEWRTQYACPPFDLTECSFKDGAGNSFDLSSLSRYSDNWEAITGTGDPEHYLINVCKSLAPQAGTEPCPPEAAACLLGGSKPVNLGRVRDGPQWRDGIIVLKYVDGDLCPDGIRKKSTTIRFTCSESQVNSRPMFISAVEDCEYTFAWPTATACPMKSNEHDDCQVTNPSTGHLFDLSSLSGRAGFTAAYSEKGLVYMSICGENENCPPGVGACFGQTRISVGKANKRLRYVDQVLQLVYKDGSPCPSKSGLSYKSVISFVCRPEAGPTNRPMLISLDKQTCTLFFSWHTPLACEQATECSVRNGSSIVDLSPLIHRTGGYEAYDESEDDASDTNPDFYINICQPLNPMHGVPCPAGAAVCKVPIDGPPIDIGRVAGPPILNPIANEIYLNFESSTPCLADKHFNYTSLIAFHCKRGVSMGTPKLLRTSECDFVFEWETPVVCPDEVRMDGCTLTDEQLLYSFNLSSLSTSTFKVTRDSRTYSVGVCTFAVGPEQGGCKDGGVCLLSGTKGASFGRLQSMKLDYRHQDEAVVLSYVNGDRCPPETDDGVPCVFPFIFNGKSYEECIIESRAKLWCSTTADYDRDHEWGFCRHSNSYRTSSIIFKCDEDEDIGRPQVFSEVRGCDVTFEWKTKVVCPPKKLECKFVQKHKTYDLRLLSSLTGSWSLVHNGVSYYINLCQKIYKGPLGCSERASICRRTTTGDVQVLGLVHTQKLGVIGDKVVVTYSKGYPCGGNKTASSVIELTCTKTVGRPAFKRFDIDSCTYYFSWDSRAACAVKPQEVQMVNGTITNPINGKSFSLGDIYFKLFRASGDMRTNGDNYLYEIQLSSITSSRNPACSGANICQVKPNDQHFSRKVGTSDKTKYYLQDGDLDVVFASSSKCGKDKTKSVSSTIFFHCDPLVEDGIPEFSHETADCQYLFSWYTSAVCPLGVGFDSENPGDDGQMHKGLSERSQAVGAVLSLLLVALTCCLLALLLYKKERRETVISKLTTCCRRSSNVSYKYSKVNKEEETDENETEWLMEEIQLPPPRQGKEGQENGHITTKSVKALSSLHGDDQDSEDEVLTIPEVKVHSGRGAGAESSHPVRNAQSNALQEREDDRVGLVRGEKARKGKSSSAQQKTVSSTKLVSFHDDSDEDLLHI

SEQ ID NO: 909837 - protein, 1149 aa, Homo sapiens
FGQTRISVGKANKRLRYVDQVLQLVYKDGSPCPSKSGLSYKSVISFVCRPERAQPIGPCSSPWTSRHALSSSPGTEPCPPEAAACLLGGSKPVNLGRVRDGPQWRDGIIVLKYVDGDLCPDGIRKKSTTIRFTCSESQVNSRPMFISAVEDCEYTFAWPTATACPMKSNEHDDCQVTNPSTGHLFDLSSLSGRAGFTAAYSEKGLVYMSICGENENCPPGVGACFGQTRISVGKANKRLRYVDQVLQLVYKDGSPCPSKSGLSYKSVISFVCRPEAGPTNRPMLISLDKQTCTLFFSWHTPLACEQATECSVRNGSSIVDLSPLIHRTGGYEAYDESEDDASDTNPDFYINICQPLNPMHGVPCPAGAAVCKVPIDGPPIDIGRVAGPPILNPIANEIYLNFESSTPCLADKHFNYTSLIAFHCKRGVSMGTPKLLRTSECDFVFEWETPVVCPDEVRMDGCTLTDEQLLYSFNLSSLSTSTFKVTRDSRTYSVGVCTFAVGPEQGGCKDGGVCLLSGTKGASFGRLQSMKLDYRHQDEAVVLSYVNGDRCPPETDDGVPCVFPFIFNGKSYEECIIESRAKLWCSTTADYDRDHEWGFCRHSNSYRTSSIIFKCDEDEDIGRPQVFSEVRGCDVTFEWKTKVVCPPKKLECKFVQKHKTYDLRLLSSLTGSWSLVHNGVSYYINLCQKIYKGPLGCSERASICRRTTTGDVQVLGLVHTQKLGVIGDKVVVTYSKGYPCGGNKTASSVIELTCTKTVGRPAFKRFDIDSCTYYFSWDSRAACAVKPQEVQMVNGTITNPINGKSFSLGDIYFKLFRASGDMRTNGDNYLYEIQLSSITSSRNPACSGANICQVKPNDQHFSRKVGTSDKTKYYLQDGDLDVVFASSSKCGKDKTKSVSSTIFFHCDPLVEDGIPEFSHETADCQYLFSWYTSAVCPLGVGFDSENPGDDGQMHKGLSERSQAVGAVLSLLLVALTCCLLALLLYKKERRETVISKLTTCCRRSSNVSYKYSKVNKEEETDENETEWLMEEIQLPPPRQGKEGQENGHITTKSVKALSSLHGDDQDSEDEVLTIPEVKVHSGRGAGAESSHPVRNAQSNALQEREDDRVGLVRGEKARKGKSSSAQQKTVSSTKLVSFHDDSDEDLLHI

SEQ ID NO: 909838 - protein, 2540 aa, Homo sapiens; identical to SEQ ID NO: 909836

SEQ ID NO: 909839 - protein, 2124 aa, Homo sapiens
EPSRAALTSGSRSVSTSAFALAARPRPGRGPQQSRAVSLAPAAQSGPGAMGAAAGRSPHLGPAPARRPQRSLLLLQLLLLVAAPGSTQAQAAPFPELCSYTWEAVDTKNNVLYKINICGSVDIVQCGPSSAVCMHDLKTRTYHSVGDSVLRSATRSLLEFNTTVSCDQQGTNHRVQSSIAFLCGKTLGTPEFVTATECVHYFEWRTTAACKKDIFKANKEVPCYVFDEELRKHDLNPLIKLSGAYLVDDSDPDTSLFINVCRDIDTLRDPGSQLRACPPGTAACLVRGHQAFDVGQPRDGLKLVRKDRLVLSYVREEAGKLDFCDGHSPAVTITFVCPSERREGTIPKLTAKSNCRYEIEWITEYACHRDYLESKTCSLSGEQQDVSIDLTPLAQSGGSSYISDGKEYLFYLNVCGETEIQFCNKKQAAVCQVKKSDTSQVKAAGRYHNQTLRYSDGDLTLIYFGGDECSSGFQRMSVINFECNKTAGNDGKGTPVFTGEVDCTYFFTWDTEYACVKEKEDLLCGATDGKKRYDLSALVRHAEPEQNWEAVDGSQTETEKKHFFINICHRVLQEGKARGCPEDAAVCAVDKNGSKNLGKFISSPMKEKGNIQLSYSDGDDCGHGKKIKTNITLVCKPGDLESAPVLRTSGEGGCFYEFEWHTAAACVLSKTEGENCTVFDSQAGFSFDLSPLTKKNGAYKVETKKYDFYINVCGPVSVSPCQPDSGACQVAKSDEKTWNLGLSNAKLSYYDGMIQLNYRGGTPYNNERHTPRATLITFLCDRDAGVGFPEYQEEDNSTYNFRWYTSYACPEEPLECVVTDPSTLEQYDLSSLAKSEGGLGGNWYAMDNSGEHVTWRKYYINVCRPLNPVPGCNRYASACQMKYEKDQGSFTEVVSISNLGMAKTGPVVEDSGSLLLEYVNGSACTTSDGRQTTYTTRIHLVCSRGRLNSHPIFSLNWECVVSFLWNTEAACPIQTTTDTDQACSIRDPNSGFVFNLNPLNSSQGYNVSGIGKIFMFNVCGTMPVCGTILGKPASGCEAETQTEELKNWKPARPVGIEKSLQLSTEGFITLTYKGPLSAKGTADAFIVRFVCNDDVYSGPLKFLHQDIDSGQGIRNTYFEFETALACVPSPVDCQVTDLAGNEYDLTGLSTVRKPWTAVDTSVDGRKRTFYLSVCNPLPYIPGCQGSAVGSCLVSEGNSWNLGVVQMSPQAAANGSLSIMYVNGDKCGNQRFSTRITFECAQISGSPAFQLQDGCEYVFIWRTVEACPVVRVEGDNCEVKDPRHGNLYDLKPLGLNDTIVSAGEYTYYFRVCGKLSSDVCPTSDKSKVVSSCQEKREPQGFHKVAGLLTQKLTYENGLLKMNFTGGDTCHKVYQRSTAIFFYCDRGTQRPVFLKETSDCSYLFEWRTQYACPPFDLTECSFKDGAGNSFDLSSLSRYSDNWEAITGTGDPEHYLINVCKSLAPQAGTEPCPPEAAACLLGGSKPVNLGRVRDGPQWRDGIIVLKYVDGDLCPDGIRKKSTTIRFTCSESQVNSRPMFISAVEDCEYTFAWPTATACPMKSNEHDDCQVTNPSTGHLFDLSSLSGRAGFTAAYSEKGLVYMSICGENENCPPGVGACFGQTRISVGKANKRLRYVDQVLQLVYKDGSPCPSKSGLSYKSVISFVCRPEAGPTNRPMLISLDKQTCTLFFSWHTPLACEQATECSVRNGSSIVDLSPLIHRTGGYEAYDESEDDASDTNPDFYINICQPLNPMHGVPCPAGAAVCKVPIDGPPIDIGRVAGPPILNPIANEIYLNFESSTPCLADKHFNYTSLIAFHCKRGVSMGTPKLLRTSECDFVFEWETPVVCPDEVRMDGCTLTDEQLLYSFNLSSLSTSTFKVTRDSRTYSVGVCTFAVGPEQGGCKDGGVCLLSGTKGASFGRLQSMKLDYRHQDEAVVLSYVNGDRCPPETDDGVPCVFPFIFNGKSYEECIIESRAKLWCSTTADYDRDHEWGFCRHSNSYRTSSIIFKCDEDEDIGRPQVFSEVRGCDVTFEWKTKVVCPPKKLECKFVQKHKTYDLRLLSSLTGSWSWCPSMTTATRTSYTSDSAVPAGEHGAAGQPSTSNQIRLPLDDASIILPLTETFKREEFL

SEQ ID NO: 909840 - protein, 2278 aa, Homo sapiens
EPSRAALTSGSRSVSTSAFALAARPRPGRGPQQSRAVSLAPAAQSGPGAMGAAAGRSPHLGPAPARRPQRSLLLLQLLLLVAAPGSTQAQAAPFPELCSYTWEAVDTKNNVLYKINICGSVDIVQCGPSSAVCMHDLKTRTYHSVGDSVLRSATRSLLEFNTTVSCDQQGTNHRVQSSIAFLCGKTLGTPEFVTATECVHYFEWRTTAACKKDIFKANKEVPCYVFDEELRKHDLNPLIKLSGAYLVDDSDPDTSLFINVCRDIDTLRDPGSQLRACPPGTAACLVRGHQAFDVGQPRDGLKLVRKDRLVLSYVREEAGKLDFCDGHSPAVTITFVCPSERREGTIPKLTAKSNCRYEIEWITEYACHRDYLESKTCSLSGEQQDVSIDLTPLAQSGGSSYISDGKEYLFYLNVCGETEIQFCNKKQAAVCQVKKSDTSQVKAAGRYHNQTLRYSDGDLTLIYFGGDECSSGFQRMSVINFECNKTAGNDGKGTPVFTGEVDCTYFFTWDTEYACVKEKEDLLCGATDGKKRYDLSALVRHAEPEQNWEAVDGSQTETEKKHFFINICHRVLQEGKARGCPEDAAVCAVDKNGSKNLGKFISSPMKEKGNIQLSYSDGDDCGHGKKIKTNITLVCKPGDLESAPVLRTSGEGGCFYEFEWHTAAACVLSKTEGENCTVFDSQAGFSFDLSPLTKKNGAYKVETKKYDFYINVCGPVSVSPCQPDSGACQVAKSDEKTWNLGLSNAKLSYYDGMIQLNYRGGTPYNNERHTPRATLITFLCDRDAGVGFPEYQEEDNSTYNFRWYTSYACPEEPLECVVTDPSTLEQYDLSSLAKSEGGLGGNWYAMDNSGEHVTWRKYYINVCRPLNPVPGCNRYASACQMKYEKDQGSFTEVVSISNLGMAKTGPVVEDSGSLLLEYVNGSACTTSDGRQTTYTTRIHLVCSRGRLNSHPIFSLNWECVVSFLWNTEAACPIQTTTDTDQACSIRDPNSGFVFNLNPLNSSQGYNVSGIGKIFMFNVCGTMPVCGTILGKPASGCEAETQTEELKNWKPARPVGIEKSLQLSTEGFITLTYKGPLSAKGTADAFIVRFVCNDDVYSGPLKFLHQDIDSGQGIRNTYFEFETALACVPSPVDCQVTDLAGNEYDLTGLSTVRKPWTAVDTSVDGRKRTFYLSVCNPLPYIPGCQGSAVGSCLVSEGNSWNLGVVQMSPQAAANGSLSIMYVNGDKCGNQRFSTRITFECAQISGSPAFQLQDGCEYVFIWRTVEACPVVRVEGDNCEVKDPRHGNLYDLKPLGLNDTIVSAGEYTYYFRVCGKLSSDVCPTSDKSKVVSSCQEKREPQGFHKVAGLLTQKLTYENGLLKMNFTGGDTCHKVYQRSTAIFFYCDRGTQRPVFLKETSDCSYLFEWRTQYACPPFDLTECSFKDGAGNSFDLSSLSRYSDNWEAITGTGDPEHYLINVCKSLAPQAGTEPCPPEAAACLLGGSKPVNLGRVRDGPQWRDGIIVLKYVDGDLCPDGIRKKSTTIRFTCSESQVNSRPMFISAVEDCEYTFAWPTATACPMKSNEHDDCQVTNPSTGHLFDLSSLSGRAGFTAAYSEKGLVYMSICGENENCPPGVGACFGQTRISVGKANKRLRYVDQVLQLVYKDGSPCPSKSGLSYKSVISFVCRPEAGPTNRPMLISLDKQTCTLFFSWHTPLACEQATECSVRNGSSIVDLSPLIHRTGGYEAYDESEDDASDTNPDFYINICQPLNPMHGVPCPAGAAVCKVPIDGPPIDIGRVAGPPILNPIANEIYLNFESSTPCLADKHFNYTSLIAFHCKRGVSMGTPKLLRTSECDFVFEWETPVVCPDEVRMDGCTLTDEQLLYSFNLSSLSTSTFKVTRDSRTYSVGVCTFAVGPEQGGCKDGGVCLLSGTKGASFGRLQSMKLDYRHQDEAVVLSYVNGDRCPPETDDGVPCVFPFIFNGKSYEECIIESRAKLWCSTTADYDRDHEWGFCRHSNSYRTSSIIFKCDEDEDIGRPQVFSEVRGCDVTFEWKTKVVCPPKKLECKFVQKHKTYDLRLLSSLTGSWSLVHNGVSYYINLCQKIYKGPLGCSERASICRRTTTGDVQVLGLVHTQKLGVIGDKVVVTYSKGYPCGGNKTASSVIELTCTKTVGRPAFKRFDIDSCTYYFSWDSRAACAVKPQEVQMVNGTITNPINGKSFSLGDIYFKLFRASGDMRTNGDNYLYEIQLSSITSSRNPACSGANICQVKPNDQHFSRKVGTSDKTKYYLQGNPWLPTKFHI

SEQ ID NO: 909841 - protein, 2072 aa, Homo sapiens
EPSRAALTSGSRSVSTSAFALAARPRPGRGPQQSRAVSLAPAAQSGPGAMGAAAGRSPHLGPAPARRPQRSLLLLQLLLLVAAPGSTQAQAAPFPELCSYTWEAVDTKNNVLYKINICGSVDIVQCGPSSAVCMHDLKTRTYHSVGDSVLRSATRSLLEFNTTVSCDQQGTNHRVQSSIAFLCGKTLGTPEFVTATECVHYFEWRTTAACKKDIFKANKEVPCYVFDEELRKHDLNPLIKLSGAYLVDDSDPDTSLFINVCRDIDTLRDPGSQLRACPPGTAACLVRGHQAFDVGQPRDGLKLVRKDRLVLSYVREEAGKLDFCDGHSPAVTITFVCPSERREGTIPKLTAKSNCRYEIEWITEYACHRDYLESKTCSLSGEQQDVSIDLTPLAQSGGSSYISDGKEYLFYLNVCGETEIQFCNKKQAAVCQVKKSDTSQVKAAGRYHNQTLRYSDGDLTLIYFGGDECSSGFQRMSVINFECNKTAGNDGKGTPVFTGEVDCTYFFTWDTEYACVKEKEDLLCGATDGKKRYDLSALVRHAEPEQNWEAVDGSQTETEKKHFFINICHRVLQEGKARGCPEDAAVCAVDKNGSKNLGKFISSPMKEKGNIQLSYSDGDDCGHGKKIKTNITLVCKPGDLESAPVLRTSGEGGCFYEFEWHTAAACVLSKTEGENCTVFDSQAGFSFDLSPLTKKNGAYKVETKKYDFYINVCGPVSVSPCQPDSGACQVAKSDEKTWNLGLSNAKLSYYDGMIQLNYRGGTPYNNERHTPRATLITFLCDRDAGVGFPEYQEEDNSTYNFRWYTSYACPEEPLECVVTDPSTLEQYDLSSLAKSEGGLGGNWYAMDNSGEHVTWRKYYINVCRPLNPVPGCNRYASACQMKYEKDQGSFTEVVSISNLGMAKTGPVVEDSGSLLLEYVNGSACTTSDGRQTTYTTRIHLVCSRGRLNSHPIFSLNWECVVSFLWNTEAACPIQTTTDTDQACSIRDPNSGFVFNLNPLNSSQGYNVSGIGKIFMFNVCGTMPVCGTILGKPASGCEAETQTEELKNWKPARPVGIEKSLQLSTEGFITLTYKGPLSAKGTADAFIVRFVCNDDVYSGPLKFLHQDIDSGQGIRNTYFEFETALACVPSPVDCQVTDLAGNEYDLTGLSTVRKPWTAVDTSVDGRKRTFYLSVCNPLPYIPGCQGSAVGSCLVSEGNSWNLGVVQMSPQAAANGSLSIMYVNGDKCGNQRFSTRITFECAQISGSPAFQLQDGCEYVFIWRTVEACPVVRVEGDNCEVKDPRHGNLYDLKPLGLNDTIVSAGEYTYYFRVCGKLSSDVCPTSDKSKVVSSCQEKREPQGFHKVAGLLTQKLTYENGLLKMNFTGGDTCHKVYQRSTAIFFYCDRGTQRPVFLKETSDCSYLFEWRTQYACPPFDLTECSFKDGAGNSFDLSSLSRYSDNWEAITGTGDPEHYLINVCKSLAPQAGTEPCPPEAAACLLGGSKPVNLGRVRDGPQWRDGIIVLKYVDGDLCPDGIRKKSTTIRFTCSESQVNSRPMFISAVEDCEYTFAWPTATACPMKSNEHDDCQVTNPSTGHLFDLSSLSGRAGFTAAYSEKGLVYMSICGENENCPPGVGACFGQTRISVGKANKRLRYVDQVLQLVYKDGSPCPSKSGLSYKSVISFVCRPEAGPTNRPMLISLDKQTCTLFFSWHTPLACEQATECSVRNGSSIVDLSPLIHRTGGYEAYDESEDDASDTNPDFYINICQPLNPMHGVPCPAGAAVCKVPIDGPPIDIGRVAGPPILNPIANEIYLNFESSTPCLADKHFNYTSLIAFHCKRGVSMGTPKLLRTSECDFVFEWETPVVCPDEVRMDGCTLTDEQLLYSFNLSSLSTSTFKVTRDSRTYSVGVCTFAVGPEQGGCKDGGVCLLSGTKGASFGRLQSMKLDYRHQDEAVVLSYVNGDRCPPETDDGVPCVFPFIFNGKSYEECIIESRAKLWCSTTADYDRDHEWGFCRHSNSYRTSSIIFKCDEDEDIGRPQVFSEVRGCDVTFEWKTKVVCPPKKLECKFVQKHKTYDLRLLSSLTGSWSLVHNGVS

SEQ ID NO: 909842 - protein, 1803 aa, Homo sapiens
EPSRAALTSGSRSVSTSAFALAARPRPGRGPQQSRAVSLAPAAQSGPGAMGAAAGRSPHLGPAPARRPQRSLLLLQLLLLVAAPGSTQAQAAPFPELCSYTWEAVDTKNNVLYKINICGSVDIVQCGPSSAVCMHDLKTRTYHSVGDSVLRSATRSLLEFNTTVSCDQQGTNHRVQSSIAFLCGKTLGTPEFVTATECVHYFEWRTTAACKKDIFKANKEVPCYVFDEELRKHDLNPLIKLSGAYLVDDSDPDTSLFINVCRDIDTLRDPGSQLRACPPGTAACLVRGHQAFDVGQPRDGLKLVRKDRLVLSYVREEAGKLDFCDGHSPAVTITFVCPSERREGTIPKLTAKSNCRYEIEWITEYACHRDYLESKTCSLSGEQQDVSIDLTPLAQSGGSSYISDGKEYLFYLNVCGETEIQFCNKKQAAVCQVKKSDTSQVKAAGRYHNQTLRYSDGDLTLIYFGGDECSSGFQRMSVINFECNKTAGNDGKGTPVFTGEVDCTYFFTWDTEYACVKEKEDLLCGATDGKKRYDLSALVRHAEPEQNWEAVDGSQTETEKKHFFINICHRVLQEGKARGCPEDAAVCAVDKNGSKNLGKFISSPMKEKGNIQLSYSDGDDCGHGKKIKTNITLVCKPGDLESAPVLRTSGEGGCFYEFEWHTAAACVLSKTEGENCTVFDSQAGFSFDLSPLTKKNGAYKVETKKYDFYINVCGPVSVSPCQPDSGACQVAKSDEKTWNLGLSNAKLSYYDGMIQLNYRGGTPYNNERHTPRATLITFLCDRDAGVGFPEYQEEDNSTYNFRWYTSYACPEEPLECVVTDPSTLEQYDLSSLAKSEGGLGGNWYAMDNSGEHVTWRKYYINVCRPLNPVPGCNRYASACQMKYEKDQGSFTEVVSISNLGMAKTGPVVEDSGSLLLEYVNGSACTTSDGRQTTYTTRIHLVCSRGRLNSHPIFSLNWECVVSFLWNTEAACPIQTTTDTDQACSIRDPNSGFVFNLNPLNSSQGYNVSGIGKIFMFNVCGTMPVCGTILGKPASGCEAETQTEELKNWKPARPVGIEKSLQLSTEGFITLTYKGPLSAKGTADAFIVRFVCNDDVYSGPLKFLHQDIDSGQGIRNTYFEFETALACVPSPVDCQVTDLAGNEYDLTGLSTVRKPWTAVDTSVDGRKRTFYLSVCNPLPYIPGCQGSAVGSCLVSEGNSWNLGVVQMSPQAAANGSLSIMYVNGDKCGNQRFSTRITFECAQISGSPAFQLQDGCEYVFIWRTVEACPVVRVEGDNCEVKDPRHGNLYDLKPLGLNDTIVSAGEYTYYFRVCGKLSSDVCPTSDKSKVVSSCQEKREPQGFHKVAGLLTQKLTYENGLLKMNFTGGDTCHKVYQRSTAIFFYCDRGTQRPVFLKETSDCSYLFEWRTQYACPPFDLTECSFKDGAGNSFDLSSLSRYSDNWEAITGTGDPEHYLINVCKSLAPQAGTEPCPPEAAACLLGGSKPVNLGRVRDGPQWRDGIIVLKYVDGDLCPDGIRKKSTTIRFTCSESQVNSRPMFISAVEDCEYTFAWPTATACPMKSNEHDDCQVTNPSTGHLFDLSSLSGRAGFTAAYSEKGLVYMSICGENENCPPGVGACFGQTRISVGKANKRLRYVDQVLQLVYKDGSPCPSKSGLSYKSVISFVCRPEAGPTNRPMLISLDKQTCTLFFSWHTPLACEQATECSVRNGSSIVDLSPLIHRTGGYEAYDESEDDASDTNPDFYINICQPLNPMHGVPCPAGAAVCKVPIDGPPIVSMTNPRVEIIFARLLVITFALFLAFSGELLK

SEQ ID NO: 909843 - protein, 827 aa, Homo sapiens
EPSRAALTSGSRSVSTSAFALAARPRPGRGPQQSRAVSLAPAAQSGPGAMGAAAGRSPHLGPAPARRPQRSLLLLQLLLLVAAPGSTQAQAAPFPELCSYTWEAVDTKNNVLYKINICGSVDIVQCGPSSAVCMHDLKTRTYHSVGDSVLRSATRSLLEFNTTVSCDQQGTNHRVQSSIAFLCGKTLGTPEFVTATECVHYFEWRTTAACKKDIFKANKEVPCYVFDEELRKHDLNPLIKLSGAYLVDDSDPDTSLFINVCRDIDTLRDPGSQLRACPPGTAACLVRGHQAFDVGQPRDGLKLVRKDRLVLSYVREEAGKLDFCDGHSPAVTITFVCPSERREGTIPKLTAKSNCRYEIEWITEYACHRDYLESKTCSLSGEQQDVSIDLTPLAQSGGSSYISDGKEYLFYLNVCGETEIQFCNKKQAAVCQVKKSDTSQVKAAGRYHNQTLRYSDGDLTLIYFGGDECSSGFQRMSVINFECNKTAGNDGKGTPVFTGEVDCTYFFTWDTEYACVKEKEDLLCGATDGKKRYDLSALVRHAEPEQNWEAVDGSQTETEKKHFFINICHRVLQEGKARGCPEDAAVCAVDKNGSKNLGKFISSPMKEKGNIQLSYSDGDDCGHGKKIKTNITLVCKPGDLESAPVLRTSGEGGCFYEFEWHTAAACVLSKTEGENCTVFDSQAGFSFDLSPLTKKNGAYKVETKKYDFYINVCGPVSVSPCQPDSGACQVAKSDEKTWNLGLSNAKLSYYDGMIQLNYRGGTPYNNERHTPRATLITFLCDRDAGVGFPEYQEEDNSTYNFRWYTSYACPEEPLECVVTDPSQPYSG

SEQ ID NO: 909844 - protein, 255 aa, Homo sapiens
FGQTRISVGKANKRLRYVDQVLQLVYKDGSPCPSKSGLSYKSVISFVCRPERAQPIGPCSSPWTSRHALSSSPGTEPCPPEAAACLLGGSKPVNLGRVRDGPQWRDGIIVLKYVDGDLCPDGIRKKSTTIRFTCSESQVNSRPMFISAVEDCEYTFAWPTATACPMKSNEHDDCQVTNPSTGHLFDLSSLSGRAGFTAAYSEKGLVYMSICGEEGGQAGMAWRRREAGRSQHGGGGRRCWCSYSGGSAFPAMFSE

SEQ ID NO: 909845 - protein, 2540 aa, Homo sapiens; identical to SEQ ID NO: 909836

SEQ ID NO: 909846 - protein, 2540 aa, Homo sapiens; identical to SEQ ID NO: 909836

SEQ ID NO: 909847 - protein, 2453 aa, Homo sapiens
EPSRAALTSGSRSVSTSAFALAARPRPGRGPQQSRAVSLAPAAQSGPGAMGAAAGRSPHLGPAPARRPQRSLLLLQLLLLVAAPGSTQAQAAPFPELCSYTWEAVDTKNNVLYKINICGSVDIVQCGPSSAVCMHDLKTRTYHSVGDSVLRSATRSLLEFNTTVSCDQQGTNHRVQSSIAFLCGKTLGTPEFVTATECVHYFEWRTTAACKKDIFKANKEVPCYVFDEELRKHDLNPLIKLSGAYLVDDSDPDTSLFINVCRDIDTLRDPGSQLRACPPGTAACLVRGHQAFDVGQPRDGLKLVRKDRLVLSYVREEAGKLDFCDGHSPAVTITFVCPSERREGTIPKLTAKSNCRYEIEWITEYACHRDYLESKTCSLSGEQQDVSIDLTPLAQSGGSSYISDGKEYLFYLNVCGETEIQFCNKKQAAVCQVKKSDTSQVKAAGRYHNQTLRYSDGDLTLIYFGGDECSSGFQRMSVINFECNKTAGNDGKGTPVFTGEVDCTYFFTWDTEYACVKEKEDLLCGATDGKKRYDLSALVRHAEPEQNWEAVDGSQTETEKKHFFINICHRVLQEGKARGCPEDAAVCAVDKNGSKNLGKFISSPMKEKGNIQLSYSDGDDCGHGKKIKTNITLVCKPGDLESAPVLRTSGEGGCFYEFEWHTAAACVLSKTEGENCTVFDSQAGFSFDLSPLTKKNGAYKVETKKYDFYINVCGPVSVSPCQPDSGACQVAKSDEKTWNLGLSNAKLSYYDGMIQLNYRGGTPYNNERHTPRATLITFLCDRDAGVGFPEYQEEDNSTYNFRWYTSYACPEEPLECVVTDPSTLEQYDLSSLAKSEGGLGGNWYAMDNSGEHVTWRKYYINVCRPLNPVPGCNRYASACQMKYEKDQGSFTEVVSISNLGMAKTGPVVEDSGSLLLEYVNGSACTTSDGRQTTYTTRIHLVCSRGRLNSHPIFSLNWECVVSFLWNTEAACPIQTTTDTDQACSIRDPNSGFVFNLNPLNSSQGYNVSGIGKIFMFNVCGTMPVCGTILGKPASGCEAETQTEELKNWKPARPVGIEKSLQLSTEGFITLTYKGPLSAKGTADAFIVRFVCNDDVYSGPLKFLHQDIDSGQGIRNTYFEFETALACVPSPVDCQVTDLAGNEYDLTGLSTVRKPWTAVDTSVDGRKRTFYLSVCNPLPYIPGCQGSAVGSCLVSEGNSWNLGVVQMSPQAAANGSLSIMYVNGDKCGNQRFSTRITFECAQISGSPAFQLQDGCEYVFIWRTVEACPVVRVEGDNCEVKDPRHGNLYDLKPLGLNDTIVSAGEYTYYFRVCGKLSSDVCPTSDKSKVVSSCQEKREPQGFHKVAGLLTQKLTYENGLLKMNFTGGDTCHKVYQRSTAIFFYCDRGTQRPVFLKETSDCSYLFEWRTQYACPPFDLTECSFKDGAGNSFDLSSLSRYSDNWEAITGTGDPEHYLINVCKSLAPQAGTEPCPPEAAACLLGGSKPVNLGRVRDGPQWRDGIIVLKYVDGDLCPDGIRKKSTTIRFTCSESQVNSRPMFISAVEDCEYTFAWPTATACPMKSNEHDDCQVTNPSTGHLFDLSSLSGRAGFTAAYSEKGLVYMSICGENENCPPGVGACFGQTRISVGKANKRLRYVDQVLQLVYKDGSPCPSKSGLSYKSVISFVCRPEAGPTNRPMLISLDKQTCTLFFSWHTPLACEQATECSVRNGSSIVDLSPLIHRTGGYEAYDESEDDASDTNPDFYINICQPLNPMHGVPCPAGAAVCKVPIDGPPIDIGRVAGPPILNPIANEIYLNFESSTPCLADKHFNYTSLIAFHCKRGVSMGTPKLLRTSECDFVFEWETPVVCPDEVRMDGCTLTDEQLLYSFNLSSLSTSTFKVTRDSRTYSVGVCTFAVGPEQGGCKDGGVCLLSGTKGASFGRLQSMKLDYRHQDEAVVLSYVNGDRCPPETDDGVPCVFPFIFNGKSYEECIIESRAKLWCSTTADYDRDHEWGFCRHSNSYRTSSIIFKCDEDEDIGRPQVFSEVRGCDVTFEWKTKVVCPPKKLECKFVQKHKTYDLRLLSSLTGSWSLVHNGVSYYINLCQKIYKGPLGCSERASICRRTTTGDVQVLGLVHTQKLGVIGDKVVVTYSKGYPCGGNKTASSVIELTCTKTVGRPAFKRFDIDSCTYYFSWDSRAACAVKPQEVQMVNGTITNPINGKSFSLGDIYFKLFRASGDMRTNGDNYLYEIQLSSITSSRNPACSGANICQVKPNDQHFSRKVGTSDKTKYYLQDGDLDVVFASSSKCGKDKTKSVSSTIFFHCDPLVEDGIPEFSHETADCQYLFSWYTSAVCPLGVGFDSENPGDDGQMHKGLSERSQAVGAVLSLLLVALTCCLLALLLYKKERRETVISKLTTCCRRSSNVSYKYSKVNKEEETDENETEWLMEEREAGRSQHGGGGRRCWCSYSGGSAFPAMFSE

SEQ ID NO: 909848 - protein, 1646 aa, Homo sapiens
EPSRAALTSGSRSVSTSAFALAARPRPGRGPQQSRAVSLAPAAQSGPGAMGAAAGRSPHLGPAPARRPQRSLLLLQLLLLVAAPGSTQAQAAPFPELCSYTWEAVDTKNNVLYKINICGSVDIVQCGPSSAVCMHDLKTRTYHSVGDSVLRSATRSLLEFNTTVSCDQQGTNHRVQSSIAFLCGKTLGTPEFVTATECVHYFEWRTTAACKKDIFKANKEVPCYVFDEELRKHDLNPLIKLSGAYLVDDSDPDTSLFINVCRDIDTLRDPGSQLRACPPGTAACLVRGHQAFDVGQPRDGLKLVRKDRLVLSYVREEAGKLDFCDGHSPAVTITFVCPSERREGTIPKLTAKSNCRYEIEWITEYACHRDYLESKTCSLSGEQQDVSIDLTPLAQSGGSSYISDGKEYLFYLNVCGETEIQFCNKKQAAVCQVKKSDTSQVKAAGRYHNQTLRYSDGDLTLIYFGGDECSSGFQRMSVINFECNKTAGNDGKGTPVFTGEVDCTYFFTWDTEYACVKEKEDLLCGATDGKKRYDLSALVRHAEPEQNWEAVDGSQTETEKKHFFINICHRVLQEGKARGCPEDAAVCAVDKNGSKNLGKFISSPMKEKGNIQLSYSDGDDCGHGKKIKTNITLVCKPGDLESAPVLRTSGEGGCFYEFEWHTAAACVLSKTEGENCTVFDSQAGFSFDLSPLTKKNGAYKVETKKYDFYINVCGPVSVSPCQPDSGACQVAKSDEKTWNLGLSNAKLSYYDGMIQLNYRGGTPYNNERHTPRATLITFLCDRDAGVGFPEYQEEDNSTYNFRWYTSYACPEEPLECVVTDPSTLEQYDLSSLAKSEGGLGGNWYAMDNSGEHVTWRKYYINVCRPLNPVPGCNRYASACQMKYEKDQGSFTEVVSISNLGMAKTGPVVEDSGSLLLEYVNGSACTTSDGRQTTYTTRIHLVCSRGRLNSHPIFSLNWECVVSFLWNTEAACPIQTTTDTDQACSIRDPNSGFVFNLNPLNSSQGYNVSGIGKIFMFNVCGTMPVCGTILGKPASGCEAETQTEELKNWKPARPVGIEKSLQLSTEGFITLTYKGPLSAKGTADAFIVRFVCNDDVYSGPLKFLHQDIDSGQGIRNTYFEFETALACVPSPVDCQVTDLAGNEYDLTGLSTVRKPWTAVDTSVDGRKRTFYLSVCNPLPYIPGCQGSAVGSCLVSEGNSWNLGVVQMSPQAAANGSLSIMYVNGDKCGNQRFSTRITFECAQISGSPAFQLQDGCEYVFIWRTVEACPVVRVEGDNCEVKDPRHGNLYDLKPLGLNDTIVSAGEYTYYFRVCGKLSSDVCPTSDKSKVVSSCQEKREPQGFHKVAGLLTQKLTYENGLLKMNFTGGDTCHKVYQRSTAIFFYCDRGTQRPVFLKETSDCSYLFEWRTQYACPPFDLTECSFKDGAGNSFDLSSLSRYSDNWEAITGTGDPEHYLINVCKSLAPQAGTEPCPPEAAACLLGGSKPVNLGRVRDGPQWRDGIIVLKYVDGDLCPDGIRKKSTTIRFTCSESQVNSRPMFISAVEDCEYTFAWPTATACPMKSNEHDDCQVTNPSTGHLFDLSSLSGRAGFTAAYSEKGLVYMSICGEEGGQAGMAWRRREAGRSQHGGGGRRCWCSYSGGSAFPAMFSE

SEQ ID NO: 909849 - protein, 1282 aa, Homo sapiens
EPSRAALTSGSRSVSTSAFALAARPRPGRGPQQSRAVSLAPAAQSGPGAMGAAAGRSPHLGPAPARRPQRSLLLLQLLLLVAAPGSTQAQAAPFPELCSYTWEAVDTKNNVLYKINICGSVDIVQCGPSSAVCMHDLKTRTYHSVGDSVLRSATRSLLEFNTTVSCDQQGTNHRVQSSIAFLCGKTLGTPEFVTATECVHYFEWRTTAACKKDIFKANKEVPCYVFDEELRKHDLNPLIKLSGAYLVDDSDPDTSLFINVCRDIDTLRDPGSQLRACPPGTAACLVRGHQAFDVGQPRDGLKLVRKDRLVLSYVREEAGKLDFCDGHSPAVTITFVCPSERREGTIPKLTAKSNCRYEIEWITEYACHRDYLESKTCSLSGEQQDVSIDLTPLAQSGGSSYISDGKEYLFYLNVCGETEIQFCNKKQAAVCQVKKSDTSQVKAAGRYHNQTLRYSDGDLTLIYFGGDECSSGFQRMSVINFECNKTAGNDGKGTPVFTGEVDCTYFFTWDTEYACVKEKEDLLCGATDGKKRYDLSALVRHAEPEQNWEAVDGSQTETEKKHFFINICHRVLQEGKARGCPEDAAVCAVDKNGSKNLGKFISSPMKEKGNIQLSYSDGDDCGHGKKIKTNITLVCKPGDLESAPVLRTSGEGGCFYEFEWHTAAACVLSKTEGENCTVFDSQAGFSFDLSPLTKKNGAYKVETKKYDFYINVCGPVSVSPCQPDSGACQVAKSDEKTWNLGLSNAKLSYYDGMIQLNYRGGTPYNNERHTPRATLITFLCDRDAGVGFPEYQEEDNSTYNFRWYTSYACPEEPLECVVTDPSTLEQYDLSSLAKSEGGLGGNWYAMDNSGEHVTWRKYYINVCRPLNPVPGCNRYASACQMKYEKDQGSFTEVVSISNLGMAKTGPVVEDSGSLLLEYVNGSACTTSDGRQTTYTTRIHLVCSRGRLNSHPIFSLNWECVVSFLWNTEAACPIQTTTDTDQACSIRDPNSGFVFNLNPLNSSQGYNVSGIGKIFMFNVCGTMPVCGTILGKPASGCEAETQTEELKNWKPARPVGIEKSLQLSTEGFITLTYKGPLSAKGTADAFIVRFVCNDDVYSGPLKFLHQDIDSGQGIRNTYFEFETALACVPSPVDCQVTDLAGNEYDLTGLSTVRKPWTAVDTSVDGRKRTFYLSVCNPLPYIPGCQGSAVGSCLVSEGNSWNLGVVQMSPQAAANGSLSIMYVNGDKCGNQRFSTRITFECAQISGSPAFQLQDGCEYVFIWRTVEACPVVRVEGRTGPVPTSH

SEQ ID NO: 909850 - protein, 32 aa, Homo sapiens
MFISAVEDCEYTFAWPTATACPMKSNEHDDCQ

SEQ ID NO: 909851 - protein, 889 aa, Homo sapiens
MSIVIPLGVDTAETSYLEMAAGSEPESVEASPVVVEKSNSYPHQLYTSSSHHSHSYIGLPYADHNYGARPPPTPPASPPPSVLISKNEVGIFTTPNFDETSSATTISTSEDGSYGTDVTRCICGFTHDDGYMICCDKCSVWQHIDCMGIDRQHIPDTYLCERCQPRNLDKERAVLLQRRKRENMSDGDTSATESGDEVPVELYTAFQHTPTSITLTASRVSKVNDKRRKKSGEKEQHISKCKKAFREGSRKSSRVKGSAPEIDPSSDGSNFGWETKIKAWMDRYEEANNNQYSEGVQREAQRIALRLGNGNDKKEMNKSDLNTNNLLFKPPVESHIQKNKKILKSAKDLPPDALIIEYRGKFMLREQFEANGYFFKRPYPFVLFYSKFHGLEMCVDARTFGNEARFIRRSCTPNAEVRHEIQDGTIHLYIYSIHSIPKGTEITIAFDFDYGNCKYKVDCACLKENPECPVLKRSSESMENINSGYETRRKKGKKDKDISKEKDTQNQNITLDCEGTTNKMKSPETKQRKLSPLRLSVSNNQEPDFIDDIEEKTPISNEVEMESEEQIAERKRKMTREERKMEAILQAFARLEKREKRREQALERISTAKTEVKTECKDTQIVSDAEVIQEQAKEENASKPTPAKVNRTKQRKSFSRSRTHIGQQRRRHRTVSMCSDIQPSSPDIEVTSQQNDIENTVLTIEPETETALAEIITETEVPALNKCPTKYPKTKKHLVNEWLSEKNEKTGKPSDGLSERPLRITTDPEVLATQLNSLPGLTYSPHVYSTPKHYIRFTSPFLSEKRRRKEPTENISGSCKKRWLKQALEEENSAILHRFNSPCQERSRSPAVNGENKSPLLLNDSCSLPDLTTPLKKRRFYQLLDSVYSETST

SEQ ID NO: 909852 - protein, 639 aa, Homo sapiens
MSIVIPLGVDTAETSYLEMAAGSEPESVEASPVVVEKSNSYPHQLYTSSSHHSHSYIGLPYADHNYGARPPPTPPASPPPSVLISKNEVGIFTTPNFDETSSATTISTSEDGSYGTDVTRCICGFTHDDGYMICCDKCSVWQHIDCMGIDRQHIPDTYLCERCQPRNLDKERAVLLQRRKRENMSDGDTSATESGDEVPVELYTAFQHTPTSITLTASRVSKVNDKRRKKSGEKEQHISKCKKAFREGSRKSSRVKGSAPEIDPSSDGSNFGWETKIKAWMDRYEEANNNQYSEGVQREAQRIALRLGNGNDKKEMNKSDLNTNNLLFKPPVESHIQKNKKILKSAKDLPPDALIIEYRGKFMLREQFEANGYFFKRPYPFVLFYSKFHGLEMCVDARTFGNEARFIRRSCTPNAEVRHEIQDGTIHLYIYSIHSIPKGTEITIAFDFDYGNCKYKVDCACLKENPECPVLKRSSESMENINSGYETRRKKGKKDKDISKEKDTQNQNITLDCEGTTNKMKSPETKQRKLSPLRLSVSNNQEPDFIDDIEEKTPISNEVEMESEEQIAERKRKMTREERKMEAILQAFARLEKREKRREQALERISTAKTEVKTECKDTQIVSDAEVIQVLFIQVVLFS

SEQ ID NO: 909853 - protein, 639 aa, Homo sapiens; identical to SEQ ID NO: 909852

SEQ ID NO: 909854 - protein, 889 aa, Homo sapiens; identical to SEQ ID NO: 909851

SEQ ID NO: 909855 - protein, 600 aa, Homo sapiens
MSIVIPLGVDTAETSYLEMAAGSEPESVEASPVVVEKSNSYPHQLYTSSSHHSHSYIGLPYADHNYGARPPPTPPASPPPSVLISKNEVGIFTTPNFDETSSATTISTSEDGSYGTDVTRCICGFTHDDGYMICCDKCSVWQHIDCMGIDRQHIPDTYLCERCQPRNLDKERAVLLQRRKRENMSDGDTSATESGDEVPVELYTAFQHTPTSITLTASRVSKVNDKRRKKSGEKEQHISKCKKAFREGSRKSSRVKGSAPEIDPSSDGSNFGWETKIKAWMDRYEEANNNQYSEGVQREAQRIALRLGNGNDKKEMNKSDLNTNNLLFKPPVESHIQKNKKILKSAKDLPPDALIIEYRGKFMLREQFEANGYFFKRPYPFVLFYSKFHGLEMCVDARTFGNEARFIRRSCTPNAEVRHEIQDGTIHLYIYSIHSIPKGTEITIAFDFDYGNCKYKVDCACLKENPECPVLKRSSESMENINSGYETRRKKGKKDKDISKEKDTQNQNITLDCEGTTNKMKSPETKQRKLSPLRLSVSNNQEPDFIDDIEEKTPISNEVEMESEEQIAERKRKMTREERKMEAILQAFAKLAQILGSNIF

SEQ ID NO: 909856 - protein, 872 aa, Homo sapiens
MQLFPPRPESVEASPVVVEKSNSYPHQLYTSSSHHSHSYIGLPYADHNYGARPPPTPPASPPPSVLISKNEVGIFTTPNFDETSSATTISTSEDGSYGTDVTRCICGFTHDDGYMICCDKCSVWQHIDCMGIDRQHIPDTYLCERCQPRNLDKERAVLLQRRKRENMSDGDTSATESGDEVPVELYTAFQHTPTSITLTASRVSKVNDKRRKKSGEKEQHISKCKKAFREGSRKSSRVKGSAPEIDPSSDGSNFGWETKIKAWMDRYEEANNNQYSEGVQREAQRIALRLGNGNDKKEMNKSDLNTNNLLFKPPVESHIQKNKKILKSAKDLPPDALIIEYRGKFMLREQFEANGYFFKRPYPFVLFYSKFHGLEMCVDARTFGNEARFIRRSCTPNAEVRHEIQDGTIHLYIYSIHSIPKGTEITIAFDFDYGNCKYKVDCACLKENPECPVLKRSSESMENINSGYETRRKKGKKDKDISKEKDTQNQNITLDCEGTTNKMKSPETKQRKLSPLRLSVSNNQEPDFIDDIEEKTPISNEVEMESEEQIAERKRKMTREERKMEAILQAFARLEKREKRREQALERISTAKTEVKTECKDTQIVSDAEVIQEQAKEENASKPTPAKVNRTKQRKSFSRSRTHIGQQRRRHRTVSMCSDIQPSSPDIEVTSQQNDIENTVLTIEPETETALAEIITETEVPALNKCPTKYPKTKKHLVNEWLSEKNEKTGKPSDGLSERPLRITTDPEVLATQLNSLPGLTYSPHVYSTPKHYIRFTSPFLSEKRRRKEPTENISGSCKKRWLKQALEEENSAILHRFNSPCQERSRSPAVNGENKSPLLLNDSCSLPDLTTPLKKRRFYQLLDSVYSETST

SEQ ID NO: 909857 - protein, 840 aa, Homo sapiens
PWLQLSTVHVVLADHNYGARPPPTPPASPPPSVLISKNEVGIFTTPNFDETSSATTISTSEDGSYGTDVTRCICGFTHDDGYMICCDKCSVWQHIDCMGIDRQHIPDTYLCERCQPRNLDKERAVLLQRRKRENMSDGDTSATESGDEVPVELYTAFQHTPTSITLTASRVSKVNDKRRKKSGEKEQHISKCKKAFREGSRKSSRVKGSAPEIDPSSDGSNFGWETKIKAWMDRYEEANNNQYSEGVQREAQRIALRLGNGNDKKEMNKSDLNTNNLLFKPPVESHIQKNKKILKSAKDLPPDALIIEYRGKFMLREQFEANGYFFKRPYPFVLFYSKFHGLEMCVDARTFGNEARFIRRSCTPNAEVRHEIQDGTIHLYIYSIHSIPKGTEITIAFDFDYGNCKYKVDCACLKENPECPVLKRSSESMENINSGYETRRKKGKKDKDISKEKDTQNQNITLDCEGTTNKMKSPETKQRKLSPLRLSVSNNQEPDFIDDIEEKTPISNEVEMESEEQIAERKRKMTREERKMEAILQAFARLEKREKRREQALERISTAKTEVKTECKDTQIVSDAEVIQEQAKEENASKPTPAKVNRTKQRKSFSRSRTHIGQQRRRHRTVSMCSDIQPSSPDIEVTSQQNDIENTVLTIEPETETALAEIITETEVPALNKCPTKYPKTKKHLVNEWLSEKNEKTGKPSDGLSERPLRITTDPEVLATQLNSLPGLTYSPHVYSTPKHYIRFTSPFLSEKRRRKEPTENISGSCKKRWLKQALEEENSAILHRFNSPCQERSRSPAVNGENKSPLLLNDSCSLPDLTTPLKKRRFYQLLDSVYSETST

SEQ ID NO: 909858 - protein, 231 aa, Homo sapiens
MSIVIPLGVDTAETSYLEMAAGSEPESVEASPVVVEKSNSYPHQLYTSSSHHSHSYIGLPYADHNYGARPPPTPPASPPPSVLISKNEVGIFTTPNFDETSSATTISTSEDGSYGTDVTRCICGFTHDDGYMICCDKCSVWQHIDCMGIDRQHIPDTYLCERCQPRNLDKERAVLLQRRKRENMSDGDTSATESGDEVPVELYTAFQHTPTSITLTASRVSKVNDKRSIKR

SEQ ID NO: 909859 - protein, 527 aa, Homo sapiens
MLREQFEANGYFFKRPYPFVLFYSKFHGLEMCVDARTFGNEARFIRRSCTPNAEVRHEIQDGTIHLYIYSIHSIPKGTEITIAFDFDYGNCKYKVDCACLKENPECPVLKRSSESMENINSGYETRRKKGKKDKDISKEKDTQNQNITLDCEGTTNKMKSPETKQRKLSPLRLSVSNNQEPDFIDDIEEKTPISNEVEMESEEQIAERKRKMTREERKMEAILQAFARLEKREKRREQALERISTAKTEVKTECKDTQIVSDAEVIQEQAKEENASKPTPAKVNRTKQRKSFSRSRTHIGQQRRRHRTVSMCSDIQPSSPDIEVTSQQNDIENTVLTIEPETETALAEIITETEVPALNKCPTKYPKTKKHLVNEWLSEKNEKTGKPSDGLSERPLRITTDPEVLATQLNSLPGLTYSPHVYSTPKHYIRFTSPFLSEKRRRKEPTENISGSCKKRWLKQALEEENSAILHRFNSPCQERSRSPAVNGENKSPLLLNDSCSLPDLTTPLKKRRFYQLLDSVYSETST

SEQ ID NO: 909860 - protein, 166 aa, Homo sapiens
MSIVIPLGVDTAETSYLEMAAGSEPESVEASPVVVEKSNSYPHQLYTSSSHHSHSYIGLPYADHNYGARPPPTPPASPPPSVLISKNEVGIFTTPNFDETSSATTISTSEDGSYGTDVTRCICGFTHDDGYMICCDKCSVWQHIDCMGIDRQHIPDTYLCERCQPR

SEQ ID NO: 909861 - protein, 412 aa, Homo sapiens
MENINSGYETRRKKGKKDKDISKEKDTQNQNITLDCEGTTNKMKSPETKQRKLSPLRLSVSNNQEPDFIDDIEEKTPISNEVEMESEEQIAERKRKMTREERKMEAILQAFARLEKREKRREQALERISTAKTEVKTECKDTQIVSDAEVIQEQAKEENASKPTPAKVNRTKQRKSFSRSRTHIGQQRRRHRTVSMCSDIQPSSPDIEVTSQQNDIENTVLTIEPETETALAEIITETEVPALNKCPTKYPKTKKHLVNEWLSEKNEKTGKPSDGLSERPLRITTDPEVLATQLNSLPGLTYSPHVYSTPKHYIRFTSPFLSEKRRRKEPTENISGSCKKRWLKQALEEENSAILHRFNSPCQERSRSPAVNGENKSPLLLNDSCSLPDLTTPLKKRRFYQLLDSVYSETST

SEQ ID NO: 909862 - protein, 69 aa, Homo sapiens
SGRAAPRRRRHFPRARGSDTERAQGAESETVPEFGSGNRVGIDTPSSLAVVSAFLLTAWLPPPLLLGSW

SEQ ID NO: 909863 - protein, 609 aa, Homo sapiens
MSIVIPLGVDTAETSYLEMAAGSEPESVEASPVVVEKSNSYPHQLYTSSSHHSHSYIGLPYADHNYGARPPPTPPASPPPSVLISKNEVGIFTTPNFDETSSATTISTSEDGSYGTDVTRCICGFTHDDGYMICCDKCSVWQHIDCMGIDRQHIPDTYLCERCQPRNLDKERAVLLQRRKRENMSDGDTSATESGDEVPVELYTAFQHTPTSITLTASRVSKVNDKRRKKSGEKEQHISKCKKAFREGSRKSSRVKGSAPEIDPSSDGSNFGWETKIKAWMDRYEEANNNQYSEGVQREAQRIALRLGNGNDKKEMNKSDLNTNNLLFKPPVESHIQKNKKILKSAKDLPPDALIIEYRGKFMLREQFEANGYFFKRPYPFVLFYSKFHGLEMCVDARTFGNEARFIRRSCTPNAEVRHEIQDGTIHLYIYSIHSIPKGTEITIAFDFDYGNCKYKVDCACLKENPECPVLKRSSESMENINSGYETRRKKGKKDKDISKEKDTQNQNITLDCEGTTNKMKSPETKQRKLSPLRLSVSNNQEPDFIDDIEEKTPISNEVEMESEEQIAERKRKMVSWEASSLGLVTAALHMVIVAAFTWAFTLFFEVSE

SEQ ID NO: 909864 - protein, 603 aa, Homo sapiens
MSIVIPLGVDTAETSYLEMAAGSEPESVEASPVVVEKSNSYPHQLYTSSSHHSHSYIGLPYADHNYGARPPPTPPASPPPSVLISKNEVGIFTTPNFDETSSATTISTSEDGSYGTDVTRCICGFTHDDGYMICCDKCSVWQHIDCMGIDRQHIPDTYLCERCQPRNLDKERAVLLQRRKRENMSDGDTSATESGDEVPVELYTAFQHTPTSITLTASRVSKVNDKRRKKSGEKEQHISKCKKAFREGSRKSSRVKGSAPEIDPSSDGSNFGWETKIKAWMDRYEEANNNQYSEGVQREAQRIALRLGNGNDKKEMNKSDLNTNNLLFKPPVESHIQKNKKILKSAKDLPPDALIIEYRGKFMLREQFEANGYFFKRPYPFVLFYSKFHGLEMCVDARTFGNEARFIRRSCTPNAEVRHEIQDGTIHLYIYSIHSIPKGTEITIAFDFDYGNCKYKVDCACLKENPECPVLKRSSESMENINSGYETRRKKGKKDKDISKEKDTQNQNITLDCEGTTNKMKSPETKQRKLSPLRLSVSNNQEPDFIDDIEEKTPISNEVEMESEEQIAERKRKMTREERKMEAILQAFARLEKRNLEKELGIL

SEQ ID NO: 909865 - protein, 889 aa, Homo sapiens; identical to SEQ ID NO: 909851

SEQ ID NO: 909866 - protein, 872 aa, Homo sapiens; identical to SEQ ID NO: 909856

SEQ ID NO: 909867 - protein, 889 aa, Homo sapiens; identical to SEQ ID NO: 909851

SEQ ID NO: 909868 - protein, 706 aa, Homo sapiens
MSDGDTSATESGDEVPVELYTAFQHTPTSITLTASRVSKVNDKRRKKSGEKEQHISKCKKAFREGSRKSSRVKGSAPEIDPSSDGSNFGWETKIKAWMDRYEEANNNQYSEGVQREAQRIALRLGNGNDKKEMNKSDLNTNNLLFKPPVESHIQKNKKILKSAKDLPPDALIIEYRGKFMLREQFEANGYFFKRPYPFVLFYSKFHGLEMCVDARTFGNEARFIRRSCTPNAEVRHEIQDGTIHLYIYSIHSIPKGTEITIAFDFDYGNCKYKVDCACLKENPECPVLKRSSESMENINSGYETRRKKGKKDKDISKEKDTQNQNITLDCEGTTNKMKSPETKQRKLSPLRLSVSNNQEPDFIDDIEEKTPISNEVEMESEEQIAERKRKMTREERKMEAILQAFARLEKREKRREQALERISTAKTEVKTECKDTQIVSDAEVIQEQAKEENASKPTPAKVNRTKQRKSFSRSRTHIGQQRRRHRTVSMCSDIQPSSPDIEVTSQQNDIENTVLTIEPETETALAEIITETEVPALNKCPTKYPKTKKHLVNEWLSEKNEKTGKPSDGLSERPLRITTDPEVLATQLNSLPGLTYSPHVYSTPKHYIRFTSPFLSEKRRRKEPTENISGSCKKRWLKQALEEENSAILHRFNSPCQERSRSPAVNGENKSPLLLNDSCSLPDLTTPLKKRRFYQLLDSVYSETST

SEQ ID NO: 909869 - protein, 139 aa, Homo sapiens
MSIVIPLGVDTAETSYLEMAAGSEPESVEASPVVVEKSNSYPHQLYTSSSHHSHSYIGLPYADHNYGARPPPTPPASPPPSVLISKNEVGIFTTPNFDETSSATTISTSEDGSYGTDVTRCICGFTHDDGYMICCDKCR

SEQ ID NO: 909870 - protein, 416 aa, Homo sapiens
MSIVIPLGVDTAETRRKKGKKDKDISKEKDTQNQNITLDCEGTTNKMKSPETKQRKLSPLRLSVSNNQEPDFIDDIEEKTPISNEVEMESEEQIAERKRKMTREERKMEAILQAFARLEKREKRREQALERISTAKTEVKTECKDTQIVSDAEVIQEQAKEENASKPTPAKVNRTKQRKSFSRSRTHIGQQRRRHRTVSMCSDIQPSSPDIEVTSQQNDIENTVLTIEPETETALAEIITETEVPALNKCPTKYPKTKKHLVNEWLSEKNEKTGKPSDGLSERPLRITTDPEVLATQLNSLPGLTYSPHVYSTPKHYIRFTSPFLSEKRRRKEPTENISGSCKKRWLKQALEEENSAILHRFNSPCQERSRSPAVNGENKSPLLLNDSCSLPDLTTPLKKRRFYQLLDSVYSETST

SEQ ID NO: 909871 - protein, 326 aa, Homo sapiens
MDLTAIYESLLSLSPDVPVPSDHGGTESSPGWGSSGPWSLSPSDSSPSGVTSRLPGRSTSLVEGRSCGWVPPPPGFAPLAPRLGPELSPSPTSPTATSTTPSRYKTELCRTFSESGRCRYGAKCQFAHGLGELRQANRHPKYKTELCHKFYLQGRCPYGSRCHFIHNPSEDLAAPGHPPVLRQSISFSGLPSGRRTSPPPPGLAGPSLSSSSFSPSSSPPPPGDLPLSPSAFSAAPGTPLARRDPTPVCCPSCRRATPISVWGPLGGLVRTPSVQSLGSDPDEYASSGSSLGGSDSPVFEAGVFAPPQPVAAPRRLPIFNRISVSE

SEQ ID NO: 909872 - protein, 237 aa, Homo sapiens [sequence omitted]

SEQ ID NO: 909873 - protein, 306 aa, Homo sapiens
HTELLQPWAIRATPAWANKSYSSLGNKSCHPHPLRPLQPPPPPRATRLSYVGPSQRVGAAATGPSASLPMAWASCARPIATPNTRRNSVTSSTSRAAAPTALAATSSTTLAKTWRPRATLLCFARASASPACPLAAGPHHHHQAWPALPCPPAPSRPPAPHHHLGTFHCHPLPSLLPLAPPWLEETPPQSVAPPAEGPLLSASGGPWVAWFGPPLYSPWDPTLMNMPAAAAAWGALTLPSSRREFLHHPSPWQPPGDSPSSIASLFLSDKVTARSDQLDLSGEPRLLHCGLCMDPRAVGTWGTVIK

SEQ ID NO: 909874 - protein, 326 aa, Homo sapiens; identical to SEQ ID NO: 909871

SEQ ID NO: 909875 - protein, 326 aa, Homo sapiens; identical to SEQ ID NO: 909871

SEQ ID NO: 909876 - protein, 326 aa, Homo sapiens; identical to SEQ ID NO: 909871

SEQ ID NO: 909877 - protein, 326 aa, Homo sapiens; identical to SEQ ID NO: 909871

SEQ ID NO: 909878 - protein, 326 aa, Homo sapiens; identical to SEQ ID NO: 909871

SEQ ID NO: 909879 - protein, 326 aa, Homo sapiens; identical to SEQ ID NO: 909871

SEQ ID NO: 909880 - protein, 326 aa, Homo sapiens; identical to SEQ ID NO: 909871

SEQ ID NO: 909881 - protein, 220 aa, Homo sapiens
MDLTAIYESLLSLSPDVPVPSDHGGTESSPGWGSSGPWSLSPSDSSPSGVTSRLPGRSTSLVEGRSCGWVPPPPGFAPLAPRLGPELSPSPTSPTATSTTPSRYKTELCRTFSESGRCRYGAKCQFAHGLGELRQANRHPKYKTELCHKFYLQGRCPYGSRCHFIHNPSEDLAAPGHPPVLRQSISFSGLPSGRRTSPPPPGLAGPSLSSSSFSPSSSPQ

SEQ ID NO: 909882 - protein, 140 aa, Homo sapiens
  misc_feature (7)..(7): Xaa can be any naturally occurring amino acid
YTVTQGXAHKERLKKVKGTRQILPRLFTKNITSSITSIRGTACPVTHVYRPRYPNHSWIASWQSTHHSRPTPLMANRYTMDLTAIYEVSPRRTASPVPACLSPSPHLSSAANSSPGRLPPFSNCIAPPLFHRSPAMRGLP

SEQ ID NO: 909883 - protein, 326 aa, Homo sapiens; identical to SEQ ID NO: 909871

SEQ ID NO: 909884 - protein, 147 aa, Homo sapiens
MDLTAIYESLLSLSPDVPVPPPWLEETPPQSVAPPAEGPLLSASGGPWVAWFGPPLYSPWDPTLMNMPAAAAAWGALTLPSSRREFLHHPSPWQPPGDSPSSIASLFLSDKVTARSDQLDLSGEPRLLHCGLCMDPRAVGTWGTVIK

SEQ ID NO: 909885 - protein, 326 aa, Homo sapiens; identical to SEQ ID NO: 909871

SEQ ID NO: 909886 - protein, 326 aa, Homo sapiens; identical to SEQ ID NO: 909871

SEQ ID NO: 909887 - protein, 326 aa, Homo sapiens; identical to SEQ ID NO: 909871

SEQ ID NO: 909888 - protein, 326 aa, Homo sapiens; identical to SEQ ID NO: 909871

SEQ ID NO: 909889 - protein, 285 aa, Homo sapiens
MDLTAIYESLLSLSPDVPVPSDHGGTESSPGWGSSGPWSLSPSDSSPSGVTSRLPGRSTSLVEGRSCGWVPPPPGFAPLAPRLGPELSPSPTSPTATSTTPSRYKTELCRTFSESGRCRYGAKCQFAHGLGELRQANRHPKYKTELCHKFYLQGRCPYGSRCHFIHNPSEDLAAPGHPPVLRQSISFSGLPSGRRTSPPPPGLAGPSLSSSSFSPSSSPPPPGDLPLSPSAFSAAPGTPLARRDPTPVCCPSCRRATPISVWGPLGGLVRTPSVHQICLLESYVL

SEQ ID NO: 909890 - protein, 141 aa, Homo sapiens
MDLTAIYESLLSLSPDVPVPSDHGGTESSPGWGSSGPWSLSPSDSSPSGVTSRLPGRSTSLVEGRSCGWVPPPPGFAPLAPRLGPELSPSPTSPTATSTTPSRYKTELCRTFSESGRCRYGAKCQFAHGLGELRQANRHPK

SEQ ID NO: 909891 - protein, 469 aa, Homo sapiens
MSALTPPTDMPTPTTDKITQAAMETIYLCKFRVSMDGEWLCLRELDDISLTPDPEPTHEDPNYLMANERMNLMNMAKLSIKGLIESALNLGRTLDSDYAPLQQFFVVMEHCLKHGLKAKKTFLGQNKSFWGPLELVEKLVPEAAEITASVKDLPGLKTPVGRGRAWLRLALMQKKLSEYMKALINKKELLSEFYEPNALMMEEEGAIIAGLLVGLNVIDANFCMKGEDLDSQVGVIDFSMYLKDGNSSKGTEGDGQITAILDQKNYVEELNRHLNATVNNLQAKVDALEKSNTKLTEELAVANNRIITLQEEMERVKEESSYILESNRKGPKQDRTAEGQALSEARKHLKEETQLRLDVEKELEMQISMRQEMELAMKMLEKDVCEKQDALVSLRQQLDDLRALKHELAFKLQSSDLGVKQKSELNSRLEEKTNQMAATIKQLEQSEKDLVKQAKTLNSAANKLIPKHH

SEQ ID NO: 909892 - protein, 216 aa, Homo sapiens
MANERMNLMNMAKLSIKGLIESALNLGRTLDSDYAPLQQFFVVMEHCLKHGLKAKKTFLGQNKSFWGPLELVEKLVPEAAEITASVKDLPGLKTPVGRGRAWLRLALMQKKLSEYMKALINKKELLSEFYEPNALMMEEEGAIIAGLLVGLNVIDANFCMKGEDLDSQVGVIDFSMYLKDGNSSKGTEGDGSELPAISGPRKTMLEETGPNFECFW

SEQ ID NO: 909893 - protein, 469 aa, Homo sapiens; identical to SEQ ID NO: 909891

SEQ ID NO: 909894 - protein, 469 aa, Homo sapiens; identical to SEQ ID NO: 909891

SEQ ID NO: 909895 - protein, 469 aa, Homo sapiens; identical to SEQ ID NO: 909891

SEQ ID NO: 909896 - protein, 469 aa, Homo sapiens; identical to SEQ ID NO: 909891

SEQ ID NO: 909897 - protein, 471 aa, Homo sapiens
GGTDREGEAGPPPASPAGQSEPDSPVAAPFFLLYPGDGGAGFGVRPPPQQQRSWRTPPSPGSPLPFLLLSYPSGGGGSSGSGKHHPNYLMANERMNLMNMAKLSIKGLIESALNLGRTLDSDYAPLQQFFVVMEHCLKHGLKAKKTFLGQNKSFWGPLELVEKLVPEAAEITASVKDLPGLKTPVGRGRAWLRLALMQKKLSEYMKALINKKELLSEFYEPNALMMEEEGAIIAGLLVGLNVIDANFCMKGEDLDSQVGVIDFSMYLKDGNSSKGTEGDGQITAILDQKNYVEELNRHLNATVNNLQAKVDALEKSNTKLTEELAVANNRIITLQEEMERVKEESSYILESNRKGPKQDRTAEGQALSEARKHLKEETQLRLDVEKELEMQISMRQEMELAMKMLEKDVCEKQDALVSLRQQLDDLRALKHELAFKLQSSDLGVKQKSELNSRLEEKTNQMAATIKQLEQR

SEQ ID NO: 909898 - protein, 469 aa, Homo sapiens; identical to SEQ ID NO: 909891

SEQ ID NO: 909899 - protein, 620 aa, Homo sapiens
MSALTPPTDMPTPTTDKITQAAMETIYLCKFRVSMDGEWLCLRELDDISLTPDPEPTHEDPNYLMANERMNLMNMAKLSIKGLIESALNLGRTLDSDYAPLQQFFVVMEHCLKHGLKAKKTFLGQNKSFWGPLELVEKLVPEAAEITASVKDLPGLKTPVGRGRAWLRLALMQKKLSEYMKALINKKELLSEFYEPNALMMEEEGAIIAGLLVGLNVIDANFCMKGEDLDSQVGVIDFSMYLKDGNSSKGTEGDGQITAILDQKNYVEELNRHLNATVNNLQAKVDALEKSNTKLTEELAVANNRIITLQEEMERVKEESSYILESNRKGPKQDRTAEGQALSEARKHLKEETQLRLDVEKELEMQISMRQEMELAMKMLEKDVCEKQDALVSLRQQLDDLRALKHELAFKLQSSDLGVKQKSELNSRLEEKTNQMAATIKQLEQRLRQAERSRQSAELDNRLFKQDFGDKINSLQLEVEELTRQRNQLELELKQEKERRLQNDRSIPGRGSQKSESKMDGKHKMQEENVKLKKPLEESHRLQPHPMDEQDQLLLSEKPQLCQLCQEDGSLTKNVCKNCSGTFCDACSTNELPLPSSIKLERVCNPCHKHLMKQYSTSPS

SEQ ID NO: 909900 - protein, 469 aa, Homo sapiens; identical to SEQ ID NO: 909891

SEQ ID NO: 909901 - protein, 182 aa, Homo sapiens
MAEGEDVGWWRSWLQQSYQAVKEKSSEALEFMKRDLTEFTQVVQHDTACTIAATASVVKEKLATEGSSGATEKMKKGLSDFLGVISDTFAPSPDKTIDCDVITLMGTPSGTAEPYDGTKARLYSLQSDPATYCNEPDGPPELFDASPLPTRALGTDSGGSLLALLGLCSHLGRGSLNPGQKL

SEQ ID NO: 909902 - protein, 103 aa, Homo sapiens
GQSGTGGVQRKKESLDICGASLRRQASYRRVGSSTDISEDWEKDFDLDMTEEEVQMALSKVDASGEVSGPGGSEGSEPNGPGCESSPQPAQLSPQEGPCSCLR

SEQ ID NO: 909903 - protein, 433 aa, Homo sapiens
DVSVFHREDVGWWRSWLQQSYQAVKEKSSEALEFMKRDLTEFTQVVQHDTACTIAATASVVKEKLATEGSSGATEKMKKGLSDFLGVISDTFAPSPDKTIDCDVITLMGTPSGTAEPYDGTKARLYSLQSDPATYCNEPDGPPELFDAWLSQFCLEEKKGEISELLVGSPSIRALYTKMVPAAVSHSEFWHRYFYKVHQLEQEQARRDALKQRAEQSISEEPGWEEEEEELMGISPISPKEAKVPVAKISTFPEGEPGPQSPCEENLVTSVEPPAEVTPSESSESISLVTQIANPATAPEARVLPKDLSQKLLEASLEEQGLAVDVGETGPSPPIHSKPLTPAGHTGGPEPRPPARVETLREEAPTDLRVFELNSDSGKSTPSNNGKKGSSTDISEDWEKDFDLDMTEEEVQMALSKVDASGELEDVEWEDWE

SEQ ID NO: 909904 - protein, 447 aa, Homo sapiens
MAEGEDVGWWRSWLQQSYQAVKEKSSEALEFMKRDLTEFTQVVQHDTACTIAATASVVKEKLAIAACSRGACFLCPFSIQTEGSSGATEKMKKGLSDFLGVISDTFAPSPDKTIDCDVITLMGTPSGTAEPYDGTKARLYSLQSDPATYCNEPDGPPELFDAWLSQFCLEEKKGEISELLVGSPSIRALYTKMVPAAVSHSEFWHRYFYKVHQLEQEQARRDALKQRAEQSISEEPGWEEEEEELMGISPISPKEAKVPVAKISTFPEGEPGPQSPCEENLVTSVEPPAEVTPSESSESISLVTQIANPATAPEARVLPKDLSQKLLEASLEEQGLAVDVGETGPSPPIHSKPLTPAGHTGGPEPRPPARVETLREEAPTDLRVFELNSDSGKSTPSNNGKKGSSTDISEDWEKDFDLDMTEEEVQMALSKVDASGELEDVEWEDWE

SEQ ID NO: 909905 - protein, 430 aa, Homo sapiens
MAEGEDVGWWRSWLQQSYQAVKEKSSEALEFMKRDLTEFTQVVQHDTACTIAATASVVKEKLATEGSSGATEKMKKGLSDFLGVISDTFAPSPDKTIDCDVITLMGTPSGTAEPYDGTKARLYSLQSDPATYCNEPDGPPELFDAWLSQFCLEEKKGEISELLVGSPSIRALYTKMVPAAVSHSEFWHRYFYKVHQLEQEQARRDALKQRAEQSISEEPGWEEEEEELMGISPISPKEAKVPVAKISTFPEGEPGPQSPCEENLVTSVEPPAEVTPSESSESISLVTQIANPATAPEARVLPKDLSQKLLEASLEEQGLAVDVGETGPSPPIHSKPLTPAGHTGGPEPRPPARVETLREEAPTDLRVFELNSDSGKSTPSNNGKKGSSTDISEDWEKDFDLDMTEEEVQMALSKVDASGELEDVEWEDWE

SEQ ID NO: 909906 - protein, 409 aa, Homo sapiens
DFDLDMTEEEMQDKMAEGEDVGWWRSWLQQSYQAVKEKSSEALEFMKRDLTEFTQVVQHDTACTIAATASVVKEKLACDVITLMGTPSGTAEPYDGTKARLYSLQSDPATYCNEPDGPPELFDAWLSQFCLEEKKGEISELLVGSPSIRALYTKMVPAAVSHSEFWHRYFYKVHQLEQEQARRDALKQRAEQSISEEPGWEEEEEELMGISPISPKEAKVPVAKISTFPEGEPGPQSPCEENLVTSVEPPAEVTPSESSESISLVTQIANPATAPEARVLPKDLSQKLLEASLEEQGLAVDVGETGPSPPIHSKPLTPAGHTGGPEPRPPARVETLREEAPTDLRVFELNSDSGKSTPSNNGKKGSSTDISEDWEKDFDLDMTEEEVQMALSKVDASGELEDVEWEDWE

SEQ ID NO: 909907 - protein, 182 aa, Homo sapiens; identical to SEQ ID NO: 909901

SEQ ID NO: 909908 - protein, 430 aa, Homo sapiens; identical to SEQ ID NO: 909905

SEQ ID NO: 909909 - protein, 430 aa, Homo sapiens; identical to SEQ ID NO: 909905

SEQ ID NO: 909910 - protein, 457 aa, Homo sapiens
MAEGEDVGWWRSWLQQSYQAVKEKSSEALEFMKRDLTEFTQVVQHDTACTIAATASVVKEKLATEGSSGATEKMKKGLSDFLGVISDTFAPSPDKTIDCDVITLMGTPSGTAEPYDGTKARLYSLQSDPATYCNEPDGPPELFDAWLSQFCLEEKKGEISELLVGSPSIRALYTKMVPAAVSHSEFWHRYFYKVHQLEQEQARRDALKQRAEQSISEEPGWEEEEEELMGISPISPKEAKVPVAKISTFPEGEPGPQSPCEENLVTSVEPPAEVTPSESSESISLVTQIANPATAPEARVLPKDLSQKLLEASLEEQGLAVDVGETGPSPPIHSKPLTPAGHTGGPEPRPPARVETLREEAPTDLRVFELNSDSGKSTPSNNGKKGSSTDISEDWEKDFDLDMTEEEVQMALSKVDASGEVSGPGGSEGSEPNGPGCESSPQPAQLSPQEGPCSCLR

SEQ ID NO: 909911 - protein, 286 aa, Homo sapiens
MAEGEDVGWWRSWLQQSYQAVKEKSSEALEFMKRDLTEFTQVVQHDTACTIAATASVVKEKLATEGSSGATEKMKKGLSDFLGVISDTFAPSPDKTIDCDVITLMGTPSGTAEPYDGTKARLYSLQSDPATYCNEPDGPPELFDAWLSQFCLEEKKGEISELLVGSPSIRALYTKMVPAAVSHSEFWHRYFYKVHQLEQEQARRDALKQRAEQSISEEPGWEEEEEELMGISPISPKEAKVPVAKISTFPEGEPGPQSPCEENLVTSVEPPEHLPRDTDRQPGHCT

SEQ ID NO: 909912 - protein, 207 aa, Homo sapiens
MAEGEDVGWWRSWLQQSYQAVKEKSSEALEFMKRDLTEFTQVVQHDTACTIAATASVVKEKLATEGSSGATEKMKKGLSDFLGVISDTFAPSPDKTIDCDVITLMGTPSGTAEPYDGTKARLYSLQSDPATYCNEPDGPPELFDAWLSQFCLEEKKGEISELLVGSPSIRALYTKMVPAAVSHSEFWHRYFYKVHQLEPSTTRWFQQ

SEQ ID NO: 909913 - protein, 430 aa, Homo sapiens; identical to SEQ ID NO: 909905

SEQ ID NO: 909914 - protein, 430 aa, Homo sapiens; identical to SEQ ID NO: 909905

SEQ ID NO: 909915 - protein, 444 aa, Homo sapiens
DFDLDMTEEEMQDKMAEGEDVGWWRSWLQQSYQAVKEKSSEALEFMKRDLTEFTQVVQHDTACTIAATASVVKEKLATEGSSGATEKMKKGLSDFLGVISDTFAPSPDKTIDCDVITLMGTPSGTAEPYDGTKARLYSLQSDPATYCNEPDGPPELFDAWLSQFCLEEKKGEISELLVGSPSIRALYTKMVPAAVSHSEFWHRYFYKVHQLEQEQARRDALKQRAEQSISEEPGWEEEEEELMGISPISPKEAKVPVAKISTFPEGEPGPQSPCEENLVTSVEPPAEVTPSESSESISLVTQIANPATAPEARVLPKDLSQKLLEASLEEQGLAVDVGETGPSPPIHSKPLTPAGHTGGPEPRPPARVETLREEAPTDLRVFELNSDSGKSTPSNNGKKGSSTDISEDWEKDFDLDMTEEEVQMALSKVDASGELEDVEWEDWE

SEQ ID NO: 909916 - protein, 433 aa, Homo sapiens
RIGRLGREDVGWWRSWLQQSYQAVKEKSSEALEFMKRDLTEFTQVVQHDTACTIAATASVVKEKLATEGSSGATEKMKKGLSDFLGVISDTFAPSPDKTIDCDVITLMGTPSGTAEPYDGTKARLYSLQSDPATYCNEPDGPPELFDAWLSQFCLEEKKGEISELLVGSPSIRALYTKMVPAAVSHSEFWHRYFYKVHQLEQEQARRDALKQRAEQSISEEPGWEEEEEELMGISPISPKEAKVPVAKISTFPEGEPGPQSPCEENLVTSVEPPAEVTPSESSESISLVTQIANPATAPEARVLPKDLSQKLLEASLEEQGLAVDVGETGPSPPIHSKPLTPAGHTGGPEPRPPARVETLREEAPTDLRVFELNSDSGKSTPSNNGKKGSSTDISEDWEKDFDLDMTEEEVQMALSKVDASGELEDVEWEDWE

SEQ ID NO: 909917 - protein, 322 aa, Homo sapiens
MHEEMGSWRYGMQQSYQAVKEKSYCNEPDGPPELFDAWLSQFCLEEKKGEISELLVGSPSIRALYTKMVPAAVSHSEFWHRYFYKVHQLEQEQARRDALKQRAEQSISEEPGWEEEEEELMGISPISPKEAKVPVAKISTFPEGEPGPQSPCEENLVTSVEPPAEVTPSESSESISLVTQIANPATAPEARVLPKDLSQKLLEASLEEQGLAVDVGETGPSPPIHSKPLTPAGHTGGPEPRPPARVETLREEAPTDLRVFELNSDSGKSTPSNNGKKGSSTDISEDWEKDFDLDMTEEEVQMALSKVDASGELEDVEWEDWE

SEQ ID NO: 909918 - protein, 145 aa, Homo sapiens
PATAPEARVLPKDLSQKLLEASLEEQGLAVDVGETGPSPPIHSKPLTPAGHTGVFELEEEELMGISPISPKEAKVPVAKISTFPEGEPGPQSPCEENLVTSVEPPAEVTPSESSDLLCQPELWAQILVAPCWPSWASAHTWEGAL

SEQ ID NO: 909919 - protein, 430 aa, Homo sapiens; identical to SEQ ID NO: 909905

SEQ ID NO: 909920 - protein, 423 aa, Homo sapiens
MAEGEDVGWWRSWLQQSYQAVKEKSSEALEFMKRDLTEFTQVVQHDTACTIAATASVVKEKLATEGSSGATEKMKKGLSDFLGVISDTFAPSPDKTIDCDVITLMGTPSGTAEPYDGTKARLYSLQSDPATYCNEPDGPPELFDAWLSQFCLEEKKGEISELLVGSPSIRALYTKMVPAAVSHSEFWHRYFYKVHQLEQEQARRDALKQRAEQSISEEPGWEEEEEELMGISPISPKEAKVPVAKISTFPEGEPGPQSPCEENLVTSVEPPAEVTPSESSESISLVTQIANPATAPEARVLPKDLSQKLLEASLEEQGLAVDVGETGPSPPIHSKPLTPAGHTGGPEPRPPARVETLREEAPTDLRVFELNSDSGKSTPSNNGKKGRSGGPSPEGCVRSGPPPEADLSPCPLLGYYEQIFFRF

SEQ ID NO: 909921 - protein, 102 aa, Homo sapiens
DVSVFHREDVGWWRSWLQQSYQAVKEKSSEALEFMKRDLTEFTQVVQHDTACTIAATASVVKEKLATEGSSGATEKMKKGLSDFLGVISDTFAPSPDKTIDQ

SEQ ID NO: 909922 - protein, 103 aa, Homo sapiens
DVSVFHREDVGWWRSWLQQSYQAVKEKSSEALEFMKRDLTEFTQVVQHDTACTIAATASVVKEKLATEGSSGATEKMKKGLSDFLGVISDTFAPSPDKTIDRE

SEQ ID NO: 909923 - protein, 790 aa, Homo sapiens
MKAFGPPHEGPLQGLVASRIETYGGRHRASAQSTAGRLYPRGYPVLDPSRRRLQQYVPFARGSGQARGLSPMRLRDPEPEKRHGGHVGAGLLHSPKLKELTKAHELEVRLHTFSMFGMPRLPPEDRRHWEIGEGGDSGLTIEKSWRELVPGHKEMSQELCHQQEALWELLTTELIYVRKLKIMTDLLAAGLLNLQRVGLLMEVSAETLFGNVPSLIRTHRSFWDEVLGPTLEETRASGQPLDPIGLQSGFLTFGQRFHPYVQYCLRVKQTMAYAREQQETNPLFHAFVQWCEKHKRSGRQMLCDLLIKPHQRITKYPLLLHAVLKRSPEARAQEALNAMIEAVESFLRHINGQVRQGEEQESLAAAAQRIGPYEVLEPPSDEVEKNLRPFSTLDLTSPMLGVASEHTRQLLLEGPVRVKEGREGKLDVYLFLFSDVLLVTKPQRKADKAKVIRPPLMLEKLVCQPLRDPNSFLLIHLTEFQCVSSALLVHCPSPTDRAQWLEKTQQAQAALQKLKAEEYVQQKRELLTLYRDQDRESPSTRPSTPSLEGSQSSAEGRTPEFSTIIPHLVVTEDTDEDAPLVPDDTSDSGYGTLIPGTPTGSRSPLSRLRQRALRRDPRLTFSTLELRDIPLRPHPPDPQAPQRRSAPELPEGILKGGSLPQEDPPTWSEEEDGASERGNVVVETLHRARLRGQLPSSPTHADSAGESPWESSGEEEEEGPLFLKAGHTSLRPMRAEDMLREIREELASQRIEGAEEPRDSRPRKLTRAQLQRMRGPHIIQLDTPLSASEV

SEQ ID NO: 909924 - protein, 790 aa, Homo sapiens; identical to SEQ ID NO: 909923

SEQ ID NO: 909925 - protein, 790 aa, Homo sapiens; identical to SEQ ID NO: 909923

SEQ ID NO: 909926 - protein, 69 aa, Homo sapiens
PIPSGTSTTVPGVGVLRATRDGLPLADSSLFVCKPRRVSWSALLLKDHISQRKPGPGTLPPALFGDQEL

SEQ ID NO: 909927 - protein, 540 aa, Homo sapiens
MKAFGPPHEGPLQGLVASRIETYGGRHRASAQSTAGRLYPRGYPVLDPSRRRLQQYVPFARGSGQARGLSPMRLRDPEPEKRHGGHVGAGLLHSPKLKELTKAHELEVRLHTFSMFGMPRLPPEDRRHWEIGEGGDSGLTIEKSWRELVPGHKEMSQELCHQQEALWELLTTELIYVRKLKIMTDLLAAGLLNLQRVGLLMEVSAETLFGNVPSLIRTHRSFWDEVLGPTLEETRASGQPLDPIGLQSGFLTFGQRFHPYVQYCLRVKQTMAYAREQQETNPLFHAFVQWCEKHKRSGRQMLCDLLIKPHQRITKYPLLLHAVLKRSPEARAQEALNAMIEAVESFLRHINGQVRQGEEQESLAAAAQRIGPYEVLEPPSDEVEKNLRPFSTLDLTSPMLGVASEHTRQLLLEGPVRVKEGREGKLDVYLFLFSDVLLVTKPQRKADKAKVIRPPLMLEKLVCQPLRDPNSFLLIHLTEFQCVSSALLVHCPSPTDRAQWLEKTQQAQVWESQQRGGMGRGPRSSEMGAQWWITPVISAL

SEQ ID NO: 909928 - protein, 236 aa, Homo sapiens
PKSLSCAEPRLRFPGQARHVWPAARMQAPHKEHLYKLLVIGDLGVGKTSIIKRYVHQNFSSHYRATIGVDFALKVLHWDPETVVRLQLWDIAGQERFGNMTRVYYREAMGAFIVFDVTRPATFEAVAKWKNDLDSKLSLPNGKPVSVVLLANKCDQGKDVLMNNGLKMDQFCKEHGFVGWFETSAKENINIDEASRCLVKHILANECDLMESIEPDVVKPHLTSTKVASCSGCAKS

SEQ ID NO: 909929 - protein, 97 aa, Homo sapiens
PKSLSCAEPRLRFPGQARHVWPAARMQAPHKEHLYKLLVIGDLGVGKTSIIKRYVHQNFSSHYRATIGVDFALKVLHWDPETVVRLQLWDIAGKYKH

SEQ ID NO: 909930 - protein, 236 aa, Homo sapiens; identical to SEQ ID NO: 909928

SEQ ID NO: 909931 - protein, 137 aa, Homo sapiens
MTRVYYREAMGAFIVFDVTRPATFEAVAKWKNDLDSKLSLPNGKPVSVVLLANKCDQGKDVLMNNGLKMDQFCKEHGFVGWFETSAKENINIDEASRCLVKHILANECDLMESIEPDVVKPHLTSTKVASCSGCAKS

SEQ ID NO: 909932 - protein, 133 aa, Homo sapiens
GVLKIRDGSKEPRSRWDIVRLIPPQTYLQAEGEDGQNLEKRRNLLNCLIVRILKAHGDEGLHIDQLVCLVLEAWQKGPCPPRGLVSSLGKGSACSSTDVLSCIPPLTFHTLQIRSRGVPYASCTATQSFSTFR

SEQ ID NO: 909933 - protein, 1798 aa, Homo sapiens
MVGELRYREFRVPLGPGLHAYPDELIRQRVGHDGHPEYQIRWLILRRGDEGDGGSGQVDCKAEHILLWMSKDEIYANCHKMLGEDGQVIGPSQESAGEVGALDKSVLEEMETDVKSLIQRALRQLEECVGTIPPAPLLHTVHVLSAYASIEPLTGVFKDPRVLDLLMHMLSSPDYQIRWSAGRMIQALSSHDAGTRTQILLSLSQQEAIEKHLDFDSRCALLALFAQATLSEHPMSFEGIQLPQVPGRVLFSLVKRYLHVTSLLDQLNDSAAEPGAQNTSAPEELSGERGQLELEFSMAMGTLISELVQAMRWDQASDRPRSSARSPGSIFQPQLADVSPGLPAAQAQPSFRRSRRFRPRSEFASGNTYALYVRDTLQPGMRVRMLDDYEEISAGDEGEFRQSNNGVPPVQVFWESTGRTYWVHWHMLEILGFEEDIEDMVEADEYQGAVASRVLGRALPAWRWRPMTELYAVPYVLPEDEDTEECEHLTLAEWWELLFFIKKLDGPDHQEVLQILQENLDGEVEPAWRHSEVGGLYCKGWTVQSIWKAQDEKWRSESGRGCRGGVWNFQRWEGELFGRSQLPAVRGSGWRVCVQRDPHPYQVLPGASGSAGLSAVRASPGWQILDDEILAELAVPIELAQDLLLTLPQRLNDSALRDLINCHVYKKYGPEALAGNQAYPSLLEAQEDVLLLDAQAQAKDSEDAAKVEAKEPPSQSPNTPLQRLVEGYGPAGKILLDLEQALSSEGTQENKVKPLLLQLQRQPQPFLALMQSLDTPETNRTLHLTVLRILKQLVDFPEALLLPWHEAVDACMACLRSPNTDREVLQELIFFLHRLTSVSRDYAVVLNQLGARDAISKALEKHLGKLELAQELRDMVFKCEKHAHLYRKLITNILGGCIQMVLGQIEDHRRTHRPINIPFFDVFLRYLCQGSSVEVKEDKCWEKVEVSSNPHRASKLTDHNPKTYWESNGSAGSHYITLHMRRGILIRQLTLLVASEDSSYMPARVVVCGGDSTSSLHTELNSVNVMPSASRVILLENLTRFWPIIQIRIKRCQQGGIDTRIRGLEILGPKPTFWPVFREQLCRHTRLFYMVRAQAWSQDMAEDRRSLLHLSSRLNGALRQEQNFADRFLPDDEAAQALGKTCWEALVSPVVQNITSPDEDGISPLGWLLDQYLECQEAVFNPQSRGPAFFSRVRRLTHLLVHVEPCEAPPPVVATPRPKGRNRSHDWSSLATRGLPSSIMRNLTRCWRAVVEKQVNNFLTSSWRDDDFVPRYCEHFNILQNSSSELFGPRAAFLLALQNGCAGALLKLPFLKAAHVSEQFARHIDQQIQGSRIGGAQEMERLAQLQQCLQAVLIFSGLEIATTFEHYYQHYMADRLLGVVSSWLEGAVLEQIGPCFPNRLPQQMLQSLSTSKELQRQFHVYQLQQLDQELLKLEDTEKKIQVGLGASGKEHKSEKEEEAGAAAVVDVAEGEEEEEENEDLYYEGAMPEVSVLVLSRHSWPVASICHTLNPRTCLPSYLRGTLNRYSNFYNKSQSHPALERGSQRRLQWTWLGWAELQFGNQTLHVSTVQMWLLLYLNDLKAVSVESLLAFSGLSADMLNQAIGPLTSSRGPLDLHEQKDIPGGVLKIRDGSKEPRSRWDIVRLIPPQTYLQAEGEDGQNLEKRRNLLNCLIVRILKAHGDEGLHIDQLVCLVLEAWQKGPCPPRGLVSSLGKGSACSSTDVLSCILHLLGKGTLRRHDDRPQVLSYAVPVTVMEPHTESLNPGSSGPNPPLTFHTLQIRSRGVPYASCTATQSFSTFR

SEQ ID NO: 909934 - protein, 1791 aa, Homo sapiens
MVGELRYREFRVPLGPGLHAYPDELIRQRVGHDGHPEYQIRWLILRRGDEGDGGSGQVDCKAEHILLWMSKDEIYANCHKMLGEDGQVIGPSQESAGEVGALDKSVLEEMETDVKSLIQRALRQLEECVGTIPPAPLLHTVHVLSAYASIEPLTGVFKDPRVLDLLMHMLSSPDYQIRWSAGRMIQALSSHDAGTRTQILLSLSQQEAIEKHLDFDSRCALLALFAQATLSEHPMSFEGIQLPQVPGRVLFSLVKRYLHVTSLLDQLNDSAAEPGAQNTSAPEELSGERGQLELEFSMAMGTLISELVQAMRWDQASDRPRSSARSPGSIFQPQLADVSPGLPAAQAQPSFRRSRRFRPRSEFASGNTYALYVRDTLQPGMRVRMLDDYEEISAGDEGEFRQSNNGVPPVQVFWESTGRTYWVHWHMLEILGFEEDIEDMVEADEYQGAVASRVLGRALPAWRWRPMTELYAVPYVLPEDEDTEECEHLTLAEWWELLFFIKKLDGPDHQEVLQILQENLDGEILDDEILAELAVPIELAQDLLLTLPQRLNDSALRDLINCHVYKKYGPEALAGNQAYPSLLEAQEDVLLLDAQAQAKDSEDAAKVEAKEPPSQSPNTPLQRLVEGYGPAGKILLDLEQALSSEGTQENKVKPLLLQLQRQPQPFLALMQSLDTPETNRTLHLTVLRILKQLVDFPEALLLPWHEAVDACMACLRSPNTDREVLQELIFFLHRLTSVSRDYAVVLNQLGARDAISKALEKHLGKLELAQELRDMVFKCEKHAHLYRKLITNILGGCIQVQEEGELVGLEWHQNMKPKQWRVRAVFPWLGTAGDSSEPGAFVPLPLCPIWACSAGAVEEVPLLHGLSFIRVSVCVSVFLLPLCPFSLMFWLQMVLGQIEDHRRTHRPINIPFFDVFLRYLCQGSSVEVKEDKCWEKVEVSSNPHRASKLTDHNPKTYWESNGSAGSHYITLHMRRGILIRQLTLLVASEDSSYMPARVVVCGGDSTSSLHTELNSVNVMPSASRVILLENLTRFWPIIQIRIKRCQQGGIDTRIRGLEILGPKPTFWPVFREQLCRHTRLFYMVRAQAWSQDMAEDRRSLLHLSSRLNGALRQEQNFADRFLPDDEAAQALGKTCWEALVSPVVQNITSPDEDGISPLGWLLDQYLECQEAVFNPQSRGPAFFSRVRRLTHLLVHVEPCEAPPPVVATPRPKGRNRSHDWSSLATRGLPSSIMRNLTRCWRAVVEKQVNNFLTSSWRDDDFVPRYCEHFNILQNSSSELFGPRAAFLLALQNGCAGALLKLPFLKAAHVSEQFARHIDQQIQGSRIGGAQEMERLAQLQQCLQAVLIFSGLEIATTFEHYYQHYMADRLLGVVSSWLEGAVLEQIGPCFPNRLPQQMLQSLSTSKELQRQFHVYQLQQLDQELLKLEDTEKKIQVGLGASGKEHKSEKEEEAGAAAVVDVAEGEEEEEENEDLYYEGAMPEVSVLVLSRHSWPVASICHTLNPRTCLPSYLRGTLNRYSNFYNKSQSHPALERGSQRRLQWTWLGWAELQFGNQTLHVSTVQMWLLLYLNDLKAVSVESLLAFSGLSADMLNQAIGPLTSSRGPLDLHEQKDIPGGVLKIRDGSKEPRSRWDIVRLIPPQTYLQAEGEDGQNLEKRRNLLNCLIVRILKAHGDEGLHIDQLVCLVLEAWQKGPCPPRGLVSSLGKGSACSSTDVLSCILHLLGKGTLRRHDDRPQVLSYAVPVTVMEPHTESLNPGSSGPNPPLTFHTLQIRSRGVPYASCTATQSFSTFR

SEQ ID NO: 909935 - protein, 985 aa, Homo sapiens
MVHKSKRSNKVLQELIFFLHRLTSVSRDYAVVLNQLGARDAISKALEKHLGKLELAQELRDMVFKCEKHAHLYRKLITNILGGCIQMVLGQIEDHRRTHRPINIPFFDVFLRYLCQGSSVEVKEDKCWEKVEVSSNPHRASKLTDHNPKTYWESNGSAGSHYITLHMRRGILIRQLTLLVASEDSSYMPARVVVCGGDSTSSLHTELNSVNVMPSASRVILLENLTRFWPIIQIRIKRCQQGGIDTRIRGLEILGPKPTFWPVFREQLCRHTRLFYMVRAQAWSQDMAEDRRSLLHLSSRLNGALRQEQNFADRFLPDDEAAQALGKTCWEALVSPVVQNITSPDEDGISPLGWLLDQYLECQEAVFNPQSRGPAFFSRVRRLTHLLVHVEPCEAPPPVVATPRPKGRNRSHDWSSLATRGLPSSIMRNLTRCWRAVVEKQVNNFLTSSWRDDDFVPRYCEHFNILQNSSSELFGPRAAFLLALQNGCAGALLKLPFLKAAHVSEQFARHIDQQIQGSRIGGAQEMERLAQLQQCLQAVLIFSGLEIATTFEHYYQHYMADRLLGVVSSWLEGAVLEQIGPCFPNRLPQQMLQSLSTSKELQRQFHVYQLQQLDQELLKLEDTEKKIQVGLGASGKEHKSEKEEEAGAAAVVDVAEGEEEEEENEDLYYEGAMPEVSVLVLSRHSWPVASICHTLNPRTCLPSYLRGTLNRYSNFYNKSQSHPALERGSQRRLQWTWLGWAELQFGNQTLHVSTVQMWLLLYLNDLKAVSVESLLAFSGLSADMLNQAIGPLTSSRGPLDLHEQKDIPGGVLKIRDGSKEPRSRWDIVRLIPPQTYLQAEGEDGQNLEKRRNLLNCLIVRILKAHGDEGLHIDQLVCLVLEAWQKGPCPPRGLVSSLGKGSACSSTDVLSCILHLLGKGTLRRHDDRPQVLSYAVPVTVMEPHTESLNPGSSGPNPPLTFHTLQIRSRGVPYASCTATQSFSTFR

SEQ ID NO: 909936 - protein, 1232 aa, Homo sapiens
MVGELRYREFRVPLGPGLHAYPDELIRQRVGHDGHPEYQIRWLILRRGDEGDGGSGQVDCKAEHILLWMSKDEIYANCHKMLGEDGQVIGPSQESAGEVGALDKSVLEEMETDVKSLIQRALRQLEECVGTIPPAPLLHTVHVLSAYASIEPLTGVFKDPRVLDLLMHMLSSPDYQIRWSAGRMIQALSSHDAGTRTQILLSLSQQEAIEKHLDFDSRCALLALFAQATLSEHPMSFEGIQLPQVPGRVLFSLVKRYLHVTSLLDQLNDSAAEPGAQNTSAPEELSGERGQLELEFSMAMGTLISELVQAMRWDQASDRPRSSARSPGSIFQPQLADVSPGLPAAQAQPSFRRSRRFRPRSEFASGNTYALYVRDTLQPGMRVRMLDDYEEISAGDEGEFRQSNNGVPPVQVFWESTGRTYWVHWHMLEILGFEEDIEDMVEADEYQGAVASRVLGRALPAWRWRPMTELYAVPYVLPEDEDTEECEHLTLAEWWELLFFIKKLDGPDHQEVLQILQENLDGEILDDEILAELAVPIELAQDLLLTLLNGALRQEQNFADRFLPDDEAAQALGKTCWEALVSPVVQNITSPDEDGISPLGWLLDQYLECQEAVFNPQSRGPAFFSRVRRLTHLLVHVEPCEAPPPVVATPRPKGRNRSHDWSSLATRGLPSSIMRNLTRCWRAVVEKQVNNFLTSSWRDDDFVPRYCEHFNILQNSSSELFGPRAAFLLALQNGCAGALLKLPFLKAAHVSEQFARHIDQQIQGSRIGGAQEMERLAQLQQCLQAVLIFSGLEIATTFEHYYQHYMADRLLGVVSSWLEGAVLEQIGPCFPNRLPQQMLQSLSTSKELQRQFHVYQLQQLDQELLKLEDTEKKIQVGLGASGKEHKSEKEEEAGAAAVVDVAEGEEEEEENEDLYYEGAMPEVSVLVLSRHSWPVASICHTLNPRTCLPSYLRGTLNRYSNFYNKSQSHPALERGSQRRLQWTWLGWAELQFGNQTLHVSTVQMWLLLYLNDLKAVSVESLLAFSGLSADMLNQAIGPLTSSRGPLDLHEQKDIPGGVLKIRDGSKEPRSRWDIVRLIPPQTYLQAEGEDGQNLEKRRNLLNCLIVRILKAHGDEGLHIDQLVCLVLEAWQKGPCPPRGLVSSLGKGSACSSTDVLSCILHLLGKGTLRRHDDRPQVLSYAVPVTVMEPHTESLNPGSSGPNPPLTFHTLQIRSRGVPYASCTATQSFSTFR

SEQ ID NO: 909937 - protein, 828 aa, Homo sapiens
MVGELRYREFRVPLGPGLHAYPDELIRQRVGHDGHPEYQIRWLILRRGDEGDGGSGQVDCKAEHILLWMSKDEIYANCHKMLGEDGQVIGPSQESAGEVGALDKSVLEEMETDVKSLIQRALRQLEECVGTIPPAPLLHTVHVLSAYASIEPLTGVFKDPRVLDLLMHMLSSPDYQIRWSAGRMIQALSSHDAGTRTQILLSLSQQEAIEKHLDFDSRCALLALFAQATLSEHPMSFEGIQLPQVPGRVLFSLVKRYLHVTSLLDQLNDSAAEPGAQNTSAPEELSGERGQLELEFSMAMGTLISELVQAMRWDQASDRPRSSARSPGSIFQPQLADVSPGLPAAQAQPSFRRSRRFRPRSEFASGNTYALYVRDTLQPGMRVRMLDDYEEISAGDEGEFRQSNNGVPPVQVFWESTGRTYWVHWHMLEILGFEEDIEDMVEADEYQGAVASRVLGRALPAWRWRPMTELYAVPYVLPEDEDTEECEHLTLAEWWELLFFIKKLDGPDHQEVLQILQENLDGEILDDEILAELAVPIELAQDLLLTLPQRLNDSALRDLINCHVYKKYGPEALAGNQAYPSLLEAQEDVLLLDAQAQAKDSEDAAKVEAKEPPSQSPNTPLQRLVEGYGPAGKILLDLEQALSSEGTQENKVKPLLLQLQRQPQPFLALMQSLDTPETNRTLHLTVLRILKQLVDFPEALLLPWHEAVDACMACLRSPNTDREVLQELIFFLHRLTSVSRDYAVVLNQLGARDAISKALEKHLGKLELAQELRDMVFKCEKHAHLYRKLITNILGGCIQMVLGQIEDHRRTHRPINIPFFDVFLTLSP

SEQ ID NO: 909938 - protein, 543 aa, Homo sapiens
MVGELRYREFRVPLGPGLHAYPDELIRQRVGHDGHPEYQIRWLILRRGDEGDGGSGQVDCKAEHILLWMSKDEIYANCHKMLGEDGQVIGPSQESAGEVGALDKSVLEEMETDVKSLIQRALRQLEECVGTIPPAPLLHTVHVLSAYASIEPLTGVFKDPRVLDLLMHMLSSPDYQIRWSAGRMIQALSSHDAGTRTQILLSLSQQEAIEKHLDFDSRCALLALFAQATLSEHPMSFEGIQLPQVPGRVLFSLVKRYLHVTSLLDQLNDSAAEPGAQNTSAPEELSGERGQLELEFSMAMGTLISELVQAMRWDQASDRPRSSARSPGSIFQPQLADVSPGLPAAQAQPSFRRSRRFRPRSEFASGNTYALYVRDTLQPGMRVRMLDDYEEISAGDEGEFRQSNNGVPPVQVFWESTGRTYWVHWHMLEILGFEEDIEDMVEADEYQGAVASRVLGRALPAWRWRPMTELYAVPYVLPEDEDTEECEHLTLAEWWELLFFIKKLDGPDHQEVLQILQENLDGEVEPAWRHSEVGGLYCKGWTV

SEQ ID NO: 909939 - protein, 543 aa, Homo sapiens; identical to SEQ ID NO: 909938

SEQ ID NO: 909940 - protein, 117 aa, Homo sapiens
LSRHSWPVASICHTLNPRTCLPSYLRGTLNRYSNFYNKSEQPGRGTGDWGEGGLLGKDLGLGADPDVGRLDVKRDSLWLGTVLTPVIPALWEAEAGRSLEVRSSRPALANMVKPRLC

SEQ ID NO: 909941 - protein, 63 aa, Homo sapiens
MAFLCSAIAQVSEQFARHIDQQIQGSRIGGAQEMERLAQLQQCLQAVLIFSGLEIATTFEHYY

SEQ ID NO: 909942 - protein, 100 aa, Homo sapiens
KIVLCVFQGGIDTRIRGLEILGPKPTFWPVFREQLCRHTRLFYMVRAQAWSQDMAEDRRSLLHLSSRCVRVCVYACVCGKGKAIANSWQAGVHRSCEMEV

SEQ ID NO: 909943 - protein, 1698 aa, Homo sapiens
MVGELRYREFRVPLGPGLHAYPDELIRQRVGHDGHPEYQIRWLILRRGDEGDGGSGQVDCKAEHILLWMSKDEIYANCHKMLGEDGQVIGPSQESAGEVGALDKSVLEEMETDVKSLIQRALRQLEECVGTIPPAPLLHTVHVLSAYASIEPLTGVFKDPRVLDLLMHMLSSPDYQIRWSAGRMIQALSSHDAGTRTQILLSLSQQEAIEKHLDFDSRCALLALFAQATLSEHPMSFEGIQLPQVPGRVLFSLVKRYLHVTSLLDQLNDSAAEPGAQNTSAPEELSGERGQLELEFSMAMGTLISELVQAMRWDQASDRPRSSARSPGSIFQPQLADVSPGLPAAQAQPSFRRSRRFRPRSEFASGNTYALYVRDTLQPGMRVRMLDDYEEISAGDEGEFRQSNNGVPPVQVFWESTGRTYWVHWHMLEILGFEEDIEDMVEADEYQGAVASRVLGRALPAWRWRPMTELYAVPYVLPEDEDTEECEHLTLAEWWELLFFIKKLDGPDHQEVLQILQENLDGEILDDEILAELAVPIELAQDLLLTLPQRLNDSALRDLINCHVYKKYGPEALAGNQAYPSLLEAQEDVLLLDAQAQAKDSEDAAKVEAKEPPSQSPNTPLQRLVEGYGPAGKILLDLEQALSSEGTQENKVKPLLLQLQRQPQPFLALMQSLDTPETNRTLHLTVLRILKQLVDFPEALLLPWHEAVDACMACLRSPNTDREVLQELIFFLHRLTSVSRDYAVVLNQLGARDAISKALEKHLGKLELAQELRDMVFKCEKHAHLYRKLITNILGGCIQMVLGQIEDHRRTHRPINIPFFDVFLRYLCQGSSVEVKEDKCWEKVEVSSNPHRASKLTDHNPKTYWESNGSAGSHYITLHMRRGILIRQLTLLVASEDSSYMPARVVVCGGDSTSSLHTELNSVNVMPSASRVILLENLTRFWPIIQIRIKRCQQGGIDTRIRGLEILGPKPTFWPVFREQLCRHTRLFYMVRAQAWSQDMAEDRRSLLHLSSRLNGALRQEQNFADRFLPDDEAAQALGKTCWEALVSPVVQNITSPDEDGISPLGWLLDQYLECQEAVFNPQSRGPAFFSRVRRLTHLLVHVEPCEAPPPVVATPRPKGRNRSHDWSSLATRGLPSSIMRNLTRCWRAVVEKQVNNFLTSSWRDDDFVPRYCEHFNILQNSSSELFGPRAAFLLALQNGCAGALLKLPFLKAAHVSEQFARHIDQQIQGSRIGGAQEMERLAQLQQCLQAVLIFSGLEIATTFEHYYQHYMADRLLGVVSSWLEGAVLEQIGPCFPNRLPQQMLQSLSTSKELQRQFHVYQLQQLDQELLKLEDTEKKIQVGLGASGKEHKSEKEEEAGAAAVVDVAEGEEEEEENEDLYYEGAMPEVSVLVLSRHSWPVASICHTLNPRTCLPSYLRGTLNRYSNFYNKSQSHPALERGSQRRLQWTWLGWAELQFGNQTLHVSTVQMWLLLYLNDLKAVSVESLLAFSGLSADMLNQAIGPLTSSRGPLDLHEQKDIPGGVLKIRDGSKEPRSRWDIVRLIPPQTYLQAEGEDGQNLEKRRNLLNCLIVRILKAHGDEGLHIDQLVCLVLEAWQKGPCPPRGLVSSLGKGSACSSTDVLSCILHLLGKGTLRRHDDRPQVLSYAVPVTVMEPHTESLNPGSSGPNPPLTFHTLQIRSRGVPYASCTATQSFSTFR

SEQ ID NO: 909944 - protein, 1730 aa, Homo sapiens [sequence omitted]

SEQ ID NO: 909945 - protein, 1716 aa, Homo sapiens
RLGDVRQSNNGVLLCRYFGSQQAAPIGCTGTCVEILGFEEDIEDMVEAEHILLWMSKDEIYANCHKMLGEDGQVIGPSQESAGEVGALDKSVLEEMETDVKSLIQRALRQLEECVGTIPPAPLLHTVHVLSAYASIEPLTGVFKDPRVLDLLMHMLSSPDYQIRWSAGRMIQALSSHDAGEGQCGEEGKAGEGLGRLRDSQDTVAGASDLIRTRTQILLSLSQQEAIEKHLDFDSRCALLALFAQATLSEHPMSFEGIQLPQVPGRVLFSLVKRYLHVTSLLDQLNDSAAEPGAQNTSAPEELSGERGQLELEFSMAMGTLISELVQAMRWDQASDRPRSSARSPGSIFQPQLADVSPGLPAAQAQPSFRRSRRFRPRSEFASGNTYALYVRDTLQPGMRVRMLDDYEEISAGDEGEFRQSNNGVPPVQVFWESTGRTYWVHWHMLEILGFEEDIEDMVEADEYQGAVASRVLGRALPAWRWRPMTELYAVPYVLPEDEDTEECEHLTLAEWWELLFFIKKLDGPDHQEVLQILQENLDGEILDDEILAELAVPIELAQDLLLTLPQRLNDSALRDLINCHVYKKYGPEALAGNQAYPSLLEAQEDVLLLDAQAQAKDSEDAAKVEAKEPPSQSPNTPLQRLVEGYGPAGKILLDLEQALSSEGTQENKVKPLLLQLQRQPQPFLALMQSLDTPETNRTLHLTVLRILKQLVDFPEALLLPWHEAVDACMACLRSPNTDREVLQELIFFLHRLTSVSRDYAVVLNQLGARDAISKALEKHLGKLELAQELRDMVFKCEKHAHLYRKLITNILGGCIQMVLGQIEDHRRTHRPINIPFFDVFLRYLCQGSSVEVKEDKCWEKVEVSSNPHRASKLTDHNPKTYWESNGSAGSHYITLHMRRGILIRQLTLLVASEDSSYMPARVVVCGGDSTSSLHTELNSVNVMPSASRVILLENLTRFWPIIQIRIKRCQQGGIDTRIRGLEILGPKPTFWPVFREQLCRHTRLFYMVRAQAWSQDMAEDRRSLLHLSSRLNGALRQEQNFADRFLPDDEAAQALGKTCWEALVSPVVQNITSPDEDGISPLGWLLDQYLECQEAVFNPQSRGPAFFSRVRRLTHLLVHVEPCEAPPPVVATPRPKGRNRSHDWSSLATRGLPSSIMRNLTRCWRAVVEKQVNNFLTSSWRDDDFVPRYCEHFNILQNSSSELFGPRAAFLLALQNGCAGALLKLPFLKAAHVSEQFARHIDQQIQGSRIGGAQEMERLAQLQQCLQAVLIFSGLEIATTFEHYYQHYMADRLLGVVSSWLEGAVLEQIGPCFPNRLPQQMLQSLSTSKELQRQFHVYQLQQLDQELLKLEDTEKKIQVGLGASGKEHKSEKEEEAGAAAVVDVAEGEEEEEENEDLYYEGAMPEVSVLVLSRHSWPVASICHTLNPRTCLPSYLRGTLNRYSNFYNKSQSHPALERGSQRRLQWTWLGWAELQFGNQTLHVSTVQMWLLLYLNDLKAVSVESLLAFSGLSADMLNQAIGPLTSSRGPLDLHEQKDIPGGVLKIRDGSKEPRSRWDIVRLIPPQTYLQAEGEDGQNLEKRRNLLNCLIVRILKAHGDEGLHIDQLVCLVLEAWQKGPCPPRGLVSSLGKGSACSSTDVLSCILHLLGKGTLRRHDDRPQVLSYAVPVTVMEPHTESLNPGSSGPNPPLTFHTLQIRSRGVPYASCTATQSFSTFR

SEQ ID NO: 909946 - protein, 912 aa, Homo sapiens
GNEPWLLAGGAAGRDRAPPCPSGCRLTRVQLCSAEARPPRSEFASGNTYALYVRDTLQPGMRVRMLDDYEEISAGDEGEFRQSNNGVPPVQVFWESTGRTYWVHWHMLEILGFEEDIEDMVEADEYQGAVASRVLGRALPAWRWRPMTELYAVPYVLPEDEDTEECEHLTLAEWWELLFFIKKLDGPDHQEVLQILQENLDGEILDDEILAELAVPIELAQDLLLTLLNGALRQEQNFADRFLPDDEAAQALGKTCWEALVSPVVQNITSPDEDGISPLGWLLDQYLECQEAVFNPQSRGPAFFSRVRRLTHLLVHVEPCEAPPPVVATPRPKGRNRSHDWSSLATRGLPSSIMRNLTRCWRAVVEKQVNNFLTSSWRDDDFVPRYCEHFNILQNSSSELFGPRAAFLLALQNGCAGALLKLPFLKAAHVSEQFARHIDQQIQGSRIGGAQEMERLAQLQQCLQAVLIFSGLEIATTFEHYYQHYMADRLLGVVSSWLEGAVLEQIGPCFPNRLPQQMLQSLSTSKELQRQFHVYQLQQLDQELLKLEDTEKKIQVGLGASGKEHKSEKEEEAGAAAVVDVAEGEEEEEENEDLYYEGAMPEVSVLVLSRHSWPVASICHTLNPRTCLPSYLRGTLNRYSNFYNKSQSHPALERGSQRRLQWTWLGWAELQFGNQTLHVSTVQMWLLLYLNDLKAVSVESLLAFSGLSADMLNQAIGPLTSSRGPLDLHEQKDIPGGVLKIRDGSKEPRSRWDIVRLIPPQTYLQAEGEDGQNLEKRRNLLNCLIVRILKAHGDEGLHIDQLVCLVLEAWQKGPCPPRGLVSSLGKGSACSSTDVLSCILHLLGKGTLRRHDDRPQVLSYAVPVTVMEPHTESLNPGSSGPNPPLTFHTLQIRSRGVPYASCTATQSFSTFR

SEQ ID NO: 909947 - protein, 543 aa, Homo sapiens; identical to SEQ ID NO: 909938

SEQ ID NO: 909948 - protein, 543 aa, Homo sapiens; identical to SEQ ID NO: 909938

SEQ ID NO: 909949 - protein, 45 aa, Homo sapiens
MPSASRVILLENLTRFWPIIQIRIKRCQQVGPGMWGVALGRGSEP

SEQ ID NO: 909950 - protein, 119 aa, Homo sapiens [sequence omitted]

SEQ ID NO: 909951 - protein, 126 aa, Homo sapiens
MAGRGKLIAVIGDEDTVTGFLLGGIGELNKNRHPNFLVVEKDTTINEIEDTFRSLGSLPGSVVEANPNQRDPPLWDEIDSRQFLNRDDIGIILINQYIAEMVRHALDAHQQSIPAVLGDPLQGAPI

SEQ ID NO: 909952 - protein, 119 aa, Homo sapiens [sequence omitted]

SEQ ID NO: 909953 - protein, 119 aa, Homo sapiens [sequence omitted]

SEQ ID NO: 909954 - protein, 119 aa, Homo sapiens [sequence omitted]

SEQ ID NO: 909955 - protein, 261 aa, Homo sapiens
MNPEWGQAFVHVAVAGGLCAVAVFTGIFDSVSVQVGYEHYAEAPVAGLPAFLAMPFNSLVNMAYTLLGLSWLHRGGAMGLGPRYLKDVFAAMALLYGPVQWLRLWTQWRRAAVLDQWLTLPIFAWPVAWCLYLDRGWRPWLFLSLECVSLASYGLALLHPQGFEVALGAHVVAAVGQALRTHRHYGSTTSATYLALGVLSCLGFVVLKLCDHQLARWRLFQCLTGHFWSKVCDVLQFHFAFLFLTHFNTHPRFHPSGGKTR

SEQ ID NO: 909956 - protein, 208 aa, Homo sapiens
MPFNSLVNMAYTLLGLSWLHRGGAMGLGPRYLKDVFAAMALLYGPVQWLRLWTQWRRAAVLDQWLTLPIFAWPVAWCLYLDRGWRPWLFLSLECVSLASYGLALLHPQGFEVALGAHVVAAVGQALRTHRHYGSTTSATYLALGVLSCLGFVVLKLCDHQLARWRLFQCLTGHFWSKVCDVLQFHFAFLFLTHFNTHPRFHPSGGKTR

SEQ ID NO: 909957 - protein, 261 aa, Homo sapiens; identical to SEQ ID NO: 909955

SEQ ID NO: 909958 - protein, 261 aa, Homo sapiens; identical to SEQ ID NO: 909955

SEQ ID NO: 909959 - protein, 246 aa, Homo sapiens
RTATAAAPAAGKRAFSRPAHPAAAGGGPRRAAGEPGAGRQWEATQPSAGARGWSLRPLPGSQAAGPALGRHRLRPRRSKMSRAARPRPPRARPPPLPRGPQSGRWRTSRAGDRGRRPRHLASPRPARFPGFESRPARRRTGAARILPFRRFEFPPARRVRRNTRMVIAGLFAPILKKAERSSAGASQSAGLLPSFGARSQHLPRKSRNHGASFCWLSREAQSVLQRLRIEGCSLKLPAPGHAAGSR

SEQ ID NO: 909960 - protein, 261 aa, Homo sapiens; identical to SEQ ID NO: 909955

SEQ ID NO: 909961 - protein, 379 aa, Homo sapiens
MEQLSSANTRFALDLFLALSENNPAGNIFISPFSISSAMAMVFLGTRGNTAAQLSKTFHFNTVEEVHSRFQSLNADINKRGASYILKLANRLYGEKTYNFLPEFLVSTQKTYGADLASVDFQHASEDARKTINQWVKGQTEGKIPELLASGMVDNMTKLVLVNAIYFKGNWKDKFMKEATTNAPFRLNKKDRKTVKMMYQKKKFAYGYIEDLKCRVLELPYQGEELSMVILLPDDIEDESTGLKKIEEQLTLEKLHEWTKPENLDFIEVNVSLPRFKLEESYTLNSDLARLGVQDLFNSSKADLSGMSGARDIFISKIVHKSFVEVNEEGTEAAAATAGIATFCMLMPEENFTADHPFLFFIRHNSSGSILFLGRFSSP

SEQ ID NO: 909962 - protein, 156 aa, Homo sapiens
ANSLVIEYLVLVWNKKAGRKYKIQDASGRLAEIEEASGEIVLPNLLAWAVGTMRTLFCVAVFTMEQLSSANTRFALDLFLALSENNPAGNIFISPFSISSAMAMVFLGTRGNTAAQLSKVSRNKKKGLLSSHLPTNGQSAWKGCAFELLPCVFRTV

SEQ ID NO: 909963 - protein, 167 aa, Homo sapiens
RSLLLALRRPRELGLLRSHREGPPPRPRLLARVTLPPAIRAAALGASFLTSHPARSPERASAACRVRPGLGAVARGRARGEARLPRSASSPAPPTPQAQAPQTRSSLRSPSPPASRPHPFRAPRRRQTTSDPPPPPGYRPGQPAREGGREDDRCRRKARLKPEIRML

SEQ ID NO: 909964 - protein, 379 aa, Homo sapiens; identical to SEQ ID NO: 909961

SEQ ID NO: 909965 - protein, 379 aa, Homo sapiens; identical to SEQ ID NO: 909961

SEQ ID NO: 909966 - protein, 390 aa, Homo sapiens [sequence omitted]

SEQ ID NO: 909967 - protein, 390 aa, Homo sapiens [sequence omitted]

SEQ ID NO: 909968 - protein, 339 aa, Homo sapiens
MVFLGTRGNTAAQLSKTFHFNTVEEVHSRFQSLNADINKRGASYILKLANRLYGEKTYNFLPEFLVSTQKTYGADLASVDFQHASEDARKTINQWVKGQTEGKIPELLASGMVDNMTKLVLVNAIYFKGNWKDKFMKEATTNAPFRLNKKDRKTVKMMYQKKKFAYGYIEDLKCRVLELPYQGEELSMVILLPDDIEDESTGLKKIEEQLTLEKLHEWTKPENLDFIEVNVSLPRFKLEESYTLNSDLARLGVQDLFNSSKADLSGMSGARDIFISKIVHKSFVEVNEEGTEAAAATAGIATFCMLMPEENFTADHPFLFFIRHNSSGSILFLGRFSSP

SEQ ID NO: 909969 - protein, 402 aa, Homo sapiens
MEQLSSANTRFALDLFLALSENNPAGNIFISPFSISSAMAMVFLGTRGNTAAQLSKVSRNKKRVCFPPISLRMDSLHGKTFHFNTVEEVHSRFQSLNADINKRGASYILKLANRLYGEKTYNFLPEFLVSTQKTYGADLASVDFQHASEDARKTINQWVKGQTEGKIPELLASGMVDNMTKLVLVNAIYFKGNWKDKFMKEATTNAPFRLNKKDRKTVKMMYQKKKFAYGYIEDLKCRVLELPYQGEELSMVILLPDDIEDESTGLKKIEEQLTLEKLHEWTKPENLDFIEVNVSLPRFKLEESYTLNSDLARLGVQDLFNSSKADLSGMSGARDIFISKIVHKSFVEVNEEGTEAAAATAGIATFCMLMPEENFTADHPFLFFIRHNSSGSILFLGRFSSP

SEQ ID NO: 909970 - protein, 252 aa, Homo sapiens
NSRPRRHGCEKTTEGKIPELLASGMVDNMTKLVLVNAIYFKGNWKDKFMKEATTNAPFRLNKKDRKTVKMMYQKKKFAYGYIEDLKCRVLELPYQGEELSMVILLPDDIEDESTGLKKIEEQLTLEKLHEWTKPENLDFIEVNVSLPRFKLEESYTLNSDLARLGVQDLFNSSKADLSGMSGARDIFISKIVHKSFVEVNEEGTEAAAATAGIATFCMLMPEENFTADHPFLFFIRHNSSGSILFLGRFSSP

SEQ ID NO: 909971 - protein, 224 aa, Homo sapiens
MEQLSSANTRFALDLFLALSENNPAGNIFISPFSISSAMAMVFLGTRGNTAAQLSKTFHFNTVEEVHSRFQSLNADINKRGASYILKLANRLYGEKTYNFLPEFLVSTQKTYGADLASVDFQHASEDARKTINQWVKGQTEGKIPELLASGMVDNMTKLVLVNAIYFKGNWKDKFMKEATTNAPFRLNKKISLPTIHSFSLFGIIPQVASYSWGDFLPLRRKRL

SEQ ID NO: 909972 - protein, 207 aa, Homo sapiens
MEQLSSANTRFALDLFLALSENNPAGNIFISPFSISSAMAMVFLGTRGNTAAQLSKTFHFNTVEEVHSRFQSLNADINKRGASYILKLANRLYGEKTYNFLPEFLVSTQKTYGADLASVDFQHASEDARKTINQWVKGQTEGKIPELLASGMVDNMTKLVLVNAIYFKGNWKDKFMKEATTNAPFRLNKSDLITNDRQDSKGPFLLQ

SEQ ID NO: 909973 - protein, 68 aa, Homo sapiens
RSLLLALRRPRELGLLRSHREGPPPRPRLLARVTLPPAIRAAALGASFLTSHPARSPERASAACRSCL

SEQ ID NO: 909974 - protein, 117 aa, Homo sapiens
YYYYIPPRRRLPRFKLEESYTLNSDLARLGVQDLFNSSKADLSGMSGARDIFISKIVHKSFVEVNEEGTEAAAATAGIATFCMLMPEENFTADHPFLFFIRHNSSGSILFLGRFSSP

SEQ ID NO: 909975 - protein, 379 aa, Homo sapiens; identical to SEQ ID NO: 909961

SEQ ID NO: 909976 - protein, 379 aa, Homo sapiens; identical to SEQ ID NO: 909961

SEQ ID NO: 909977 - protein, 379 aa, Homo sapiens; identical to SEQ ID NO: 909961

SEQ ID NO: 909978 - protein, 410 aa, Homo sapiens
PPPPHLRSTARGTRPRQLGAGACLGGLSVFTMEQLSSANTRFALDLFLALSENNPAGNIFISPFSISSAMAMVFLGTRGNTAAQLSKTFHFNTVEEVHSRFQSLNADINKRGASYILKLANRLYGEKTYNFLPEFLVSTQKTYGADLASVDFQHASEDARKTINQWVKGQTEGKIPELLASGMVDNMTKLVLVNAIYFKGNWKDKFMKEATTNAPFRLNKKDRKTVKMMYQKKKFAYGYIEDLKCRVLELPYQGEELSMVILLPDDIEDESTGLKKIEEQLTLEKLHEWTKPENLDFIEVNVSLPRFKLEESYTLNSDLARLGVQDLFNSSKADLSGMSGARDIFISKIVHKSFVEVNEEGTEAAAATAGIATFCMLMPEENFTADHPFLFFIRHNSSGSILFLGRFSSP

SEQ ID NO: 909979 - protein, 228 aa, Homo sapiens
MVDNMTKLVLVNAIYFKGNWKDKFMKEATTNAPFRLNKKDRKTVKMMYQKKKFAYGYIEDLKCRVLELPYQGEELSMVILLPDDIEDESTGLKKIEEQLTLEKLHEWTKPENLDFIEVNVSLPRFKLEESYTLNSDLARLGVQDLFNSSKADLSGMSGARDIFISKIVHKSFVEVNEEGTEAAAATAGIATFCMLMPEENFTADHPFLFFIRHNSSGSILFLGRFSSP

SEQ ID NO: 909980 - protein, 361 aa, Homo sapiens
MEQLSSANTRFALDLFLALSENNPAGNIFISPFSISSAMAMVFLGTRGNTAAQLSKTFHFNTVEEVHSRFQSLNADINKRGASYILKLANRLYGEKTYNFLPEFLVSTQKTYGADLASVDFQHASEDARKTINQWVKGQTEGKIPELLASGMVDNMTKLVLVNAIYFKGNWKDKFMKEATTNAPFRLNKKDRKTVKMMYQKNYQGEELSMVILLPDDIEDESTGLKKIEEQLTLEKLHEWTKPENLDFIEVNVSLPRFKLEESYTLNSDLARLGVQDLFNSSKADLSGMSGARDIFISKIVHKSFVEVNEEGTEAAAATAGIATFCMLMPEENFTADHPFLFFIRHNSSGSILFLGRFSSP

SEQ ID NO: 909981 - protein, 204 aa, Homo sapiens
MEQLSSANTRFALDLFLALSENNPAGNIFISPFSISSAMAMVFLGTRGNTAAQLSKTFHFNTVEEVHSRFQSLNADINKRGASYILKLANRLYGEKTYNFLPEFLVSTQKTYGADLASVDFQHASEDARKTINQWVKGQTEGKIPELLASGMVDNMTKLVLVNAIYFKGNWKDKFMKEATTNAPFRLNKKDRKTVKMMYQKKKL

SEQ ID NO: 909982 - protein, 88 aa, Homo sapiens
LVLARDLELVADLSGMSGARDIFISKIVHKSFVEVNEEGTEAAAATAGIATFCMLMPEENFTADHPFLFFIRHNSSGSILFLGRFSSP

SEQ ID NO: 909983 - protein, 103 aa, Homo sapiens
MESLCAGHVIRFLSPPSLPAVIPSPAPTVLAHIVVTVRGRCRCVKSALHVAGQLSHVRSSPEWKLKHDLTQAAKSFFLISSPKLLKLHFKVKTNIGRRGGSCL

SEQ ID NO: 909984 - protein, 565 aa, Homo sapiens
MIEPFGNQYIVARPVYSTNAFEENHKKTGRHHKTFLDHLKVCCSCSPQKAKRIVLSLFPIASWLPAYRLKEWLLSDIVSGISTGIVAVLQGLAFALLVDIPPVYGLYASFFPAIIYLFFGTSRHISVGPFPILSMMVGLAVSGAVSKAVPDRNATTLGLPNNSNNSSLLDDERVRVAAAASVTVLSGIIQLAFGILRIGFVVIYLSESLISGFTTAAAVHVLVSQLKFIFQLTVPSHTDPVSIFKVLYSVFSQIEKTNIADLVTALIVLLVVSIVKEINQRFKDKLPVPIPIEFIMTVIAAGVSYGCDFKNRFKVAVVGDMNPGFQPPITPDVETFQNTVGDCFGIAMVAFAVAFSVASVYSLKYDYPLDGNQELIALGLGNIVCGVFRGFAGSTALSRSAVQESTGGKTQIAGLIGAIIVLIVVLAIGFLLAPLQKSVLAALALGNLKGMLMQFAEIGRLWRKDKYDCLIWIMTFIFTIVLGLGLGLAASVAFQLLTIVFRTQFPKCSTLANIGRTNIYKNKKDYYDMYEPEGVKIFRCPSPIYFANIGFFRRKLIDAVRFGVI

SEQ ID NO: 909985 - protein, 764 aa, Homo sapiens
MIEPFGNQYIVARPVYSTNAFEENHKKTGRHHKTFLDHLKVCCSCSPQKAKRIVLSLFPIASWLPAYRLKEWLLSDIVSGISTGIVAVLQGLAFALLVDIPPVYGLYASFFPAIIYLFFGTSRHISVGPFPILSMMVGLAVSGAVSKAVPDRNATTLGLPNNSNNSSLLDDERVRVAAAASVTVLSGIIQLAFGILRIGFVVIYLSESLISGFTTAAAVHVLVSQLKFIFQLTVPSHTDPVSIFKVLYSVFSQIEKTNIADLVTALIVLLVVSIVKEINQRFKDKLPVPIPIEFIMTVIAAGVSYGCDFKNRFKVAVVGDMNPGFQPPITPDVETFQNTVGDCFGIAMVAFAVAFSVASVYSLKYDYPLDGNQELIALGLGNIVCGVFRGFAGSTALSRSAVQESTGGKTQIAGLIGAIIVLIVVLAIGFLLAPLQKSVLAALALGNLKGMLMQFAEIGRLWRKDKYDCLIWIMTFIFTIVLGLGLGLAASVAFQLLTIVFRTQFPKCSTLANIGRTNIYKNKKDYYDMYEPEGVKIFRCPSPIYFANIGFFRRKLIDAVGFSPLRILRKRNKALRKIRKLQKQGLLQVTPKGFICTVDTIKDSDEELDNNQIEVLDQPINTTDLPFHIDWNDDLPLNIEVPKISLHSLILDFSAVSFLDVSSVRGLKSILQEFIRIKVDVYIVGTDDDFIEKLNRYEFFDGEVKSSIFFLTIHDAVLHILMKKDYSTSKFNPSQEKDGKIDFTINTNGGLRNRVYEVPVETKF

SEQ ID NO: 909986 - protein, 174 aa, Homo sapiens
MIEPFGNQYIVARPVYSTNAFEENHKKTGRHHKTFLDHLKVCCSCSPQKAKRIVLSLFPIASWLPAYRLKEWLLSDIVSGISTGIVAVLQGLAFALLVDIPPVYGLYASFFPAIIYLFFGTSRHISVGPFPILSMMVGLAVSGAVSKAVPDRNATRKPQAATRKPQAASRKPQA

SEQ ID NO: 909987 - protein, 197 aa, Homo sapiens
RRAAGCCLLPPRAPAAMFNRAVSRLSRKRPPSDIHDSDGSSSSSHQSLKSTAKWAASLENLLEDPEGVKRFREFLKKEFSEENVLFWLACEDFKKMQDKTQMQEKAKEIYMTFLSSKASSQVNVEGQSRLNEKILEEPHPLMFQKLQDQIFNLMKYDSYSRFLKSDLFLKHKRTEEEEEDLPDAQTAAKRASRIYNT

SEQ ID NO: 909988 - protein, 192 aa, Homo sapiens
HYRARAAARAVDCWSAWNFSGGHQSMEHIHDSDGSSSSSHQSLKSTAKWAASLENLLEDPEGVKRFREFLKKEFSEENVLFWLACEDFKKMQDKTQMQEKAKEIYMTFLSSKASSQVNVEGQSRLNEKILEEPHPLMFQKLQDQIFNLMKYDSYSRFLKSDLFLKHKRTEEEEEDLPDAQTAAKRASRIYNT

SEQ ID NO: 909989 - protein, 212 aa, Homo sapiens
MLRLVFSSDPRVLGSPPVSAFLTQGVSGKAVDCWSAWNFSGGHQSMEHIHDSDGSSSSSHQSLKSTAKWAASLENLLEDPEGVKRFREFLKKEFSEENVLFWLACEDFKKMQDKTQMQEKAKEIYMTFLSSKASSQVNVEGQSRLNEKILEEPHPLMFQKLQDQIFNLMKYDSYSRFLKSDLFLKHKRTEEEEEDLPDAQTAAKRASRIYNT

SEQ ID NO: 909990 - protein, 173 aa, Homo sapiens
MQSELCFADIHDSDGSSSSSHQSLKSTAKWAASLENLLEDPEGVKRFREFLKKEFSEENVLFWLACEDFKKMQDKTQMQEKAKEIYMTFLSSKASSQVNVEGQSRLNEKILEEPHPLMFQKLQDQIFNLMKYDSYSRFLKSDLFLKHKRTEEEEEDLPDAQTAAKRASRIYNT

SEQ ID NO: 909991 - protein, 147 aa, Homo sapiens
LEPNSPKAPGSSQISHATSPDLCVLMGKVGLTENALCCMSRGLRKWDPSKQMQEKAKEIYMTFLSSKASSQVNVEGQSRLNEKILEEPHPLMFQKLQDQIFNLMKYDSYSRFLKSDLFLKHKRTEEEEEDLPDAQTAAKRASRIYNT

SEQ ID NO: 909992 - protein, 218 aa, Homo sapiens
RRAAGCCLLPPRAPAAMFNRAVSRLSRKRPPSDIHDSDGSSSSSHQSLKSTAKWAASLENLLEDPEGVKRFREFLKKEFSEENVLFWLACEDFKKMQDKTQMQEKAKEIYMTFLSSKASSQVNVEGQSRLNEKILEEPHPLMFQKLQDQIFNLMKYDSYSRFLKSDLFLKKRKKICLMLKLQLKELPEFITHEPPKSRDWNFLSGPCRVYHCFVICKD

SEQ ID NO: 909993 - protein, 197 aa, Homo sapiens; identical to SEQ ID NO: 909987

SEQ ID NO: 909994 - protein, 197 aa, Homo sapiens; identical to SEQ ID NO: 909987

SEQ ID NO: 909995 - protein, 212 aa, Homo sapiens; identical to SEQ ID NO: 909989

SEQ ID NO: 909996 - protein, 170 aa, Homo sapiens
RRAAGCCLLPPRAPAAMFNRAVSRLSRKRPPSDIHDSDGSSSSSHQSLKSTAKWAASLENLLEDPEGVKRFREFLKKEFSEENVLFWLACEDFKKMQDKTQKEAKPKKAAAKDKSSDKKVQTKGKRGAKGKQAEVANQETKEDLPAENGETKTEESPASDEAGEKEAKSD

SEQ ID NO: 909997 - protein, 326 aa, Homo sapiens
QCHPSYSSNQSKHSTWEKGIWHLLPPGSSSSTTSGSFHLERRPLPSSMQLAVIRGDTLRGFDSTDLSQRKLRTRGNGKTVRPSSVYRNGTDIIYNYHGIVSLKLEDDSFPTHKRKAKVSIISQPQKTIKVAELPQADKVESTTDSHFPRQDQLPSFPKNCTLELKGLFHFEEGIQKLYQCNGIAWKAWSPQTKDVEDKSCPAGWHQHSGYCHILITEQKGTWNAAAQACREQYLGNLVTVFSRQHMRWLWDIGGRKSFWIGLNDQVHAGHWEWIGGEPVAFTNGRRGPSPRSKLGKSCVLVQRQGKWQTKDCRRAKPHNYVCSRKL

SEQ ID NO: 909998 - protein, 326 aa, Homo sapiens; identical to SEQ ID NO: 909997

SEQ ID NO: 909999 - protein, 279 aa, Homo sapiens
MQLAVIRGDTLRGFDSTDLSQRKLRTRGNGKTVRPSSVYRNGTDIIYNYHGIVSLKLEDDSFPTHKRKAKVSIISQPQKTIKVAELPQADKVESTTDSHFPRQDQLPSFPKNCTLELKGLFHFEEGIQKLYQCNGIAWKAWSPQTKDVEDKSCPAGWHQHSGYCHILITEQKGTWNAAAQACREQYLGNLVTVFSRQHMRWLWDIGGRKSFWIGLNDQVHAGHWEWIGGEPVAFTNGRRGPSPRSKLGKSCVLVQRQGKWQTKDCRRAKPHNYVCSRKL

SEQ ID NO: 910000 - protein, 348 aa, Homo sapiens [sequence omitted]

SEQ ID NO: 910001 - protein, 120 aa, Homo sapiens
MSNIRSQHAEEQSNNGRYDDCKEFKDLHCSKDSTLAEEESEFPSTSISAVLSDLADLRSCDGQALPSQDPEVALSLSCGHSRGLFSHMQQHDILDTLCRTIESTIHVVTRISGKGNQAAS

SEQ ID NO: 910002 - protein, 679 aa, Homo sapiens
MATLITSTTAATAASGPLVDYLWMLILGFIIAFVLAFSVGANDVANSFGTAVGSGVVTLKQACILASIFETVGSVLLGAKVSETIRKGLIDVEMYNSTQGLLMAGSVSAMFGSAVWQLVASFLKLPISGTHCIVGATIGFSLVAKGQEGVKWSELIKIVMSWFVSPLLSGIMSGILFFLVRAFILHKADPVPNGLRALPVFYACTVGINLFSIMYTGAPLLGFDKLPLWGTILISVGCAVFCALIVWFFVCPRMKRKIEREIKCSPSESPLMEKKNSLKEDHEETKLSVGDIENKHPVSEVGPATVPLQAVVEERTVSFKLGDLEEAPERERLPSVDLKEETSIDSTVNGAVQLPNGNLVQFSQAVSNQINSSGHYQYHTVHKDSGLYKELLHKLHLAKVGDCMGDSGDKPLRRNNSYTSYTMAICGMPLDSFRAKEGEQKGEEMEKLTWPNADSKKRIRMDSYTSYCNAVSDLHSASEIDMSVKAEMGLGDRKGSNGSLEEWYDQDKPEVSLLFQFLQILTACFGSFAHGGNDVSNAIGPLVALYLVYDTGDVSSKVATPIWLLLYGGVGICVGLWVWGRRVIQTMGKDLTPITPSSGFSIELASALTVVIASNIGLPISTTHCKVGSVVSVGWLRSKKAVDWRLFRNIFMAWFVTVPISGVISAAIMAIFRYVILRM

SEQ ID NO: 910003 - protein, 637 aa, Homo sapiens
MATLITSTTAATAASGPLVDYLWMLILGFIIAFVLAFSVGANDVANSFGTAVGSGVVTLKQACILASIFETVGSVLLGAKVSETIRKGLIDVEMYNSTQGLLMAGSVSAMFGSAVWQLVASFLKLPISGTHCIVGATIGFSLVAKGQEGVKWSELIKIVMSWFVSPLLSGIMSGILFFLVRAFILHKADPVPNGLRALPVFYACTVGINLFSIMYTGAPLLGFDKLPLWGTILISVGCAVFCALIVWFFVCPRMKRKIERPATVPLQAVVEERTVSFKLGDLEEAPERERLPSVDLKEETSIDSTVNGAVQLPNGNLVQFSQAVSNQINSSGHYQYHTVHKDSGLYKELLHKLHLAKVGDCMGDSGDKPLRRNNSYTSYTMAICGMPLDSFRAKEGEQKGEEMEKLTWPNADSKKRIRMDSYTSYCNAVSDLHSASEIDMSVKAEMGLGDRKGSNGSLEEWYDQDKPEVSLLFQFLQILTACFGSFAHGGNDVSNAIGPLVALYLVYDTGDVSSKVATPIWLLLYGGVGICVGLWVWGRRVIQTMGKDLTPITPSSGFSIELASALTVVIASNIGLPISTTHCKVGSVVSVGWLRSKKAVDWRLFRNIFMAWFVTVPISGVISAAIMAIFRYVILRM

SEQ ID NO: 910004 - protein, 679 aa, Homo sapiens; identical to SEQ ID NO: 910002

SEQ ID NO: 910005 - protein, 467 aa, Homo sapiens
DAPFYLLVLGFDKLPLWGTILISVGCAVFCALIVWFFVCPRMKRKIEREIKCSPSESPLMEKKNSLKEDHEETKLSVGDIENKHPVSEVGPATVPLQAVVEERTVSFKLGDLEEAPERERLPSVDLKEETSIDSTVNGAVQLPNGNLVQFSQAVSNQINSSGHYQYHTVHKDSGLYKELLHKLHLAKVGDCMGDSGDKPLRRNNSYTSYTMAICGMPLDSFRAKEGEQKGEEMEKLTWPNADSKKRIRMDSYTSYCNAVSDLHSASEIDMSVKAEMGLGDRKGSNGSLEEWYDQDKPEVSLLFQFLQILTACFGSFAHGGNDVSNAIGPLVALYLVYDTGDVSSKVATPIWLLLYGGVGICVGLWVWGRRVIQTMGKDLTPITPSSGFSIELASALTVVIASNIGLPISTTHCKVGSVVSVGWLRSKKAVDWRLFRNIFMAWFVTVPISGVISAAIMAIFRYVILRM

SEQ ID NO: 910006 - protein, 408 aa, Homo sapiens [sequence omitted]

SEQ ID NO: 910007 - protein, 679 aa, Homo sapiens; identical to SEQ ID NO: 910002

SEQ ID NO: 910008 - protein, 114 aa, Homo sapiens
MEKKNSLKEDHEETKLSVGDIENKHPVSEVGPATVPLQAVVEERTVSFKLGDLEEAPERERLPSVDLKEETSIDSTVNGELEFLVSLLLPAVVRRLIVLDLMLFVLNVTLVILT

SEQ ID NO: 910009 - protein, 679 aa, Homo sapiens; identical to SEQ ID NO: 910002

SEQ ID NO: 910010 - protein, 466 aa, Homo sapiens
MYTGAPLLGFDKLPLWGTILISVGCAVFCALIVWFFVCPRMKRKIEREIKCSPSESPLMEKKNSLKEDHEETKLSVGDIENKHPVSEVGPATVPLQAVVEERTVSFKLGDLEEAPERERLPSVDLKEETSIDSTVNGAVQLPNGNLVQFSQAVSNQINSSGHYQYHTVHKDSGLYKELLHKLHLAKVGDCMGDSGDKPLRRNNSYTSYTMAICGMPLDSFRAKEGEQKGEEMEKLTWPNADSKKRIRMDSYTSYCNAVSDLHSASEIDMSVKAEMGLGDRKGSNGSLEEWYDQDKPEVSLLFQFLQILTACFGSFAHGGNDVSNAIGPLVALYLVYDTGDVSSKVATPIWLLLYGGVGICVGLWVWGRRVIQTMGKDLTPITPSSGFSIELASALTVVIASNIGLPISTTHCKVGSVVSVGWLRSKKAVDWRLFRNIFMAWFVTVPISGVISAAIMAIFRYVILRM

SEQ ID NO: 910011 - protein, 530 aa, Homo sapiens
YFFLMCSIPVMSWFVSPLLSGIMSGILFFLVRAFILHKADPVPNGLRALPVFYACTVGINLFSIMYTGAPLLGFDKLPLWGTILISVGCAVFCALIVWFFVCPRMKRKIEREIKCSPSESPLMEKKNSLKEDHEETKLSVGDIENKHPVSEVGPATVPLQAVVEERTVSFKLGDLEEAPERERLPSVDLKEETSIDSTVNGAVQLPNGNLVQFSQAVSNQINSSGHYQYHTVHKDSGLYKELLHKLHLAKVGDCMGDSGDKPLRRNNSYTSYTMAICGMPLDSFRAKEGEQKGEEMEKLTWPNADSKKRIRMDSYTSYCNAVSDLHSASEIDMSVKAEMGLGDRKGSNGSLEEWYDQDKPEVSLLFQFLQILTACFGSFAHGGNDVSNAIGPLVALYLVYDTGDVSSKVATPIWLLLYGGVGICVGLWVWGRRVIQTMGKDLTPITPSSGFSIELASALTVVIASNIGLPISTTHCKVGSVVSVGWLRSKKAVDWRLFRNIFMAWFVTVPISGVISAAIMAIFRYVILRM

SEQ ID NO: 910012 - protein, 679 aa, Homo sapiens; identical to SEQ ID NO: 910002

SEQ ID NO: 910013 - protein, 90 aa, Homo sapiens
ALTTITPSSGIHAELSLSLTGVIALNIGLSINTTHHTVRIYEGYALLRSKKAVDWRLFRNIFMAWFVTVPISGVISAAIMAIFRYVILRM

SEQ ID NO: 910014 - protein, 386 aa, Homo sapiens
MDKEDALICFEEHIRALEKEEEEEKQKSLLRERRRQRKNRESFQIFLDELHEHGQLHSMSSWMELYPTISSDIRFTNMLGQPGSTALDLFKFYVEDLKARYHDEKKIIKDILKDKGFVVEVNTTFEDFVAIISSTKRSTTLDAGNIKLAFNSLLEKAEAREREREKEEARKMKRKESAFKSMLKQAAPPIELDAVWEDIRERFVKEPAFEDITLESERKRIFKDFMHVLEHECQHHHSKNKKHSKKSKKHHRKRSRSRSGSDSDDDDSHSKKKRQRSESRSASEHSSSAESERSYKKSKKHKKKSKKRRHKSDSPESDAEREKDKKEKDRESEKDRTRQRSESKHKSPKKKTGKDSGNWDTSGSELSEGELEKRRRTLLEQLDDDQ

SEQ ID NO: 910015 - protein, 422 aa, Homo sapiens
NILDNMANVTYSTTWSEAQQYLMDNPTFAEDEELQNMDKEDALICFEEHIRALEKEEEEEKQKSLLRERRRQRKNRESFQIFLDELHEHGQLHSMSSWMELYPTISSDIRFTNMLGQPGSTALDLFKFYVEDLKARYHDEKKIIKDILKDKGFVVEVNTTFEDFVAIISSTKRSTTLDAGNIKLAFNSLLEKAEAREREREKEEARKMKRKESAFKSMLKQAAPPIELDAVWEDIRERFVKEPAFEDITLESERKRIFKDFMHVLEHECQHHHSKNKKHSKKSKKHHRKRSRSRSGSDSDDDDSHSKKKRQRSESRSASEHSSSAESERSYKKSKKHKKKSKKRRHKSDSPESDAEREKDKKEKDRESEKDRTRQRSESKHKSPKKKTGKDSGNWDTSGSELSEGELEKRRRTLLEQLDDDQ

SEQ ID NO: 910016 - protein, 386 aa, Homo sapiens; identical to SEQ ID NO: 910014

SEQ ID NO: 910017 - protein, 213 aa, Homo sapiens
NILDNMANVTYSTTWSEAQQYLMDNPTFAEDEELQNMDKEDALICFEEHIRALEKEEEEEKQKSLLRERRRQRKNRESFQIFLDELHEHGQLHSMSSWMELYPTISSDIRFTNMLGQPGSTALDLFKFYVEDLKARYHDEKKIIKDILKDKGFVVEVNTTFEDFVAIISSTKRSTTLDAGNIKLAFNSLLEKAEAREREREKEEARKYVVGSM

SEQ ID NO: 910018 - protein, 386 aa, Homo sapiens; identical to SEQ ID NO: 910014

SEQ ID NO: 910019 - protein, 230 aa, Homo sapiens
MIAREREREKEEARKMKRKESAFKSMLKQAAPPIELDAVWEDIRERFVKEPAFEDITLESERKRIFKDFMHVLEHECQHHHSKNKKHSKKSKKHHRKRSRSRSGSDSDDDDSHSKKKRQRSESRSASEHSSSAESERSYKKSKKHKKKSKKRRHKSDSPESDAEREKDKKEKDRESEKDRTRQRSESKHKSPKKKTGKDSGNWDTSGSELSEGELEKRRRTLLEQLDDDQ

SEQ ID NO: 910020 - protein, 175 aa, Homo sapiens
MEKIPVSAFLLLVALSYTLARDTTVKPGAKKDTKDSRPKLPQTLSRGWGDQLIWTQTYEEALYKSKTSNKPLMIIHHLDECPHSQALKKVFAENKEIQKLAEQFVLLNLVYETTDKHLSPDGQYVPRIMFVDPSLTVRADITGRYSNRLYAYEPADTALLLDNMKKALKLLKTEL

SEQ ID NO: 910021 - protein, 188 aa, Homo sapiens
MEKIPVSAFLLLVALSYTLARDTTVKPGAKKDTKDSRPKLPQTLSRGWGDQLIWTQTYEEALYKSKTSNKPLMIIHHLDECPHSQALKKVFAENKEIQKLAEQFVLLNLVYETTDKHLSPDGQYVPRIMFVDPSLTVRADITGRYSNRLYAYEPADTALCKCDLQFGCCPRVEHLYCCSDGTRGCMVR

SEQ ID NO: 910022 - protein, 175 aa, Homo sapiens; identical to SEQ ID NO: 910020

SEQ ID NO: 910023 - protein, 175 aa, Homo sapiens; identical to SEQ ID NO: 910020

SEQ ID NO: 910024 - protein, 200 aa, Homo sapiens
WQDEAWVNRTRRLTQGRWVRKSRVAMEKIPVSAFLLLVALSYTLARDTTVKPGAKKDTKDSRPKLPQTLSRGWGDQLIWTQTYEEALYKSKTSNKPLMIIHHLDECPHSQALKKVFAENKEIQKLAEQFVLLNLVYETTDKHLSPDGQYVPRIMFVDPSLTVRADITGRYSNRLYAYEPADTALLLDNMKKALKLLKTEL

SEQ ID NO: 910025 - protein, 138 aa, Homo sapiens
MQVSQTLSRGWGDQLIWTQTYEEALYKSKTSNKPLMIIHHLDECPHSQALKKVFAENKEIQKLAEQFVLLNLVYETTDKHLSPDGQYVPRIMFVDPSLTVRADITGRYSNRLYAYEPADTALLLDNMKKALKLLKTEL

SEQ ID NO: 910026 - protein, 138 aa, Homo sapiens
SERSRNYLPSWGDQLIWTQTYEEALYKSKTSNKPLMIIHHLDECPHSQALKKVFAENKEIQKLAEQFVLLNLVYETTDKHLSPDGQYVPRIMFVDPSLTVRADITGRYSNRLYAYEPADTALLLDNMKKALKLLKTEL

SEQ ID NO: 910027 - protein, 189 aa, Homo sapiens
MEKIPVSAFLLLVALSYTLARDTTVKPGAKKDTKDSRPKLPQTLSRGWGDQLIWTQTYEEALYKSKTSNKPLMIIHHLDECPHSQALKKVFAENKEIQKLAEQFVLLNLVYETTDKHLSPDGQYVPRIMFVDPSLTVRADITGRYSNRLYAYEPADTALCKCDLQFGCCPRVEHLYCCSDGTRGCMVSA

SEQ ID NO: 910028 - protein, 175 aa, Homo sapiens; identical to SEQ ID NO: 910020

SEQ ID NO: 910029 - protein, 175 aa, Homo sapiens; identical to SEQ ID NO: 910020

SEQ ID NO: 910030 - protein, 175 aa, Homo sapiens; identical to SEQ ID NO: 910020

SEQ ID NO: 910031 - protein, 175 aa, Homo sapiens; identical to SEQ ID NO: 910020

SEQ ID NO: 910032 - protein, 175 aa, Homo sapiens; identical to SEQ ID NO: 910020

SEQ ID NO: 910033 - protein, 176 aa, Homo sapiens
MEKIPVSAFLLLVALSYTLARDTTVKPGAKKDTKDSRPKLPQTLSRGWGDQLIWTQTYEEALYKSKTSNKPLMIIHHLDECPHSQALKKVFAENKEIQKLAEQFVLLNLVYETTDKHLSPDGQYVPRIMFVDPSLTVRADITGRYSNRLYAYEPADTALLLDNMKKAQLWQELCQG

SEQ ID NO: 910034 - protein, 374 aa, Homo sapiens
MKALIFAAAGLLLLLPTFCQSGMENDTNNLAKPTLPIKTFRGAPPNSFEEFPFSALEGWTGATITVKIKCPEESASHLHVKNATMGYLTSSLSTKLIPAIYLLVFVVGVPANAVTLWMLFFRTRSICTTVFYTNLAIADFLFCVTLPFKIAYHLNGNNWVFGEVLCRATTVIFYGNMYCSILLLACISINRYLAIVHPFTYRGLPKHTYALVTCGLVWATVFLYMLPFFILKQEYYLVQPDITTCHDVHNTCESSSPFQLYYFISLAFFGFLIPFVLIIYCYAAIIRTLNAYDHRWLWYVKASLLILVIFTICFAPSNIILIIHHANYYYNNTDGLYFIYLIALCLGSLNSCLDPFLYFLMSKTRNHSTAYLTK

SEQ ID NO: 910035 - protein, 181 aa, Homo sapiens [sequence omitted]

SEQ ID NO: 910036 - protein, 483 aa, Homo sapiens [sequence omitted]

SEQ ID NO: 910037 - protein, 483 aa, Homo sapiens [sequence omitted]

SEQ ID NO: 910038 - protein, 484 aa, Homo sapiens
ICYTLLKTPLGVLIYKQCRSKSDSSPAVLRASRLYQWSLKSSAQFLGSPQLRQVGQIIRVPARMAATLILEPAGRCCWDEPVRIAVRGLAPEQPVTLRASLRDEKGALFQAHARYRADTLGELDLERAPALGGSFAGLEPMGLLWALEPEKPLVRLVKRDVRTPLAVELEVLDGHDPDPGRLLCQTRHERYFLPPGVRREPVRVGRVRGTLFLPPEPGPFPGIVDMFGTGGGLLEYRASLLAGKGFAVMALAYYNYEDLPKTMETLHLEYFEEAMNYLLSHPEVKGPGVGLLGISKGGELCLSMASFLKGITAAVVINGSVANVGGTLRYKGETLPPVGVNRNRIKVTKDGYADIVDVLNSPLEGPDQKSFIPVERAESTFLFLVGQDDHNWKSEFYANEACKRLQAHGRRKPQIICYPETGHYIEPPYFPLCRASLHALVGSPIIWGGEPRAHAMAQVDAWKQLQTFFHKHLGGHEGTIPSKV

SEQ ID NO: 910039 - protein, 286 aa, Homo sapiens [sequence omitted]

SEQ ID NO: 910040 - protein, 301 aa, Homo sapiens
MSNKLLSPHPHSVVLRSEFKMASSPAVLRASRLYQWSLKSSAQFLGSPQLRQYRASLLAGKGFAVMALAYYNYEDLPKTMETLHLEYFEEAMNYLLSHPEVKGPGVGLLGISKGGELCLSMASFLKGITAAVVINGSVANVGGTLRYKGETLPPVGVNRNRIKVTKDGYADIVDVLNSPLEGPDQKSFIPVERAESTFLFLVGQDDHNWKSEFYANEACKRLQAHGRRKPQIICYPETGHYIEPPYFPLCRASLHALVGSPIIWGGEPRAHAMAQVDAWKQLQTFFHKHLGGHEGTIPSKV

SEQ ID NO: 910041 - protein, 255 aa, Homo sapiens
MSNKLLSPHPHSVVLRSEFKMASSPAVLRASRLYQWSLKSSAQFLGSPQLRQVGQIIRVPARMAATLILEPAGRCCWDEPVRIAVRGLAPEQPVTLRASLRDEKGALFQAHARYRADTLGELDLERAPALGGSFAGLEPMGLLWALEPEKPLVRLVKRDVRTPLAVELEVLDGHDPDPGRLLCQTRHERYFLPPGVRREPVRVGRVRGTLFLPPGDSPPLIVPCSFAFHFVCLPRPTLFAYVYAPPPRPRAILPR

SEQ ID NO: 910042 - protein, 295 aa, Homo sapiens
MAATLILEPAGRCCWDEPVRIAVRGLAPEQPVTLRASLRDEKGALFQAHARYRADTLGELDLERAPALGGSFAGLEPMGLLWALEPEKPLVRLVKRDVRTPLAVELEVLDGHDPDPGRLLCRVRHERYFLPPGVRREPVRAGRVRGTLFLPPEPGPFPGIVDMFGTGGGLLEYRASLLAGKEFAVMALAYYNYEDLPKTMETLHLEYFEEAVNYLLSHPEVKGPGVGLLGISKGGELCLSMASFLKGITAAVVINGSVANVGGTLRYKGETLPPVGVNRNRIKVTKDGYADIVDV

SEQ ID NO: 910043 - protein, 483 aa, Homo sapiens [sequence omitted]

SEQ ID NO: 910044 - protein, 485 aa, Homo sapiens
MSNKLLSPHPHSVVLRSEFKMASSPAVLRASRLYQWSLKSSAQFLGSPQLRQVGQIIRVPARMAATLILEPAGRCCWDEPVRIAVRGLAPEQPVTLRASLRDEKGALFQAHARYRADTLGELDLERAPALGGSFAGLEPMGLLWALEPEKPLVRLVKRDVRTPLAVELEVLDGHDPDPGRLLCQTRHERYFLPPGVRREPVRVGRVRGTLFLPPEPGPFPGIVDMFGTGGGLLEYRASLLAGKGFAVMALAYYNYEDLPKTMETLHLEYFEDSYNKPEAQSNPEVKGPGVGLLGISKGGELCLSMASFLKGITAAVVINGSVANVGGTLRYKGETLPPVGVNRNRIKVTKDGYADIVDVLNSPLEGPDQKSFIPVERAESTFLFLVGQDDHNWKSEFYANEACKRLQAHGRRKPQIICYPETGHYIEPPYFPLCRASLHALVGSPIIWGGEPRAHAMAQVDAWKQLQTFFHKHLGGHEGTIPSKV

SEQ ID NO: 910045 - protein, 286 aa, Homo sapiens [sequence omitted]

SEQ ID NO: 910046 - protein, 181 aa, Homo sapiens [sequence omitted]

SEQ ID NO: 910047 - protein, 94 aa, Homo sapiens
GGAFGPQAEPTWIPQALGERHSGCNSPCLARPEAPLSSSVVVLAGLFVMVLILFLGASMVYLIRVARRNQERALRTVWSSGDDKEQLVKNTYVL

SEQ ID NO: 910048 - protein, 254 aa, Homo sapiens
MAQLCGLRRSRAFLALLGSLLLSGVLAADRERSIHDFCLVSKVVGRCRASMPRWWYNVTDGSCQLFVYGGCDGNSNNYLTKEECLKKCATVTENATGDLATSRNAADSSVPSAPRRQDSEDHSSDMFNYERILAPPTQSLGALPVHSFPRWYFDVERNSCNNFIYGGCRGNKNSYRSEEACMLRCFRQQENPPLPLGSKVVVLAGLFVMVLILFLGASMVYLIRVARRNQERALRTVWSSGDDKEQLVKNTYVL

SEQ ID NO: 910049 - protein, 254 aa, Homo sapiens; identical to SEQ ID NO: 910048

SEQ ID NO: 910050 - protein, 254 aa, Homo sapiens; identical to SEQ ID NO: 910048

SEQ ID NO: 910051 - protein, 254 aa, Homo sapiens; identical to SEQ ID NO: 910048

SEQ ID NO: 910052 - protein, 254 aa, Homo sapiens; identical to SEQ ID NO: 910048

SEQ ID NO: 910053 - protein, 261 aa, Homo sapiens
MAQLCGLRRSRAFLALLGSLLLSGVLAADRERSIHDFCLVSKVVGRCRASMPRWWYNVTDGSCQLFVYGGCDGNSNNYLTKEECLKKCATVTENATGDLATSRNAADSSVPSAPRRQDSEDHSSDMFNYERENSKEARILAPPTQSLGALPVHSFPRWYFDVERNSCNNFIYGGCRGNKNSYRSEEACMLRCFRQQENPPLPLGSKVVVLAGLFVMVLILFLGASMVYLIRVARRNQERALRTVWSSGDDKEQLVKNTYVL

SEQ ID NO: 910054 - protein, 271 aa, Homo sapiens
MAQLCGLRRSRAFLALLGSLLLSGVLAADRERSIHDFCLVSKVVGRCRASMPRWWYNVTDGSCQLYGVLGGGLCTRKTRQRNFYPLNTKGDGTGGPVKREHWFANLVKEENATGDLATSRNAADSSVPSAPRRQDSEDHSSDMFNYERILAPPTQSLGALPVHSFPRWYFDVERNSCNNFIYGGCRGNKNSYRSEEACMLRCFRQQENPPLPLGSKVVVLAGLFVMVLILFLGASMVYLIRVARRNQERALRTVWSSGDDKEQLVKNTYVL

SEQ ID NO: 910055 - protein, 234 aa, Homo sapiens
MAQLCGLRRSRAFLALLGSLLLSGVLAADRERSIHDFCLVSKVVGRCRASMPRWWYNVTDGSCQLFVYGGCDGNSNNYLTKEECLKKCATVTAPRRQDSEDHSSDMFNYERILAPPTQSLGALPVHSFPRWYFDVERNSCNNFIYGGCRGNKNSYRSEEACMLRCFRQQENPPLPLGSKVVVLAGLFVMVLILFLGASMVYLIRVARRNQERALRTVWSSGDDKEQLVKNTYVL

SEQ ID NO: 910056 - protein, 199 aa, Homo sapiens
MAQLCGLRRSRAFLALLGSLLLSGVLAADRERSIHDFCLVSKVVGRCRASMPRWWYNVTDGSCQLFVYGGCDGNSNNYLTKEECLKKCATVTENATGDLATSRNAADSSVPSAPRRQDSEDHSSDMFNYERILAPPTQSLGALPVHSFPRWYFDVERNSCNNSMVYLIRVARRNQERALRTVWSSGDDKEQLVKNTYVL

SEQ ID NO: 910057 - protein, 216 aa, Homo sapiens
MAQLCGLRRSRAFLALLGSLLLSGVLAADRERSIHDFCLVSKVVGRCRASMPRWWYNVTDGSCQLFVYGGCDGNSNNYLTKEECLKKCATVTENATGDLATSRNAADSSVPSAPRRQDSEDHSSDMFNYERILAPPTQSLGALPVHSFPRWYFDVERNSCNNFIYGGCRGNKNSYRSEEACMLRCFRRGNLPGPWPRGAGGRPAGGPLGAPRGQNR

SEQ ID NO: 910058 - protein, 256 aa, Homo sapiens
MAQLCGLRRSRAFLALLGSLLLSGVLAADRERSIHDFCLVSKVVGRCRASMPRWWYNVTDGSCQLFVYGGCDGNSNNYLTKEECLKKCATVTENATGDLATSRNAADSSVPSAPRRQDSEDHSSDMFNYERILSRQRSHLGHGRAVLSQRVLDVGKELRENSHKEGPGRKQTRIRWMSGFARRNARRVAKGGHVGRHEGVNHTGPGHLQRGGTHSRASRANDGRNQRSHTRERETHSQPSTRGSERYSSSRECVVH

SEQ ID NO: 910059 - protein, 187 aa, Homo sapiens
  misc_feature (131)..(131): Xaa can be any naturally occurring amino acid
  misc_feature (152)..(152): Xaa can be any naturally occurring amino acid
  misc_feature (155)..(155): Xaa can be any naturally occurring amino acid
  misc_feature (174)..(174): Xaa can be any naturally occurring amino acid
MAQLCGLRRSRAFLALLGSLLLSGVLAADRERSIHDFCLVSKVVGRCRASMPRWWYNVTDGSCQLFVYGGCDGNSNNYLTKEECLKKCATVTDATAMRYHRAEHKELGYTFYQVQCRSAEIEKTKGKVRFXDIDSPVQSKAPQVVIRSVPTXCPXLWVPLLDIRNRGSIEGSPXATPVNVGGGRPYY

SEQ ID NO: 910060 - protein, 113 aa, Homo sapiens
HRWVPSIKPWSMSPVNFEIQEGIHRKAAARRAENHRLPRNACLPPPPPTLRPVLERRPSSDVVTKPKGRVAGAQRADAPPRPARFCWGRGPRKPRLFPGTRGGPRCAQGRGAA

SEQ ID NO: 910061 - protein, 216 aa, Homo sapiens; identical to SEQ ID NO: 910057

SEQ ID NO: 910062 - protein, 254 aa, Homo sapiens; identical to SEQ ID NO: 910048

SEQ ID NO: 910063 - protein, 254 aa, Homo sapiens; identical to SEQ ID NO: 910048

SEQ ID NO: 910064 - protein, 254 aa, Homo sapiens; identical to SEQ ID NO: 910048

SEQ ID NO: 910065 - protein, 260 aa, Homo sapiens
MAQLCGLRRSRAFLALLGSLLLSGVLAADRERSIHDFCLVSKVVGRCRASMPRWWYNVTDGSCQLFVYGGCDGNSNNYLTKEECLKKCATVTENATGDLATSRNAADSSVPSAPRRQDSEDHSSDMFNYERILAPPTQSLGALPVHSFPRWYFDVERNSCNNFIYGGCRGNKNSYRSEEACMLRCFRCVFSPGQQENPPLPLGSKVVVLAGLFVMVLILFLGASMVYLIRVARRNQERALRTVWSSGDDKEQLVKNTYVL

SEQ ID NO: 910066 - protein, 197 aa, Homo sapiens
MAQLCGLRRSRAFLALLGSLLLSGVLAADRERSIHENATGDLATSRNAADSSVPSAPRRQDSEDHSSDMFNYERILAPPTQSLGALPVHSFPRWYFDVERNSCNNFIYGGCRGNKNSYRSEEACMLRCFRQQENPPLPLGSKVVVLAGLFVMVLILFLGASMVYLIRVARRNQERALRTVWSSGDDKEQLVKNTYVL

SEQ ID NO: 910067 - protein, 244 aa, Homo sapiens
MAQLCGLRRSRAFLALLGSLLLSGVLAADRERSIHDFCLVSKVVGRCRASMPRWWYNVTDGSCQLFVYGGCDGNSNNYLTKEECLKKCATVTENATGDLATSRNAADSSVPSAPRRQDSEDHSSDMFNYERILAPPTQSLGALPVHSFPRWYFDVERNSCNNFIYGGCRGNKNSYRSEEACMLRCFRQQENPPLPLGSKGKWPLTLLLPSACLLPSLTELSPAQLWFTLSFTVNIILAESHVSA

SEQ ID NO: 910068 - protein, 261 aa, Homo sapiens; identical to SEQ ID NO: 910053

SEQ ID NO: 910069 - protein, 94 aa, Homo sapiens; identical to SEQ ID NO: 910047

SEQ ID NO: 910070 - protein, 175 aa, Homo sapiens
MAQLCGLRRSRAFLALLGSLLLSGVLAADRERSIHDFCLVSKVVGRCRASMPRWWYNVTDGSCQLFVYGGCDGNSNNYLTKEECLKKCATVTVGLLWKSSRRLLLAWPAVWQQPRVVSSLIDFFPPGRVFFAYVEFHCLFSHHRSDVGIVSFVCLIYGFFKYKQKFFISILKEGK

SEQ ID NO: 910071 - protein, 699 aa, Homo sapiens
MAEPVSPLKHFVLAKKAITAVFDQLLEFVTEGSHFVEATYKNPELDRIATEDDLVEMQGYKDKLSIIGEVLSRRHMKVAFFGRTSSGKSSVINAMLWDKVLPSGIGHITNCFLSVEGTDGDKAYLMTEGSDEKKSVKTVNQLAHALHMDKDLKAGCLVRVFWPKAKCALLRDDLVLVDSPGTDVTTELDSWIDKFCLDADVFVLVANSESTLMNTEKHFFHKVNERLSKPNIFILNNRWDASASEPEYMEDVRRQHMERCLHFLVEELKVVNALEAQNRIFFVSAKEVLSARKQKAQGMPESGVALAEGFHARLQEFQNFEQIFEECISQSAVKTKFEQHTIRAKQILATVKNIMDSVNLAAEDKEVSCAMTDEICRLSVLVDEFCSEFHPNPDVLKIYKSELNKHIEDGMGRNLADRCTDEVNALVLQTQQEIIENLKPLLPAGIQDKLHTLIPCKKFDLSYNLNYHKLCSDFQEDIVFRFSLGWSSLVHRFLGPRNAQRVLLGLSEPIFQLPRSLASTPTAPTTPATPDNASQEELMITLVTGLASVTSRTSMGIIIVGGVIWKTIGWKLLSVSLTMYGALYLYERLSWTTHAKERAFKQQFVNYATEKLRMIVSSTSANCSHQVKQQIATTFARLCQQVDITQKQLEEEIARLPKEIDQLEKIQNNSKLLRNKAVQLENELENFTKQFLPSSNEES

SEQ ID NO: 910072 - protein, 741 aa, Homo sapiens
MAEPVSPLKHFVLAKKAITAVFDQLLEFVTEGSHFVEATYKNPELDRIATEDDLVEMQGYKDKLSIIGEVLSRRHMKVAFFGRTSSGKSSVINAMLWDKVLPSGIGHITNCFLSVEGTDGDKAYLMTEGSDEKKSVKTVNQLAHALHMDKDLKAGCLVRVFWPKAKCALLRDDLVLVDSPGTDVTTELDSWIDKFCLDADVFVLVANSESTLMNTEKHFFHKVNERLSKPNIFILNNRWDASASEPEYMEDVRRQHMERCLHFLVEELKVVNALEAQNRIFFVSAKEVLSARKQKAQGMPESGVALAEGFHARLQEFQNFEQIFEECISQSAVKTKFEQHTIRAKQILATVKNIMDSVNLAAEDKRHYSVEEREDQIDRLDFIRNQMNLLTLDVKKKIKEVTEEVANKVSCAMTDEICRLSVLVDEFCSEFHPNPDVLKIYKSELNKHIEDGMGRNLADRCTDEVNALVLQTQQEIIENLKPLLPAGIQDKLHTLIPCKKFDLSYNLNYHKLCSDFQEDIVFRFSLGWSSLVHRFLGPRNAQRVLLGLSEPIFQLPRSLASTPTAPTTPATPDNASQEELMITLVTGLASVTSRTSMGIIIVGGVIWKTIGWKLLSVSLTMYGALYLYERLSWTTHAKERAFKQQFVNYATEKLRMIVSSTSANCSHQVKQQIATTFARLCQQVDITQKQLEEEIARLPKEIDQLEKIQNNSKLLRNKAVQLENELENFTKQFLPSSNEES

SEQ ID NO: 910073 - protein, 741 aa, Homo sapiens; identical to SEQ ID NO: 910072

SEQ ID NO: 910074 - protein, 746 aa, Homo sapiens
MAEPVSPLKHFVLAKKAITAVFDQLLEFVTEGSHFVEATYKNPELDRIATEDDLVEMQGYKDKLSIIGEVLSRRHMKVAFFGRTSSGKSSVINAMLWDKVLPSGIGHITNCFLSVEGTDGDKAYLMTEGSDEKKSVKTVNQLAHALHMDKDLKAGCLVRVFWPKAKCALLRDDLVLVDSPGTDVTTELDSWIDKFCLDADVFVLVANSESTLMNTEKHFFHKVNERLSKPNIFILNNRWDASASEPEYMEDVRRQHMERCLHFLVEELKVVNALEAQNRIFFVSAKEVLSARKQKAQGMPESGVALAEGFHARLQEFQNFEQIFEECISQSAVKTKFEQHTIRAKQILATVKNIMDSVNLAAEDKRHYSVEEREDQIDRLDFIRNQMNLLTLDVKKKIKEVTEEVANKVSCAMTDEICRLSVLVDEFCSEFHPNPDVLKIYKSELNKHIEDGMGRNLADRCTDEVNALVLQTQQEIIENLKPLLPAGIQDKLHTLIPCKKFDLSYNLNYHKLCSDFQEDIVFRFSLGWSSLVHRFLGPRNAQRVLLGLSEPIFQLPRSLASTPTAPTTPATPDNASQEELMITLVTGLASVTSRTSMGIIIVGGVIWKTIGWKLLSVSLTMYGALYLYERLSWTTHAKERAFKQQFVNYATEKLRMIVSSTSANCSHQVKQQIATTFARLCQQVDITQKQLEEEIARLPKEIDQLEKIQNNSKLLRILTIEIALVTMIGGNETCKIGTVVIFMKLL

SEQ ID NO: 910075 - protein, 386 aa, Homo sapiens
MAEPVSPLKHFVLAKKAITAVFDQLLEFVTEGSHFVEATYKNPELDRIATEDDLVEMQGYKDKLSIIGEVLSRRHMKVAFFGRTSSGKSSVINAMLWDKVLPSGIGHITNCFLSVEGTDGDKAYLMTEGSDEKKSVKTVNQLAHALHMDKDLKAGCLVRVFWPKAKCALLRDDLVLVDSPGTDVTTELDSWIDKFCLDADVFVLVANSESTLMNTEKHFFHKVNERLSKPNIFILNNRWDASASEPEYMEDVRRQHMERCLHFLVEELKVVNALEAQNRIFFVSAKEVLSARKQKAQGMPESGVALAEGFHARLQEFQNFEQIFEECISQSAVKTKFEQHTIRAKQILATVKNIMDSVNLAAEDKRYEFILLQHKNVSFFVRLLLR

SEQ ID NO: 910076 - protein, 741 aa, Homo sapiens; identical to SEQ ID NO: 910072

SEQ ID NO: 910077 - protein, 355 aa, Homo sapiens
MNLLTLDVKKKIKEVTEEVANKVSCAMTDEICRLSVLVDEFCSEFHPNPDVLKIYKSELNKHIEDGMGRNLADRCTDEVNALVLQTQQEIIENLKPLLPAGIQDKLHTLIPCKKFDLSYNLNYHKLCSDFQEDIVFRFSLGWSSLVHRFLGPRNAQRVLLGLSEPIFQLPRSLASTPTAPTTPATPDNASQEELMITLVTGLASVTSRTSMGIIIVGGVIWKTIGWKLLSVSLTMYGALYLYERLSWTTHAKERAFKQQFVNYATEKLRMIVSSTSANCSHQVKQQIATTFARLCQQVDITQKQLEEEIARLPKEIDQLEKIQNNSKLLRNKAVQLENELENFTKQFLPSSNEES

SEQ ID NO: 910078 - protein, 741 aa, Homo sapiens; identical to SEQ ID NO: 910072

SEQ ID NO: 910079 - protein, 281 aa, Homo sapiens [sequence omitted]

SEQ ID NO: 910080 - protein, 187 aa, Homo sapiens
MAMMEVQGGPSLGQTCVLIVIFTVLLQSLCVAVTYVYFTNELKQMQDKYSKSGIACFLKEDDSYWDPNDEESMNSPCWQVKWQLRQLVRKMILRTSEETISTVQEKQQNISPLVRERGPQRVAAHITGTRGRSNTLSSPTGESFEPGRQRLQCGEIMPLHSSLATERDLVSKKKKKKTSVSTCYFFQ

SEQ ID NO: 910081 - protein, 281 aa, Homo sapiens [sequence omitted]

SEQ ID NO: 910082 - protein, 281 aa, Homo sapiens [sequence omitted]

SEQ ID NO: 910083 - protein, 185 aa, Homo sapiens
TRGSGALCQAAAVRGGRAAPSASRTPEARVAAMARNVVYPLYRLGGPQLRVFRTNFFIQLVRPGVAQPEDTVQFRIPMEMTRVDLRNYLEGIYNVPVAAVRTRVQHGSNKRRDHRNVRIKKPDYKVAYVQLAHGQTFTFPDLFPEKDESPEGSAADDLYSMLEEERQQRQSSDPRRGGVPSWFGL

SEQ ID NO: 910084 - protein, 167 aa, Homo sapiens
VTRGRPRVRTTRPGGSAGVGYPLYRLGGPQLRVFRTNFFIQLVRPGVAQPEDTVQFRIPMEMTRVDLRNYLEGIYNVPVAAVRTRVQHGSNKRRDHRNVRIKKPDYKVAYVQLAHGQTFTFPDLFPEKDESPEGSAADDLYSMLEEERQQRQSSDPRRGGVPSWFGL

SEQ ID NO: 910085 - protein, 155 aa, Homo sapiens
TRGSGALCQAAAVRGGRAAPSASRTPEARVAAMARNVVYPLYRLGGPQLRVFRTNFFIQLVRPGVAQPEDTVQFRIPMEMTRVDLRNYLEGIYNVPVAAVRTRVQHGSNKRRDHRNVRIKKPDYKVAYVQLVPKEQYPLLLVNPSHMLWPGLGLG

SEQ ID NO: 910086 - protein, 155 aa, Homo sapiens; identical to SEQ ID NO: 910085

SEQ ID NO: 910087 - protein, 215 aa, Homo sapiens
TRGSGALCQAAAVRGGRAAPSASRTPEARVAAMARNVVYPLYRLGGPQLRVFRTNFFIQLVRPGVAQPEDTVQFRIPMEMTRVDLRNYLEGIYNVPVAAVRTRVQHGSNKRRDHRNVRIKKPDYKVAYVQLAHGQTFTFPDLFPEKDESPEGSAAVRTRVQHGSNKRRDHRNVRIKKPDYKVAYVQLAHGQTFTFPDLFPSSDPRRGGVPSWFGL

SEQ ID NO: 910088 - protein, 185 aa, Homo sapiens; identical to SEQ ID NO: 910083

SEQ ID NO: 910089 - protein, 185 aa, Homo sapiens; identical to SEQ ID NO: 910083

SEQ ID NO: 910090 - protein, 155 aa, Homo sapiens
VAEEPPARYPLYRLGGPQLRVFRTNFFIQLVRPGVAQPEDTVQFRIPMEMTRVDLRNYLEGIYNVPVAAVRTRVQHGSNKRRDHRNVRIKKPDYKVAYVQLAHGQTFTFPDLFPEKDESPEGSAADDLYSMLEEERQQRQSSDPRRGGVPSWFGL

SEQ ID NO: 910091 - protein, 134 aa, Homo sapiens
PDSGAILTPPPSSLPSPLVCSFCLLALEHLVIISKFKMASCICLGPQGAVSPPSREPEPHAVAWAGAWLTRTYSELSAEDAHGQTFTFPDLFPEKDESPEGSAADDLYSMLEEERQQRQSSDPRRGGVPSWFGL

SEQ ID NO: 910092 - protein, 95 aa, Homo sapiens
PPTTVGSGHSGIRSVSYPLFCPPCCEWTLGGLQGWCVGLPWPKCVTWTQSLLYRYPLYRLGGPQLRVFRTNFFIQLVRPGVAQPEDTVQFRIPME

SEQ ID NO: 910093 - protein, 531 aa, Homo sapiens
MVDVGKWPIFTLLSPQEIASIRKVCVFGTSASEALYVTDNDEVFVFGLNYSNCLGTGDNQSTLVPKKLEGLCGKKIKSLSYGSGPHVLLSTEDGVVYAWGHNGYSQLGNGTTNQGIAPVQVCTNLLIKQVVEVACGSHHSMALAADGEVFAWGYNNCGQVGSGSTANQPTPRKVTNCLHIKRVVGIACGQTSSMAVLDNGEVYGWGYNGNGQLGLGNNGNQLTPVRVAALHSVCVNQIVCGYAHTLALTDEGLLYAWGANTYGQLGTGNKNNLLSPAHIMVEKERVVEIAACHSAHTSAAKTQGGHVYMWGQCRGQSVILPHLTHFSCTDDVFACFATPAVSWRLLSVEHEDFLTVAESLKKEFDSPETADLKFRIDGKYIHVHKAVLKIRCEHFRSMFQSYWNEDMKEVIEIDQFSYPVYRAFLQYLYTDTVDLPPEDAIGLLDLATSYCENRLKKLCQHIIKRGITVENAFSLFSAAVRYDAEDLEEFCFKFCINHLTEVTQTAAFWQMDGPLLKEFIAKASKCGAFKN

SEQ ID NO: 910094 - protein, 118 aa, Homo sapiens
MAIPLCAGAVIIGFRSKIKKCPSPLLTTRHTYTPFIPILVIIETISLLIQPIALAVTPNRYITAGHLLMHLIGSASLAVSTINLPSTLIIFTILILLTILEIAVALIQAYVFTLLVSL

SEQ ID NO: 910095 - protein, 223 aa, Homo sapiens
MWGQCRGQSVILPHLTHFSCTDDVFACFATPAVSWRLLSVEHEDFLTVAESLKKEFDSPETADLKFRIDGKYIHVHKAVLKIRCEHFRSMFQSYWNEDMKEVIEIDQFSYPVYRAFLQYLYTDTVDLPPEDAIGLLDLATSYCENRLKKLCQHIIKRGITVENAFSLFSAAVRYDAEDLEEFCFKFCINHLTEVTQTAAFWQMDGPLLKEFIAKASKCGAFKN

SEQ ID NO: 910096 - protein, 487 aa, Homo sapiens
MVDVGKWPIFTLLSPQEIASIRKVCVFGTSASEALYVTDNDEVFVFGLNYSNCLGTGDNQSTLVPKKLEGLCGKKIKSLSYGSGPHVLLSTEDGVVYAWGHNGYSQLGNGTTNQGIAPVQVCTNLLIKQVVEVACGSHHSMALAADGEVFAWGYNNCGQVGSGSTANQPTPRKVTNCLHIKRVVGIACGQTSSMAVLDNGEVYGWGYNGNGQLGLGNNGNQLTPVRVAALHSVCVNQIVCGYAHTLALTDEGLLYAWGANTYGQLGTGNKNNLLSPAHIMVEKERVVEIAACHSAHTSAAKTQGGHVYMWGQCRGQSVILPHLTHFSCTDDVFACFATPAVSWRLLSVEHEDFLTVAESLKKEFDSPETADLKFRIDGKYIHVHKAVLKIRCEHFRSMFQSYWNEDMKEVIEIDQFSYPVYRAFLQYLYTDTVDLPPEDAIGLLDLATSYCENRLKKLCQHIIKRGITVENAFSLFSAAVRYDAEVT

SEQ ID NO: 910097 - protein, 104 aa, Homo sapiens
PWNLDCFLRYCKHELLNCLVWCAVGFCDHEVTCIFLKTFQGGRDCSLSLCPHVCSQDAGWARVHVGPVPGSVRDPPAPHPLLLHRRRVCLLCHSRRLVAPPVCG

SEQ ID NO: 910098 - protein, 531 aa, Homo sapiens; identical to SEQ ID NO: 910093

SEQ ID NO: 910099 - protein, 526 aa, Homo sapiens
MVDVGKWPIFTLLSPQEIASIRKVCVFGTSASEALYVTDNDEVFVFGLNYSNCLGTGDNQSTLVPKKLEGLCGKKIKSLSYGSGPHVLLSTEDGVVYAWGHNGYSQLGNGTTNQGIAPVQVCTNLLIKQVVEVACGSHHSMALAADGEVFAWGYNNCGQVGSGSTANQPTPRKVTNCLHIKRVVGIACGQTSSMAVLDNGEVLPPCPGVLTSDYETLPKKHTTEKYIFLGGLCDLILTHSELRMRSGHLGKENSALALICCFCCCDLAAECPWNLDCFLRVVEIAACHSAHTSAAKTQGGHVYMWGQCRGQSVILPHLTHFSCTDDVFACFATPAVSWRLLSVEHEDFLTVAESLKKEFDSPETADLKFRIDGKYIHVHKAVLKIRCEHFRSMFQSYWNEDMKEVIEIDQFSYPVYRAFLQYLYTDTVDLPPEDAIGLLDLATSYCENRLKKLCQHIIKRGITVENAFSLFSAAVRYDAEDLEEFCFKFCINHLTEVTQTAAFWQMDGPLLKEFIAKASKCGAFKN

SEQ ID NO: 910100 - protein, 531 aa, Homo sapiens; identical to SEQ ID NO: 910093

SEQ ID NO: 910101 - protein, 285 aa, Homo sapiens [sequence omitted]

SEQ ID NO: 910102 - protein, 286 aa, Homo sapiens
MAAHTASVAAVVRFLRPGPGSISGRQLSRAQTPPANEGGHVEPPSGLAAPGPMGKWHVGGRRGAPRQWGATARGRDLEAVRRGGCGSVGRRRQRRRRRRRRMRRMRRMWATQGLAVALALSVLPGSRALRPGDCEVCISYLGRFYQDLKDRDVTFSPATIENELIKFCREARGKENRLCYYIGATDDAATKIINEVSKPLAHHIPVEKICEKLKKKDSQICELKYDKQIDLSTVDLKKLRVKELKKILDDWGETCKGCAEKSDYIRKINELMPKYAPKAASARTDL

SEQ ID NO: 910103 - protein, 286 aa, Homo sapiens; identical to SEQ ID NO: 910102

SEQ ID NO: 910104 - protein, 286 aa, Homo sapiens; identical to SEQ ID NO: 910102

SEQ ID NO: 910105 - protein, 188 aa, Homo sapiens
  misc_feature (3)..(3): Xaa can be any naturally occurring amino acid
EGXTKLRLGTKPGGGLAVALALSVLPGSRALRPGDCEVCISYLGRFYQDLKDRDVTFSPATIENELIKFCREARGKENRLCYYIGATDDAATKIINEVSKPLAHHIPVEKICEKLKKKDSQICELKYDKQIDLSTVDLKKLRVKELKKILDDWGETCKGCAEKSDYIRKINELMPKYAPKAASARTDL

SEQ ID NO: 910106 - protein, 160 aa, Homo sapiens
MAAHTASVAAVVRFLRPGPGSISGRQLSRAQTPPANEGGHVEPPVWARGSWTNGEVACGRAPGCPPPMGSYGARPGLGGGAARRVRFSRSAAAAEEEEEEEDEEDEEDVGHAGAGGGAGSERAAGQPGAAAGRLRSLYFLSGKILPGPQRQRCHILTSHY

SEQ ID NO: 910107 - protein, 198 aa, Homo sapiens
MAAHTASVAAVVRFLRPGPGSISGRQLSRAQTPPANEGGHVEPPVWARGSWTNGEVACGRAPGCPPPMGSYGARPGLGGGAARRVRFSRSAAAAEEEEEEEDEEDEEDVGHAGAGGGAGSERAAGQPGAAAGRLRRCGIGGRGPRSVTVLAAALNPTTSPDGRGQEGEGGGGGGGDSRSPRGLHEEAPAPALVNLSWA

SEQ ID NO: 910108 - protein, 50 aa, Homo sapiens
GGSPPNRLKLQGAVIMPLHSSLGDREPYLKTQVRPYREMMFQGVSMFGGD

SEQ ID NO: 910109 - protein, 286 aa, Homo sapiens; identical to SEQ ID NO: 910102

SEQ ID NO: 910110 - protein, 191 aa, Homo sapiens
MVRYEAGVNRQRMWATQGLAVALALSVLPGSRALRPGDCEVCISYLGRFYQDLKDRDVTFSPATIENELIKFCREARGKENRLCYYIGATDDAATKIINEVSKPLAHHIPVEKICEKLKKKDSQICELKYDKQIDLSTVDLKKLRVKELKKILDDWGETCKGCAEKSDYIRKINELMPKYAPKAASARTDL

SEQ ID NO: 910111 - protein, 332 aa, Homo sapiens
MAAHTASVAAVVRFLRPGPGSISGRQLSRAQTPPANEGGHVEPPSGLAAPGPMGKWHVGGRRGAPRQWGATARGRDLEAVRRGGCGSVGRRRQRRRRRRRRMRRMRRMWATQGLAVALALSVLPGSRALRPGDCEVCISYLGRFYQDLKDRDVTFSPATIENELIKFCREARGKENRLVGTLVTLKFIWWLSAWTEHVLRVQGLHWLNLTTSTGRAPKNAAVGQCYYIGATDDAATKIINEVSKPLAHHIPVEKICEKLKKKDSQICELKYDKQIDLSTVDLKKLRVKELKKILDDWGETCKGCAEKSDYIRKINELMPKYAPKAASARTDL

SEQ ID NO: 910112 - protein, 286 aa, Homo sapiens; identical to SEQ ID NO: 910102

SEQ ID NO: 910113 - protein, 474 aa, Homo sapiens
MEAEDIQEELTCPICLDYFQDPVSIECGHNFCRGCLHRNWAPGGGPFPCPECRHPSAPAALRPNWALARLTEKTQRRRLGPVPPGLCGRHWEPLRLFCEDDQRPVCLVCRESQEHQTHAMAPIDEAFESYREKLLKSQRNLVAKMKKVMHLQDVEVKNATQWKDKIKSQRMRISTEFSKLHNFLVEEEDLFLQRLNKEEEETKKKLNENTLKLNQTIASLKKLILEVGEKSQAPTLELLQNPKEVLTRSEIQDVNYSLEAVKVKTVCQIPLMKEMLKRFQVAVNLAEDTAHPKLVFSQEGRYVKNTASASSWPVFSSAWNYFAGWRNPQKTAFVERFQHLPCVLGKNVFTSGKHYWEVESRDSLEVAVGVCREDVMGITDRSKMSPDVGIWAIYWSAAGYWPLIGFPGTPTQQEPALHRVGVYLDRGTGNVSFYSAVDGVHLHTFSCSSVSRLRPFFWLSPLASLVIPPVTDRK

SEQ ID NO: 910114 - protein, 137 aa, Homo sapiens [sequence omitted]

SEQ ID NO: 910115 - protein, 294 aa, Homo sapiens
MEAEDIQEELTCPICLDYFQDPVSIECGHNFCRGCLHRNWAPGGGPFPCPECRHPSAPAALRPNWALARLTEKTQRRRLGPVPPGLCGRHWEPLRLFCEDDQRPVCLVCRESQEHQTHAMAPIDEAFESYREKLLKSQRNLVAKMKKVMHLQDVEVKNATQWKDKIKSQRMRISTEFSKLHNFLVEEEDLFLQRLNKEEEETKKKLNENTLKLNQTIASLKKLILEVGEKSQAPTLELLQNPKEVLTRSEIQDVNYSLEAVKVKTVCQIPLMKEMLKRFQATKIKTQKQNRHNM

SEQ ID NO: 910116 - protein, 267 aa, Homo sapiens
MEAEDIQEELTCPICLDYFQDPVSIECGHNFCRGCLHRNWAPGGGPFPCPECRHPSAPAALRPNWALARLTEKTQRRRLGPVPPGLCGRHWEPLRLFCEDDQRPVCLVCRESQEHQTHAMAPIDEAFESYREKLLKSQRNLVAKMKKVMHLQDVEVKNATQWKDKIKSQRMRISTEFSKLHNFLVEEEDLFLQRLNKEEEETKKKLNENTLKLNQTIASLKKLILEVGEKSQAPTLELLQVRQLRVGVISSSLTELSLVFRAECPSW

SEQ ID NO: 910117 - protein, 500 aa, Homo sapiens
MEAEDIQEELTCPICLDYFQDPVSIECGHNFCRGCLHRNWAPGGGPFPCPECRHPSAPAALRPNWALARLTEKTQRRRLGPVPPGLCGRHWEPLRLFCEDDQRPVCLVCRESQEHQTHAMAPIDEAFESYRTGNFDIHVDEWKRRLIRLLLYHSKQEEKLLKSQRNLVAKMKKVMHLQDVEVKNATQWKDKIKSQRMRISTEFSKLHNFLVEEEDLFLQRLNKEEEETKKKLNENTLKLNQTIASLKKLILEVGEKSQAPTLELLQNPKEVLTRSEIQDVNYSLEAVKVKTVCQIPLMKEMLKRFQVAVNLAEDTAHPKLVFSQEGRYVKNTASASSWPVFSSAWNYFAGWRNPQKTAFVERFQHLPCVLGKNVFTSGKHYWEVESRDSLEVAVGVCREDVMGITDRSKMSPDVGIWAIYWSAAGYWPLIGFPGTPTQQEPALHRVGVYLDRGTGNVSFYSAVDGVHLHTFSCSSVSRLRPFFWLSPLASLVIPPVTDRK

SEQ ID NO: 910118 - protein, 294 aa, Homo sapiens; identical to SEQ ID NO: 910115

SEQ ID NO: 910119 - protein, 474 aa, Homo sapiens; identical to SEQ ID NO: 910113

SEQ ID NO: 910120 - protein, 228 aa, Homo sapiens
  misc_feature (218)..(218): Xaa can be any naturally occurring amino acid
  misc_feature (220)..(220): Xaa can be any naturally occurring amino acid
MVWKVAVFLSVALGIGAVPIDDPEDGGKHWVVIVAGSNGWYNYRHQADACHAYQIIHRNGIPDEQIVVMMYDDIAYSEDNPTPGIVINRPNGTDVYQGVPKDYTGEDVTPQNFLAVLRGDAEAVKGIGSGKVLKSGPQDHVFIYFTDHGSTGILVFPNEDLHVKDLNETIHYMYKHKMYRKMVFYIEACESGSMMNHLPDNINGYATTGCQPQNKFLXQXKPRLTGHK

SEQ ID NO: 910121 - protein, 433 aa, Homo sapiens
MVWKVAVFLSVALGIGAVPIDDPEDGGKHWVVIVAGSNGWYNYRHQADACHAYQIIHRNGIPDEQIVVMMYDDIAYSEDNPTPGIVINRPNGTDVYQGVPKDYTGEDVTPQNFLAVLRGDAEAVKGIGSGKVLKSGPQDHVFIYFTDHGSTGILVFPNEDLHVKDLNETIHYMYKHKMYRKMVFYIEACESGSMMNHLPDNINVYATTAANPRESSYACYYDEKRSTYLGDWYSVNWMEDSDVEDLTKETLHKQYHLVKSHTNTSHVMQYGNKTISTMKVMQFQGMKRKASSPVPLPPVTHLDLTPSPDVPLTIMKRKLMNTNDLEESRQLTEEIQRHLDARHLIEKSVRKIVSLLAASEAEVEQLLSERAPLTGHSCYPEALLHFRTHCFNWHSPTYEYALRHLYVLVNLCEKPYPLHRIKLSMDHVCLGHY

SEQ ID NO: 910122 - protein, 321 aa, Homo sapiens
MVWKVAVFLSVALGIGAVPIDDPEDGGKHWVVIVAGSNGWYNYRHQADACHAYQIIHRNGIPDEQIVVMMYDDIAYSEDNPTPGIVINRPNGTDVYQGVPKDYTGEDVTPQNFLAVLRGDAEAVKGIGSGKVLKSGPQDHVFIYFTDHGSTGILVFPNEDLHVKDLNETIHYMYKHKMYRKMVFYIEACESGSMMNHLPDNINVYATTAANPRESSYACYYDEKRSTYLGDWYSVNWMEDSDVEDLTKETLHKQYHLVKSHTNTSHVMQYGNKTISTMKVMQFQGMKRKASSPVPLPPVTHLDLTPSPDVPLTIMGCQAPH

SEQ ID NO: 910123 - protein, 433 aa, Homo sapiens; identical to SEQ ID NO: 910121

SEQ ID NO: 910124 - protein, 433 aa, Homo sapiens; identical to SEQ ID NO: 910121

SEQ ID NO: 910125 - protein, 376 aa, Homo sapiens
MVWKVAVFLSVALGIGAVPIDDPEDGGKHWVVIVAGSNGWYNYRHQADACHAYQIIHRNGIPDEQIVVMMYDDIAYSEDNPTPGIVINRPNGTDVYQGVPKDYTGEDVTPQNFLAVLRGDAEAVKGIGSGKVLKSGPQDHVFIYFTDHGSTGILVFPNEDLHVKDLNETIHYMYKHKMYRKMVFYIEACESGSMMNHLPDNINVYATTAANPRESSYACYYDEKRSTYLGDWYSVNWMEDSDVEDLTKETLHKQYHLVKSHTNTSHVMQYGNKTISTMKVMQFQGMKRKASSPVPLPPVTHLDLTPSPDVPLTIMKRKLMNTNDLEESRQLTEEIQRHLDYEYALRHLYVLVNLCEKPYPLHRIKLSMDHVCLGHY

SEQ ID NO: 910126 - protein, 346 aa, Homo sapiens
MVWKVAVFLSVALGIGAVPIDDPEDGGKHWVVIVAGSNGWYNYRHQADACHAYQIIHRNGIPDEQIVVMMYDDIAYSEDNPTPGIVINRPNGTDVYQGVPKDYTGEDVTPQNFLAVLRGDAEAVKGIGSGKVLKSGPQDHVFIYFTDHGSTGILVFPNEDLHVKDLNETIHYMYKHKMYRKMVFYIEACESGSMMNHLPDNINVYATTAANPRESSYACYYDEKRSTYLGDWYSVNWMEDSDVEDLTKETLHKQYHLVKSHTNTSHVMQYGNKTISTMKVMQFQGMKRKASSPVPLPPVTHLDLTPSPDVPLTIMKRKLMNTNDLEESRQLTEEIQRHLDGCQAPH

SEQ ID NO: 910127 - protein, 373 aa, Homo sapiens
MPTRADACHAYQIIHRNGIPDEQIVVMMYDDIAYSEDNPTPGIVINRPNGTDVYQGVPKDYTGEEMIDPRRLLGSGPQDHVFIYFTDHGSTGILVFPNEDLHVKDLNETIHYMYKHKMYRKMVFYIEACESGSMMNHLPDNINVYATTAANPRESSYACYYDEKRSTYLGDWYSVNWMEDSDVEDLTKETLHKQYHLVKSHTNTSHVMQYGNKTISTMKVMQFQGMKRKASSPVPLPPVTHLDLTPSPDVPLTIMKRKLMNTNDLEESRQLTEEIQRHLDARHLIEKSVRKIVSLLAASEAEVEQLLSERAPLTGHSCYPEALLHFRTHCFNWHSPTYEYALRHLYVLVNLCEKPYPLHRIKLSMDHVCLGHY

SEQ ID NO: 910128 - protein, 433 aa, Homo sapiens; identical to SEQ ID NO: 910121

SEQ ID NO: 910129 - protein, 119 aa, Homo sapiens [sequence omitted]

SEQ ID NO: 910130 - protein, 101 aa, Homo sapiens
ILFLLVEDSDVEDLTKETLHKQYHLVKSHTNTSHVMQYGNKTISTMKVMQFQGMKRKASSPVPDVPLTIMKRKLMNTNDLEESRQLTEEIQRHLDGCQAPH

SEQ ID NO: 910131 - protein, 112 aa, Homo sapiens
MIWRSPGSSRRRSSGIWMDARHLIEKSVRKIVSLLAASEAEVEQLLSERAPLTGHSCYPEALLHFRTHCFNWHSPTYEYALRHLYVLVNLCEKPYPLHRIKLSMDHVCLGHY

SEQ ID NO: 910132 - protein, 160 aa, Homo sapiens
MVWKVAVFLSVALGIGAVPIDDPEDGGKHWVVIVAGSNGWYNYRHQADACHAYQIIHRNGIPDEQIVVMMYDDIAYSEDNPTPGIVINRPNGTDVYQGVPKDYTGEDVTPQNFLAVLRGDAWSEKSPLLGPSWGAPAPGLAPGPSSQDDLLAVTCFPSLF

SEQ ID NO: 910133 - protein, 162 aa, Homo sapiens
  misc_feature (52)..(52): Xaa can be any naturally occurring amino acid
  misc_feature (88)..(89): Xaa can be any naturally occurring amino acid
  misc_feature (95)..(95): Xaa can be any naturally occurring amino acid
  misc_feature (103)..(103): Xaa can be any naturally occurring amino acid
  misc_feature (106)..(106): Xaa can be any naturally occurring amino acid
  misc_feature (111)..(111): Xaa can be any naturally occurring amino acid
  misc_feature (126)..(126): Xaa can be any naturally occurring amino acid
  misc_feature (151)..(151): Xaa can be any naturally occurring amino acid
RGTVALKRGAAAPAAITAVPTSWVFGVRLRAAASSHGPAGATTAVTHRRRLXLLGDETQWLEVHHVYSQDHAREIFDSRGNPLVEVDXXPQKVSXELLCQWCXNWXLGGLXLRDNDKTRYMGKGVXKAVEHINKTIAAALVSKKLNVTEQXKIDKLMIEMDG

SEQ ID NO: 910134 - protein, 433 aa, Homo sapiens; identical to SEQ ID NO: 910121

SEQ ID NO: 910135 - protein, 433 aa, Homo sapiens; identical to SEQ ID NO: 910121

SEQ ID NO: 910136 - protein, 346 aa, Homo sapiens; identical to SEQ ID NO: 910126

SEQ ID NO: 910137 - protein, 433 aa, Homo sapiens; identical to SEQ ID NO: 910121

SEQ ID NO: 910138 - protein, 365 aa, Homo sapiens [sequence omitted]

SEQ ID NO: 910139 - protein, 420 aa, Homo sapiens [sequence omitted]

SEQ ID NO: 910140 - protein, 341 aa, Homo sapiens
MVWKVAVFLSVALGIGAVPIDDPEDGGKHWVVIVAGSNGWYNYRHQADACHAYQIIHRNGIPDEQIVVMMYDDIAYSEDNPTPGIVINRPNGTDVYQGVPKDYTGEDVTPQNFLAVLRGDAEAVKGIGSGKVLKSGPQDHVFIYFTDHGSTGILVFPNEDLHVKDLNETIHYMYKHKMYRKMVFYIEACESGSMMNHLPDNINVYATTAANPRESSYACYYDEKRSTYLGDWYSVNWMEDSDVEDLTKETLHKQYHLVKSHTNTSHVMQYGNKTISTMKVMQFQGMKRKASSPVPLPPVTHLDLTPSPDVPLTIMKRKLMNTNDLEESRQLTEEIQRHLDG

SEQ ID NO: 910141 - protein, 433 aa, Homo sapiens; identical to SEQ ID NO: 910121

SEQ ID NO: 910142 - protein, 126 aa, Homo sapiens
ACLVKSPVLDNVQQSTAYRHTEEEDLTKETLHKQYHLVKSHTNTSHVMQYGNKTISTMKVMQFQGMKRKASSPVPLPPVTHLDLTPSPDVPLTIMKRKLMNTNDLEESRQLTEEIQRHLDGCQAPH

SEQ ID NO: 910143 - protein, 344 aa, Homo sapiens
MVWKVAVFLSVALGIGAVPIDDPEDGGKHWVVIVAGSNGWYNYRHQADACHAYQIIHRNGIPDEQIVVMMYDDIAYSEDNPTPGIVINRPNGTDVYQGVPKDYTGEDVTPQNFLAVLRGDAEAVKGIGSGKVLKSGPQDHVFIYFTDHGSTGILVFPNEDLHVKDLNETIHYMYKHKMYRKMVFYIEACESGSMMNHLPDNINVYATTAANPRESSYACYYDEKRSTYLGDWYSVNWMEDSDVEDLTKETLHKQYHLVKSHTNTSHVMQYGNKTISTMKVMQFQGMKRKASSPVPLPPVTHLDLTPSPDVPLTIMKRKLMNTNDLEESRQLTEEIQRHLDMTDI

SEQ ID NO: 910144 - protein, 228 aa, Homo sapiens
MVWKVAVFLSVALGIGAVPIDDPEDGGKHWVVIVAGSNGWYNYRHQADACHAYQIIHRNGIPDEQIVVMMYDDIAYSEDNPTPGIVINRPNGTDVYQGVPKDYTGEDVTPQNFLAVLRGDAEAVKGIGSGKVLKSGPQDHVFIYFTDHGSTGILVFPNEDLHVKDLNETIHYMYKHKMYRKMVFYIEACESGSMMNHLPDNINVYATTAANPRESSYACYYDEKREGI

SEQ ID NO: 910145 - protein, 197 aa, Homo sapiens
MQRASRLKRELHMLATEPPPGITCWQDKDQMDDLRAQILGGANTPYEKGVFKLEVIIPERYPFEPPQIRFLTPIYHPNIDSAGRICLDVLKLPPKGAWRPSLNIATVLTSIQLLMSEPNPDDPLMADISSEFKYNKPAFLKNARQWTEKHARQKQKADEEEMLDNLPEAGDSRVHNSTQKRKASQLVGIEKKFHPDV

SEQ ID NO: 910146 - protein, 132 aa, Homo sapiens
MQRASRLKRELHMLATEPPPGITCWQDKDQMDDLRAQILGGANTPYEKGVFKLEVIIPERYPFEPPQIRFLTPIYHPNIDSAGRICLDVLKLPPKSSEFKYNKPAFLKNARQWTEKHARQKQKRLMREMLDL

SEQ ID NO: 910147 - protein, 197 aa, Homo sapiens; identical to SEQ ID NO: 910145

SEQ ID NO: 910148 - protein, 150 aa, Homo sapiens [sequence omitted]

SEQ ID NO: 910149 - protein, 92 aa, Homo sapiens
MQRASRLKRELHMLATEPPPGITCWQDKDQMDDLRAQILGGANTPYEKGVFKLEVIIPERYPFEPPQIRFLTPIYHPNKSFQQNQCWADQLE

SEQ ID NO: 910150 - protein, 197 aa, Homo sapiens; identical to SEQ ID NO: 910145

SEQ ID NO: 910151 - protein, 197 aa, Homo sapiens; identical to SEQ ID NO: 910145

SEQ ID NO: 910152 - protein, 166 aa, Homo sapiens
MQRASRLKRELHMLATEPPPGITCWQDKDQMDDLRAQILGGANTPYEKGVFKLEVIIPERYPFEPPQIRFLTPIYHPNIDSAGRICLDVLKLPPKGAWRPSLNIATVLTSIQLLMSEPNPDDPLMADISSEFKYNKPAFLKNARQWTEKHARQKQKTGSKQGGTEL

SEQ ID NO: 910153 - protein, 192 aa, Homo sapiens
MDGSGEQPRGGGPTSSEQIMKTGALLLQGFIQDRAGRMGGEAPELALDPVPQDASTKKLSECLKRIGDELDSNMELQRMIAAVDTDSPREVFFRVAADMFSDGNFNWGRVVALFYFASKLVLKALCTKVPELIRTIMGWTLDFLRERLLGWIQDQGGWDGLLSYFGTPTWQTVTIFVAGVLTASLTIWKKMG

SEQ ID NO: 910154 - protein, 166 aa, Homo sapiens
MDGFIQDRAGRMGGEAPELALDPVPQDASTKKLSECLKRIGDELDSNMELQRMIAAVDTDSPREVFFRVAADMFSDGNFNWGRVVALFYFASKLVLKALCTKVPELIRTIMGWTLDFLRERLLGWIQDQGGWDGLLSYFGTPTWQTVTIFVAGVLTASLTIWKKMG

SEQ ID NO: 910155 - protein, 173 aa, Homo sapiens
MKTGALLLQGFIQDRAGRMGGEAPELALDPVPQDASTKKLSECLKRIGDELDSNMELQRMIAAVDTDSPREVFFRVAADMFSDGNFNWGRVVALFYFASKLVLKALCTKVPELIRTIMGWTLDFLRERLLGWIQDQGGWDGLLSYFGTPTWQTVTIFVAGVLTASLTIWKKMG

SEQ ID NO: 910156 - protein, 173 aa, Homo sapiens; identical to SEQ ID NO: 910155

SEQ ID NO: 910157 - protein, 173 aa, Homo sapiens; identical to SEQ ID NO: 910155

SEQ ID NO: 910158 - protein, 179 aa, Homo sapiens
MDGSGEQPRGGGPTSSEQIMKTGALLLQGFIQDRAGRMGGEAPELALDPVPQDASTKKLSECLKRIGDELDSNMELQRMIAAVDTDSPREVFFRVAADMFSDGNFNWGRVVALFYFASKLVLKALCTKVPELIRTIMGWTLDFLRERLLGWIQDQGGWTVTIFVAGVLTASLTIWKKMG

SEQ ID NO: 910159 - protein, 105 aa, Homo sapiens
MGGEAPELALDPVPQDASTKKLSECLKRIGDELDSNMELQRMIAAVDTDSPREVFFRVAADMFSDGNFNWGRVVALFYFASKLVLKPVHQGAGTDQYTIGTELDL

SEQ ID NO: 910160 - protein, 155 aa, Homo sapiens
MGGEAPELALDPVPQDASTKKLSECLKRIGDELDSNMELQRMIAAVDTDSPREVFFRVAADMFSDGNFNWGRVVALFYFASKLVLKALCTKVPELIRTIMGWTLDFLRERLLGWIQDQGGWDGLLSYFGTPTWQTVTIFVAGVLTASLTIWKKMG

SEQ ID NO: 910161 - protein, 155 aa, Homo sapiens
MGGEAPELALDPVPQDASTKKLSECLKRIGDELDSNMELQRMIAAVDTDSPREVFFRVAADMFSDGNFNWGRVVALFYFASKLVLKALCTKVPELIRTIMGWTLDFLRERLLGWIQDQGGWVRLLKPPHPHHRALTTAPAPPPLPAILPSGLLRP

SEQ ID NO: 910162 - protein, 237 aa, Homo sapiens
MGGEAPELALDPVPQDASTKKLSECLKRIGDELDSNMELQSMIAASGRHPHLPPVPSPPHYTAHQPLQGSHGLSGEQFSPGLSSQLPPPTHAYTHALLDKANIPLSRTLHLLRPHSLGGGDIALWAFGLGAPSLLLHCSLWLPIVGPGRVPLALKGAQAPSHPGTPYSTALAAAGVANGGGCWAPGFPQPNCLCHHVGLTFHPSPSSLGPRTRLDSPLRLQEGRRGESPIPLHCGTG

SEQ ID NO: 910163 - protein, 114 aa, Homo sapiens
MIAAVDTDSPREVFFRVAADMFSDGNFNWGRVVALFYFASKLVLKALCTKVPELIRTIMGWTLDFLRERLLGWIQDQGGWDGLLSYFGTPTWQTVTIFVAGVLTASLTIWKKMG

SEQ ID NO: 910164 - protein, 192 aa, Homo sapiens; identical to SEQ ID NO: 910153

SEQ ID NO: 910165 - protein, 218 aa, Homo sapiens
MDGSGEQPRGGGPTSSEQIMKTGALLLQGFIQDRAGRMGGEAPELALDPVPQDASTKKLSECLKRIGDELDSNMELQRMIAAVDTDSPREVFFRVAADMFSDGNFNWGRVVALFYFASKLVLKALCTKVPELIRTIMGWTLDFLRERLLGWIQDQGGWVRLLKPPHPHHRALTTAPAPPSLPPATPLGPWAFWSRSQWCPLPIFRSSDVVYNAFSLRV

SEQ ID NO: 910166 - protein, 173 aa, Homo sapiens; identical to SEQ ID NO: 910155

SEQ ID NO: 910167 - protein, 173 aa, Homo sapiens
MKTGALLLQGFIQDRAGRMGGEAPELALDPVPQDASTKKLSECLKRIGDELDSNMELQRMIAAVDTDSPREVFFRVAADMFSDGNFNWGRVVALFYFASKLVLKALCTKVPELIRTIMGWTLDFLRERLLGWIQDQGGWVRLLKPPHPHHRALTTAPAPPPLPAILPSGLLRP

SEQ ID NO: 910168 - protein, 155 aa, Homo sapiens; identical to SEQ ID NO: 910160

SEQ ID NO: 910169 - protein, 225 aa, Homo sapiens
MDGSGEQPRGGGPTSSEQIMKTGALLLQGFIQDRAGRMGGEAPELALDPVPQDASTKKLSECLKRIGDELDSNMELQRMIAAVDTDSPREVFFRVAADMFSDGNFNWGRVVALFYFASKLVLKAGVKWRDLGSLQPLPPGFKRFTCLSITKELGLQALCTKVPELIRTIMGWTLDFLRERLLGWIQDQGGWDGLLSYFGTPTWQTVTIFVAGVLTASLTIWKKMG

SEQ ID NO: 910170 - protein, 155 aa, Homo sapiens; identical to SEQ ID NO: 910160

SEQ ID NO: 910171 - protein, 143 aa, Homo sapiens
MDGSGEQPRGGGPTSSEQIMKTGALLLQGMIAAVDTDSPREVFFRVAADMFSDGNFNWGRVVALFYFASKLVLKALCTKVPELIRTIMGWTLDFLRERLLGWIQDQGGWDGLLSYFGTPTWQTVTIFVAGVLTASLTIWKKMG

SEQ ID NO: 910172 - protein, 326 aa, Homo sapiens
VDFRGKMAAVRMLRTWSRNAGKLICVRYFQTCGNVHVLKPNYVCFFGYPSFKYSHPHHFLKTTAALRGQVVQFKLSDIGEGIREVTVKEWYVKEGDTVSQFDSICEVQSDKASVTITSRYDGVIKKLYYNLDDIAYVGKPLVDIETEALKDSEEDVVETPAVSHDEHTHQEIKGRKTLATPAVRRLAMENNIKLSEVVGSGKDGRILKEDILNYLEKQTGAILPPSPKVEIMPPPPKPKDMTVPILVSKPPVFTGKDKTEPIKGFQKAMVKTMSAALKIPHFGYCDEIDLTELVKLREELKPIAFARGIKLSFMPFFLKYYFSWKS

SEQ ID NO: 910173 - protein, 135 aa, Homo sapiens [sequence omitted]

SEQ ID NO: 910174 - protein, 488 aa, Homo sapiens
VDFRGKMAAVRMLRTWSRNAGKLICVRYFQTCGNVHVLKPNYVCFFGYPSFKYSHPHHFLKTTAALRGQVVQFKLSDIGEGIREVTVKEWYVKEGDTVSQFDSICEVQSDKASVTITSRYDGVIKKLYYNLDDIAYVGKPLVDIETEALKDSEEDVVETPAVSHDEHTHQEIKGRKTLATPAVRRLAMENNIKLSEVVGSGKDGRILKEDILNYLEKQTGAILPPSPKVEIMPPPPKPKDMTVPILVSKPPVFTGKDKTEPIKGFQKAMVKTMSAALKIPHFGYCDEIDLTELVKLREELKPIAFARGIKLSFMPFFLKAASLGLLQFPILNASVDENCQNITYKASHNIGIAMDTEQGLIVPNVKNVQICSIFDIATELNRLQKLGSVGQLSTTDLTGGTFTLSNIGSIGGTFAKPVIMPPEVAIGALGSIKAIPRFNQKGEVYKAQIMNVSWSADHRVIDGATMSRFSNLWKSYLENPAFMLLDLK

SEQ ID NO: 910175 - protein, 301 aa, Homo sapiens
MENNIKLSEVVGSGKDGRILKEDILNYLEKQTGAILPPSPKVEIMPPPPKPKDMTVPILVSKPPVFTGKDKTEPIKGFQKAMVKTMSAALKIPHFGYCDEIDLTELVKLREELKPIAFARGIKLSFMPFFLKAASLGLLQFPILNASVDENCQNITYKASHNIGIAMDTEQGLIVPNVKNVQICSIFDIATELNRLQKLGSVGQLSTTDLTGGTFTLSNIGSIGGTFAKPVIMPPEVAIGALGSIKAIPRFNQKGEVYKAQIMNVSWSADHRVIDGATMSRFSNLWKSYLENPAFMLLDLK

SEQ ID NO: 910176 - protein, 483 aa, Homo sapiens
VDFRGKMAAVRMLRTWSRNAGKLICVRYFQTCGNVHVLKPNYVCFFGYPSFKYSHPHHFLKTTAALRGQVVQFKLSDIGEGIREVTVKEWYVKEGDTVSQFDSICEVQSDKASVTITSRYDGVIKKLYYNLDDIAYVGKPLVDIETEALKDSEEDVVETPAVSHDEHTHQEIKGRKTLATPAVRRLAMENNIKLSEVVGSGKDGRILKEDILNYLEKQTGAILPPSPKVEIMPPPPKPKDMTVPILVSKPPVFTGKDKTEPIKGFQKAMVKTMSAALKIPHFGYCDEIDLTELVKLREELKPIAFARGIKLSFMPFFLKAASLGLLQFPILNASVDENCQNITYKASHNIGIAMDTEQGLIVPNVKNVQICSIFDIATELNRLQKLGSVGQLSTTDLTGGTFTLSNIGSIGGTFAKPVIMPPEVAIGALGSIKAIPRFNQKGEVYKAQIMNVSWSADHRVIDGATMSRFSNLWKSYLPDYAHN

SEQ ID NO: 910177 - protein, 883 aa, Homo sapiens
PAEPQCRAPEQRRQSSCTIPAFACAAAFLLHLFSSASAGAMAKPLTDSEKRKQISVRGLAGLGDVAEVRKSFNRHLHFTLVKDRNVATPRDYFFALAHTVRDHLVGRWIRTQQHYYERDPKRIYYLSLEFYMGRTLQNTMVNLGLQNACDEAIYQLGLDLEELEEIEEDAGLGNGGLGRLAACFLDSMATLGLAAYGYGIRYEFGIFNQKIVNGWQVEEADDWLRYGNPWEKARPEYMLPVHFYGRVEHTPDGVKWLDTQVVLAMPYDTPVPGYKNNTVNTMRLWSAKAPNDFKLQDFNVGDYIEAVLDRNLAENISRVLYPNDNFFEGKELRLKQEYFVVAATLQDIIRRFKSSKFGCRDPVRTCFETFPDKVAIQLNDTHPALSIPELMRILVDVEKVDWDKAWEITKKTCAYTNHTVLPEALERWPVSMFEKLLPRHLEIIYAINQRHLDHVAALFPGDVDRLRRMSVIEEGDCKRINMAHLCVIGSHAVNGVARIHSEIVKQSVFKDFYELEPEKFQNKTNGITPRRWLLLCNPGLADTIVEKIGEEFLTDLSQLKKLLPLVSDEVFIRDVAKVKQENKLKFSAFLEKEYKVKINPSSMFDVHVKRIHEYKRQLLNCLHVVTLYNRIKRDPAKAFVPRTVMIGGKAAPGYHMAKLIIKLVTSIGDVVNHDPVVGDRLKVIFLENYRVSLAEKVIPAADLSQQISTAGTEASGTGNMKFMLNGALTIGTMDGANVEMAEEAGAENLFIFGLRVEDVEALDRKGYNAREYYDHLPELKQAVDQISSGFFSPKEPDCFKDIVNMLMHHDRFKVFADYEAYMQCQAQVDQLYRNPKEWTKKVIRNIACSGKFSSDRTITEYAREIWGVEPSDLQIPPPNIPRD

SEQ ID NO: 910178 - protein, 261 aa, Homo sapiens
KHHHTVPPSVTPKALDRSPPCPEMFTRAAPGYHMAKLIIKLVTSIGDVVNHDPVVGDRLKVIFLENYRVSLAEKVIPAADLSQQISTAGTEASGTGNMKFMLNGALTIGTMDGANVEMAEEAGAENLFIFGLRVEDVEALDRKGYNAREYYDHLPELKQAVDQISSGFFSPKEPDCFKDIVNMLMHHDRFKVFADYEAYMQCQAQVDQLYRNPKEWTKKVIRNIACSGKFSSDRTITEYAREIWGVEPSDLQIPPPNIPRD

SEQ ID NO: 910179 - protein, 883 aa, Homo sapiens; identical to SEQ ID NO: 910177

SEQ ID NO: 910180 - protein, 775 aa, Homo sapiens
PAEPQCRAPEQRRQSSCTIPAFACAAAFLLHLFSSASAGAMAKPLTDSEKRKQISVRGLAGLGDVAEVRKSFNRHLHFTLVKDRNVATPRDYFFALAHTVRDHLVGRWIRTQQHYYERDPKRIYYLSLEFYMGRTLQNTMVNLGLQNACDEAIYQLGLDLEELEEIEEDAGLGNGGLGRLAACFLDSMATLGLAAYGYGIRYEFGIFNQKIVNGWQVEEADDWLRYGNPWEKARPEYMLPVHFYGRVEHTPDGVKWLDTQVVLAMPYDTPVPGYKNNTVNTMRLWSAKAPNDFKLQDFNVGDYIEAVLDRNLAENISRVLYPNDNFFEGKELRLKQEYFVVAATLQDIIRRFKSSKFGCRDPVRTCFETFPDKVAIQLNDTHPALSIPELMRILVDVEKVDWDKAWEITKKTCAYTNHTVLPEALERWPVSMFEKLLPRHLEIIYAINQRHLDHVAALFPGDVDRLRRMSVIEEGDCKRINMAHLCVIGSHAVNGVARIHSEIVKQSVFKDFYELEPEKFQNKTNGITPRRWLLLCNPGLADTIVEKIGEEFLTDLSQLKKLLPLVSDEVFIRDVAKVKQENKLKFSAFLEKEYKVKINPSSMFDVHVKRIHEYKRQLLNCLHVVTLYNRIKRDPAKAFVPRTVMIGGKDVEALDRKGYNAREYYDHLPELKQAVDQISSGFFSPKEPDCFKDIVNMLMHHDRFKVFADYEAYMQCQAQVDQLYRNPKEWTKKVIRNIACSGKFSSDRTITEYAREIWGVEPSDLQIPPPNIPRD

SEQ ID NO: 910181 - protein, 202 aa, Homo sapiens
PAEPQCRAPEQRRQSSCTIPAFACAAAFLLHLFSSASAGAMAKPLTDSEKRKQISVRGLAGLGDVAEVRKSFNRHLHFTLVKDRNVATPRDYFFALAHTVRDHLVGRWIRTQQHYYERDPKRIYYLSLEFYMGRTLQNTMVNLGLQNACDEAIYQLGLDLEELEEIEEDAGLGNGGLGRLAGKLPHPGGALSDPLAWLEATW

SEQ ID NO: 910182 - protein, 173 aa, Homo sapiens
HLRGPSQGAPFHFLPLRPSVFQKLCPGFHSEPSSEWPSPLGMWHQPLCPSRSASDDISLTVKGAGGIGFRLTSHLCSSRSLLKGLVTTHGHWLLPWTVQALSSQGHPGAGAVPGTNMAVFSKVAHLGRWLLTPGPSPHRYNAREYYDHLPELKQAVDQISSGFFSPKEPDCFK

SEQ ID NO: 910183 - protein, 883 aa, Homo sapiens; identical to SEQ ID NO: 910177

SEQ ID NO: 910184 - protein, 883 aa, Homo sapiens; identical to SEQ ID NO: 910177

SEQ ID NO: 910185 - protein, 883 aa, Homo sapiens; identical to SEQ ID NO: 910177

SEQ ID NO: 910186 - protein, 298 aa, Homo sapiens
PAEPQCRAPEQRRQSSCTIPAFACAAAFLLHLFSSASAGAMAKPLTDSEKRKQISVRGLAGLGDVAEVRKSFNRHLHFTLVKDRNVATPRDYFFALAHTVRDHLVGRWIRTQQHYYERDPKRIYYLSLEFYMGRTLQNTMVNLGLQNACDEAIYQLGLDLEELEEIEEDAGLGNGGLGRLAACFLDSMATLGLAAYGYGIRYEFGIFNQKIVNGWQVEEADDWLRYGNPWEKARPEYMLPVHFYGRVEHTPDGVKWLDTQVVLAMPYDTPVPGYKNNTVNTMRLWSAKAPNDFKLQDW

SEQ ID NO: 910187 - protein, 72 aa, Homo sapiens
LKTFTLSFQAAPGYHMAKLIIKLVTSIGDVVNHDPVVGDRLKVIFLENYRVSLAEKGNPGSLCWTENSLLPG

SEQ ID NO: 910188 - protein, 181 aa, Homo sapiens
MALSDADVQKQIKHMMAFIEQEANEKAEEIDAKAEEEFNIEKGRLVQTQRLKIMEYYEKKEKQIEQQKKIQMSNLMNQARLKVLRARDDLITDLLNEAKQRLSKVVKDTTRYQVLLDGLVLQGLYQLLEPRMIVRCRKQDFPLVKAAVQKAIPMYKIATKNDVDVQIDQESYLPEDIAGGS

SEQ ID NO: 910189 - protein, 116 aa, Homo sapiens
GCAVYTPRQGHSSAGVKGTMYLSQVFENDYFLCFFFAELVGVEIYNGDRKIKVSNTLEKPAGSHSPADDARSPGSLVWCKCQQEVFGLSLQEVELVVSSPAVMWKLLIFEETRMSL

SEQ ID NO: 910190 - protein, 116 aa, Homo sapiens; identical to SEQ ID NO: 910189

SEQ ID NO: 910191 - protein, 181 aa, Homo sapiens; identical to SEQ ID NO: 910188

SEQ ID NO: 910192 - protein, 181 aa, Homo sapiens; identical to SEQ ID NO: 910188

SEQ ID NO: 910193 - protein, 209 aa, Homo sapiens
IVIQHIPLTTSFKPKLEPTVHRPSIALAMALSDADVQKQIKHMMAFIEQEANEKAEEIDAKAEEEFNIEKGRLVQTQRLKIMEYYEKKEKQIEQQKKIQMSNLMNQARLKVLRARDDLITDLLNEAKQRLSKVVKDTTRYQVLLDGLVLQGLYQLLEPRMIVRCRKQDFPLVKAAVQKAIPMYKIATKNDVDVQIDQESYLPEDIAGGS

SEQ ID NO: 910194 - protein, 159 aa, Homo sapiens
MALSDADVQKQAEEEFNIEKGRLVQTQRLKIMEYYEKKEKQIEQQKKIQMSNLMNQARLKVLRARDDLITDLLNEAKQRLSKVVKDTTRYQVLLDGLVLQGLYQLLEPRMIVRCRKQDFPLVKAAVQKAIPMYKIATKNDVDVQIDQESYLPEDIAGGS

SEQ ID NO: 910195 - protein, 151 aa, Homo sapiens
MALSDADVQKQIKHMMAFIEQEANEKAEEIDAKAEEEFNIEKGRLVQTQRLKIMEYYEKKEKQIEQQKKIQMSNLMNQARLKVLRARDDLITGLYQLLEPRMIVRCRKQDFPLVKAAVQKAIPMYKIATKNDVDVQIDQESYLPEDIAGGS

SEQ ID NO: 910196 - protein, 123 aa, Homo sapiens
MALSDADVQKQIKHMMAFIEQEANEKAEEIDAKAEEEFNIEKGRLVQTQRLKIMEYYEKKEKQIEQQKKIQMSNLMNQARLKVLRARDDLITGGCMGFLGLHSPSGLKVMYLVFGPAVPTLEA

SEQ ID NO: 910197 - protein, 112 aa, Homo sapiens
MALSDADVQKQIKHMMAFIEQEANEKAEEIDAKAEEEFNIEKGRLVQTQRLKIMEYYEKKEKQIEQQKKIQMSNLMNQARLKVLRARDDLITVDLSRVAIQISQSTTDLHVR

SEQ ID NO: 910198 - protein, 215 aa, Homo sapiens
MALSDADVQKQIKHMMAFIEQEANEKAEEIDAKAEEEFNIEKGRLVQTQRLKIMEYYEKKEKQIEQQKKIQMSNLMNQARLKVLRARDDLITDLLNEAKQRLSKVVKDTTRYQVLLDGLVLQGLYQLLEPRMIVRCRKQDFPLVKAAVQKAIPMYKIATKNDVDVQIDQESYLPEDIAVGLNLYGDPHFRVPNLEPVGFSEDEAKSDLLGIHGVG

SEQ ID NO: 910199 - protein, 181 aa, Homo sapiens; identical to SEQ ID NO: 910188

SEQ ID NO: 910200 - protein, 181 aa, Homo sapiens; identical to SEQ ID NO: 910188

SEQ ID NO: 910201 - protein, 182 aa, Homo sapiens
MQSRDGVSPCWPGWSQSLDLVIRLPRPPQVLGLQAEEEFNIEKGRLVQTQRLKIMEYYEKKEKQIEQQKKIQMSNLMNQARLKVLRARDDLITDLLNEAKQRLSKVVKDTTRYQVLLDGLVLQGLYQLLEPRMIVRCRKQDFPLVKAAVQKAIPMYKIATKNDVDVQIDQESYLPEDIAGGS

SEQ ID NO: 910202 - protein, 151 aa, Homo sapiens; identical to SEQ ID NO: 910195

SEQ ID NO: 910203 - protein, 125 aa, Homo sapiens
MALSDADVQKQIKHMMAFIEQEANEKAEEIDAKAEEEFNIEKGRLVQTQRLKIMEYYEKKEKQIEQQKKIQMSNLMNQARLKVLRARDDLITDLLNEAKQRLSKVVKDTTRYQVLLDGLVLQVPS

SEQ ID NO: 910204 - protein, 115 aa, Homo sapiens
  misc_feature (85)..(85): Xaa can be any naturally occurring amino acid
  misc_feature (103)..(103): Xaa can be any naturally occurring amino acid
  misc_feature (108)..(108): Xaa can be any naturally occurring amino acid
MALSDADVQKQIKHMMAFIEQEANEKAEEIDAKAEEEFNIEKGRLVQTQRLKIMEYYEKKEKQIEQQKKMKKRSRHRRLHFVLYXEKILFALGIAVNPKPYPXPGALXNMCCVPK

SEQ ID NO: 910205 - protein, 321 aa, Homo sapiens
MEEGQYSEIEELPRRRCCRRGTQIVLLGLVTAALWAGLLTLLLLWHWDTTQSLKQLEERAARNVSQVSKNLESHHGDQMAQKSQSTQISQELEELRAEQQRLKSQDLELSWNLNGLQADLSSFKSQELNERNEASDLLERLREEVTKLRMELQVSSGFVCNTCPEKWINFQRKCYYFGKGTKQWVHARYACDDMEGQLVSIHSPEEQDFLTKHASHTGSWIGLRNLDLKGEFIWVDGSHVDYSNWAPGEPTSRSQGEDCVMMRGSGRWNDAFCDRKLGAWVCDRLATCTPPASEGSAESMGPDSRPDPDGRLPTPSAPLHS

SEQ ID NO: 910206 - protein, 153 aa, Homo sapiens
MEEGQYSEIEELPRRRCCRRGTQIVLLGLVTAALWAGLLTLLLLWREDTPSSMWSPQLMGPFCVPSFTPISELGEPNASSQNPIFPSCLPSCHCQPFPIPHPPEPLTPHPASLSSTLSAPPWLIPKTSIPSWEVGCRQVGALTIPPLHSSSLP

SEQ ID NO: 910207 - protein, 300 aa, Homo sapiens
MEEGQYSEIEELPRRRCCRRGTQIVLLGLVTAALWAGLLTLLLLWHWDTTQSLKQLEERAARNVSQVSKNLESHHGDQMAQKSQSTQISQELEELRAEQQRLKSQELNERNEASDLLERLREEVTKLRMELQVSSGFVCNTCPEKWINFQRKCYYFGKGTKQWVHARYACDDMEGQLVSIHSPEEQDFLTKHASHTGSWIGLRNLDLKGEFIWVDGSHVDYSNWAPGEPTSRSQGEDCVMMRGSGRWNDAFCDRKLGAWVCDRLATCTPPASEGSAESMGPDSRPDPDGRLPTPSAPLHS

SEQ ID NO: 910208 - protein, 321 aa, Homo sapiens; identical to SEQ ID NO: 910205

SEQ ID NO: 910209 - protein, 289 aa, Homo sapiens
MASGTSDLVHAWVLVTSSALILIGLSRLWITPDEHWDTTQSLKQLEERAARNVSQVSKNLESHHGDQMAQKSQSTQISQELEELRAEQQRLKSQELNERNEASDLLERLREEVTKLRMELQVSSGFVCNTCPEKWINFQRKCYYFGKGTKQWVHARYACDDMEGQLVSIHSPEEQDFLTKHASHTGSWIGLRNLDLKGEFIWVDGSHVDYSNWAPGEPTSRSQGEDCVMMRGSGRWNDAFCDRKLGAWVCDRLATCTPPASEGSAESMGPDSRPDPDGRLPTPSAPLHS

SEQ ID NO: 910210 - protein, 202 aa, Homo sapiens
SGRGELRVAAVDMFQVPDSEGGRAGSRAMKPPGGESSNLFGSPEEATPSSRPNRMASNIFGPTEEPQNIPKRTNPPGGKGSGIFDESTPVQTRQHLNPPGGKTSDIFGSPVTATSRLAHPNKPKDHVFLCEGEEPKSDLKAARSIPAGAEPGEKGSARKAGPAKEQEPMPTVDSHEPRLGPRPRSHNKVLNPPGGKSSISFY

SEQ ID NO: 910211 - protein, 202 aa, Homo sapiens; identical to SEQ ID NO: 910210

SEQ ID NO: 910212 - protein, 201 aa, Homo sapiens
RESRSQKQEMAEKMVPDSEGGRAGSRAMKPPGGESSNLFGSPEEATPSSRPNRMASNIFGPTEEPQNIPKRTNPPGGKGSGIFDESTPVQTRQHLNPPGGKTSDIFGSPVTATSRLAHPNKPKDHVFLCEGEEPKSDLKAARSIPAGAEPGEKGSARKAGPAKEQEPMPTVDSHEPRLGPRPRSHNKVLNPPGGKSSISFY

SEQ ID NO: 910213 - protein, 202 aa, Homo sapiens; identical to SEQ ID NO: 910210

SEQ ID NO: 910214 - protein, 82 aa, Homo sapiens
SGRGELRVAAVDMFQVPDSEGGRAGSRAMKPPGGESSNLFGSPEEATPSSRPNRMASNIFGPTEEPQNIPKRTNPPGSCFLM

SEQ ID NO: 910215 - protein, 202 aa, Homo sapiens; identical to SEQ ID NO: 910210

SEQ ID NO: 910216 - protein, 79 aa, Homo sapiens
RESRSQKQEMAEKMVPDSEGGRAGSRAMKPPGGESSNLFGSPEEATPSSRLIGCLGMTERNQNSLSTAAVGWRRRKQKH

SEQ ID NO: 910217 - protein, 202 aa, Homo sapiens; identical to SEQ ID NO: 910210

SEQ ID NO: 910218 - protein, 254 aa, Homo sapiens
SGRGELRVAAVDMFQVPDSEGGRAGSRAMKPPGGESSNLFGSPEEATPSSRPNRMASNIFGPTEEPQNIPKRTNPPGGKGSGIFDESTPVQTRQHLNPPGGKTSDIFGSPVTATSRLAHPNKPKVWTAFRRDSAAAGMPGALSKKAPRQMRHVFRENHGGCRRLSWMQALVIEFGSSPESPRKQSSLVLTEAVGEALLCWWRTPTADGLWRLLTAVLRGAEKRWGAERAADELGPCPSSTLPVSPCRGKVTVLF

SEQ ID NO: 910219 - protein, 209 aa, Homo sapiens
GRAGSRKWQLLTGSLASTSPSLLSGQGPWAPLQRAMKPPGGESSNLFGSPEEATPSSRPNRMASNIFGPTEEPQNIPKRTNPPGGKGSGIFDESTPVQTRQHLNPPGGKTSDIFGSPVTATSRLAHPNKPKDHVFLCEGEEPKSDLKAARSIPAGAEPGEKGSARKAGPAKEQEPMPTVDSHEPRLGPRPRSHNKVLNPPGGKSSISFY

SEQ ID NO: 910220 - protein, 202 aa, Homo sapiens; identical to SEQ ID NO: 910210

SEQ ID NO: 910221 - protein, 202 aa, Homo sapiens; identical to SEQ ID NO: 910210

SEQ ID NO: 910222 - protein, 145 aa, Homo sapiens
SGRGELRVAAVDMFQVPDSEGGRAGSRAMKPPGGESSNLFGSPEEATPSSRPNRMASNIFGPTEEPQNIPKRTNPPGGKGSGIFDESTPVQTRQHLNPPGGKTSDIFGSPVTATSRLAHPNKPKGSHVFISFCPNERGGKRVSLM

SEQ ID NO: 910223 - protein, 202 aa, Homo sapiens; identical to SEQ ID NO: 910210

SEQ ID NO: 910224 - protein, 95 aa, Homo sapiens
SGRGELRVAAVDMFQVPDSEGGRAGSRAMKPPGGESSNLFGSPEEATPSSRPNRMASNIFGPTEEPQNIPKRTNPPVGSAQGFVNQRQLPPFDCL

SEQ ID NO: 910225 - protein, 754 aa, Homo sapiens
MGIKVQRPRCFFDIAINNQPAGRVVFELFSDVCPKTCENFRCLCTGEKGTGKSTQKPLHYKSCLFHRVVKDFMVQGGDFSEGNGRGGESIYGGFFEDESFAVKHNKEFLLSMANRGKDTNGSQFFITTKPTPHLDGHHVVFGQVISGQEVVREIENQKTDAASKPFAEVRILSCGELIPKSKVKKEEKKRHKSSSSSSSSSSDSDSSSDSQSSSDSSDSESATEEKSKKRKKKHRKNSRKHKKEKKKRKKSKKSASSESEAENLEAQPQSTVRPEEIPPIPENRFLMRKSPPKADEKERKNRERERERECNPPNSQPASYQRRLLVTRSGRKIKGRGPRRYRTPSRSRSRDRFRRSETPPHWRQEMQRAQRMRVSSGERWIKGDKSELNEIKENQRSPVRVKERKITDHRNVSESPNRKNEKEKKVKDHKSNSKERDIRRNSEKDDKYKNKVKKRAKSKSRSKSKEKSKSKERDSKHNRNEEKRMRSRSKGRDHENVKEKEKQSDSKGKDQERSRSKEKSKQLESKSNEHDHSKSKEKDRRAQSRSRECDITKGKHSYNSRTRERSRSRDRSRRVRSRTHDRDRSRSKEYHRYREQEYRRRGRSRSRERRTPPGRSRSKDRRRRRRDSRSSEREESQSRNKDKYRNQESKSSHRKENSESEKRMYSKSRDHNSSNNSREKKADRDQSPFSKIKQSSQDNELKSSMLKNKEDEKIRSSVEKENQKSKGQENDHVHEKNKKFDHESSPGTDEDKSG

SEQ ID NO: 910226 - protein, 754 aa, Homo sapiens; identical to SEQ ID NO: 910225

SEQ ID NO: 910227 - protein, 754 aa, Homo sapiens; identical to SEQ ID NO: 910225

SEQ ID NO: 910228 - protein, 540 aa, Homo sapiens
MGIKVQRPRCFFDIAINNQPAGRVVFELFSDVCPKTCENFRCLCTGEKGTGKSTQKPLHYKSCLFHRVVKDFMVQGGDFSEGNGRGGESIYGGFFEDESFAVKHNKEFLLSMANRGKDTNGSQFFITTKPTPHLDGHHVVFGQVISGQEVVREIENQKTDAASKPFAEVRILSCGELIPKSKVKKEEKKRHKSSSSSSSSSSDSDSSSDSQSSSDSSDSESATEEKSKKRKKKHRKNSRKHKKEKKKRKKSKKSASSESEAENLEAQPQSTVRPEEIPPIPENRFLMRKSPPKADEKERKNRERERERECNPPNSQPASYQRRLLVTRSGRKIKGRGPRRYRTPSRSRSRDRFRRSETPPHWRQEMQRAQRMRVSSGERWIKGDKSELNEIKENQRSPVRVKERKITDHRNVSESPNRKNEKEKKVKDHKSNSKERDIRRNSEKDDKYKNKVKKRAKSKSRSKSKEKSKSKERDSKHNRNEEKRMRSRSKGRDHENVKEKEKQSDSKGKDQERSRSKEKSKQLESKSNEHDHSKSKETQL

SEQ ID NO: 910229 - protein, 519 aa, Homo sapiens
MGIKVQRPRCFFDIAINNQPAGRVVFELFSDVCPKTCENFRCLCTGEKGTGKSTQKPLHYKSCLFHRVVKDFMVQGGDFSEGNGRGGESIYGGFFEDESFAVKHNKEFLLSMANRGKDTNGSQFFITTKPTPHLDGHHVVFGQVISGQEVVREIENQKTDAASKPFAEVRILSCGELIPKSKVKKEEKKRHKSSSSSSSSSSDSDSSSDSQSSSDSSDSESATEEKSKKRKKKHRKNSRKHKKEKKKRKKSKKSASSESEAENLEAQPQSTVRPEEIPPIPENRFLMRKSPPKADEKERKNRERERERECNPPNSQPASYQRRLLVTRSGRKIKGRGPRRYRTPSRSRSRDRFRRSETPPHWRQEMQRAQRMRVSSGERWIKGDKSELNEIKENQRSPVRVKERKITDHRNVSESPNRKNEKEKKVKDHKSNSKERDIRRNSEKDDKYKNKVKKRAKSKSRSKSKEKSKSKERDSKHNRNEEKRMRSRSKGRDHENVKEKEKQSDSKGKDQERSRSKEK

SEQ ID NO: 910230 - protein, 699 aa, Homo sapiens
MRELSLSLYSHRVVKDFMVQGGDFSEGNGRGGESIYGGFFEDESFAVKHNKEFLLSMANRGKDTNGSQFFITTKPTPHLDGHHVVFGQVISGQEVVREIENQKTDAASKPFAEVRILSCGELIPKSKVKKEEKKRHKSSSSSSSSSSDSDSSSDSQSSSDSSDSESATEEKSKKRKKKHRKNSRKHKKEKKKRKKSKKSASSESEAENLEAQPQSTVRPEEIPPIPENRFLMRKSPPKADEKERKNRERERERECNPPNSQPASYQRRLLVTRSGRKIKGRGPRRYRTPSRSRSRDRFRRSETPPHWRQEMQRAQRMRVSSGERWIKGDKSELNEIKENQRSPVRVKERKITDHRNVSESPNRKNEKEKKVKDHKSNSKERDIRRNSEKDDKYKNKVKKRAKSKSRSKSKEKSKSKERDSKHNRNEEKRMRSRSKGRDHENVKEKEKQSDSKGKDQERSRSKEKSKQLESKSNEHDHSKSKEKDRRAQSRSRECDITKGKHSYNSRTRERSRSRDRSRRVRSRTHDRDRSRSKEYHRYREQEYRRRGRSRSRERRTPPGRSRSKDRRRRRRDSRSSEREESQSRNKDKYRNQESKSSHRKENSESEKRMYSKSRDHNSSNNSREKKADRDQSPFSKIKQSSQDNELKSSMLKNKEDEKIRSSVEKENQKSKGQENDHVHEKNKKFDHESSPGTDEDKSG

SEQ ID NO: 910231 - protein, 632 aa, Homo sapiens
NALYFRKHNSSLDGHHVVFGQVISGQEVVREIENQKTDAASKPFAEVRILSCGELIPKSKVKKEEKKRHKSSSSSSSSSSDSDSSSDSQSSSDSSDSESATEEKSKKRKKKHRKNSRKHKKEKKKRKKSKKSASSESEAENLEAQPQSTVRPEEIPPIPENRFLMRKSPPKADEKERKNRERERERECNPPNSQPASYQRRLLVTRSGRKIKGRGPRRYRTPSRSRSRDRFRRSETPPHWRQEMQRAQRMRVSSGERWIKGDKSELNEIKENQRSPVRVKERKITDHRNVSESPNRKNEKEKKVKDHKSNSKERDIRRNSEKDDKYKNKVKKRAKSKSRSKSKEKSKSKERDSKHNRNEEKRMRSRSKGRDHENVKEKEKQSDSKGKDQERSRSKEKSKQLESKSNEHDHSKSKEKDRRAQSRSRECDITKGKHSYNSRTRERSRSRDRSRRVRSRTHDRDRSRSKEYHRYREQEYRRRGRSRSRERRTPPGRSRSKDRRRRRRDSRSSEREESQSRNKDKYRNQESKSSHRKENSESEKRMYSKSRDHNSSNNSREKKADRDQSPFSKIKQSSQDNELKSSMLKNKEDEKIRSSVEKENQKSKGQENDHVHEKNKKFDHESSPGTDEDKSG

SEQ ID NO: 910232 - protein, 468 aa, Homo sapiens [sequence omitted]

SEQ ID NO: 910233 - protein, 309 aa, Homo sapiens
MGIKVQRPRCFFDIAINNQPAGRVVFELFSDVCPKTCENFRCLCTGEKGTGKSTQKPLHYKSCLFHRVVKDFMVQGGDFSEGNGRGGESIYGGFFEDESFAVKHNKEFLLSMANRGKDTNGSQFFITTKPTPHLDGHHVVFGQVISGQEVVREIENQKTDAASKPFAEVRILSCGELIPKSKVKKEEKKRHKSSSSSSSSSSDSDSSSDSQSSSDSSDSESATEEKSKKRKKKHRKNSRKHKKEKKKRKKSKKSASSESEAENLEAQPQSTVRPEEIPPIPENRFLMRKSPPKADEKERKNRERERERE

SEQ ID NO: 910234 - protein, 383 aa, Homo sapiens [sequence omitted]

SEQ ID NO: 910235 - protein, 754 aa, Homo sapiens; identical to SEQ ID NO: 910225

SEQ ID NO: 910236 - protein, 754 aa, Homo sapiens; identical to SEQ ID NO: 910225

SEQ ID NO: 910237 - protein, 255 aa, Homo sapiens [sequence omitted]

SEQ ID NO: 910238 - protein, 736 aa, Homo sapiens
MGIKVQRPRCFFDIAINNQPAGRVVFELFSDVCPKTCENFRCLCTGEKGTGKSTQKPLHYKSCLFHRVVKDFMVQGGDFSEGNGRGGESIYGGFFEDESFAVKHNKEFLLSMANRGKDTNGSQFFITTKPTPHLDGHHVVFGQVISGQEVVREIENQKTDAASKPFAEVRILSCGELIPKSKVKKEEKKRHKSSSSSSSSSSDSDSSSDSQSSSDSSDSESATEEKSKKRKKKHRKNSRKHKKEKKKRKKSKKSASSESEAENLEAQPQSTVRPEEIPPIPENRFLMRKSPPKADEKERKNRERERERECNPPNSQPASYQRRLLVTRSGRKDRFRRSETPPHWRQEMQRAQRMRVSSGERWIKGDKSELNEIKENQRSPVRVKERKITDHRNVSESPNRKNEKEKKVKDHKSNSKERDIRRNSEKDDKYKNKVKKRAKSKSRSKSKEKSKSKERDSKHNRNEEKRMRSRSKGRDHENVKEKEKQSDSKGKDQERSRSKEKSKQLESKSNEHDHSKSKEKDRRAQSRSRECDITKGKHSYNSRTRERSRSRDRSRRVRSRTHDRDRSRSKEYHRYREQEYRRRGRSRSRERRTPPGRSRSKDRRRRRRDSRSSEREESQSRNKDKYRNQESKSSHRKENSESEKRMYSKSRDHNSSNNSREKKADRDQSPFSKIKQSSQDNELKSSMLKNKEDEKIRSSVEKENQKSKGQENDHVHEKNKKFDHESSPGTDEDKSG

SEQ ID NO: 910239 - protein, 512 aa, Homo sapiens
MGIKVQRPRCFFDIAINNQPAGRVVFELFSDVCPKTCENFRCLCTGEKGTGKSTQKPLHYKSCLFHRVVKDFMVQGGDFSEGNGRGGESIYGGFFEDESFAVKHNKEFLLSMANRGKDTNGSQFFITTKPTPHLDGHHVVFGQVISGQEVVREIENQKTDAASKPFAEVRILSCGELIPKSKVKKEEKKRHKSSSSSSSSSSDSDSSSDSQSSSDSSDSESATEEKSKKRKKKHRKNSRKHKKEKKKRKKSKKSASSESEAENLEAQPQSTVRPEEIPPIPENRFLMRKSPPKADEKERKNRERERERECNPPNSQPASYQRRLLVTRSGRKIKGRGPRRYRTPSRSRSRDRFRRSETPPHWRQEMQRAQRMRVSSGERWIKGDKSELNEIKENQRSPVRVKERKITDHRNVSESPNRKNEKEKKVKDHKSNSKERDIRRNSEKDDKYKNKVKKRAKSKSRSKSKEKSKSKERDSKHNRNEEKRMRSRSKGRDHENVKEKEKQSDSKGKDQE

SEQ ID NO: 910240 - protein, 357 aa, Homo sapiens
MGIKVQRPRCFFDIAINNQPAGRVVFELFSDVCPKTCENFRCLCTGEKGTGKSTQKPLHYKSCLFHRVVKDFMVQGGDFSEGNGRGGESIYGGFFEDESFAVKHNKEFLLSMANRGKDTNGSQFFITTKPTPHLDGHHVVFGQVISGQEVVREIENQKTDAASKPFAEVRILSCGELIPKSKVKKEEKKRHKSSSSSSSSSSDSDSSSDSQSSSDSSDSESATEEKSKKRKKKHRKNSRKHKKEKKKRKKSKKSASSESEAENLEAQPQSTVRPEEIPPIPENRFLMRKSPPKADEKERKNRERERERECNPPNSQPASYQRRLLVTRSGRKIKGRGPRVGDSFPRDLHNIAFVFLK

SEQ ID NO: 910241 - protein, 438 aa, Homo sapiens
MVRSIENSYFTKVGRSVHRRGPRRYRTPSRSRSRDRFRRSETPPHWRQEMQRAQRMRVSSGERWIKGDKSELNEIKENQRSPVRVKERKITDHRNVSESPNRKNEKEKKVKDHKSNSKERDIRRNSEKDDKYKNKVKKRAKSKSRSKSKEKSKSKERDSKHNRNEEKRMRSRSKGRDHENVKEKEKQSDSKGKDQERSRSKEKSKQLESKSNEHDHSKSKEKDRRAQSRSRECDITKGKHSYNSRTRERSRSRDRSRRVRSRTHDRDRSRSKEYHRYREQEYRRRGRSRSRERRTPPGRSRSKDRRRRRRDSRSSEREESQSRNKDKYRNQESKSSHRKENSESEKRMYSKSRDHNSSNNSREKKADRDQSPFSKIKQSSQDNELKSSMLKNKEDEKIRSSVEKENQKSKGQENDHVHEKNKKFDHESSPGTDEDKSG

SEQ ID NO: 910242 - protein, 371 aa, Homo sapiens
MASELNEIKENQRSPVRVKERKITDHRNVSESPNRKNEKEKKVKDHKSNSKERDIRRNSEKDDKYKNKVKKRAKSKSRSKSKEKSKSKERDSKHNRNEEKRMRSRSKGRDHENVKEKEKQSDSKGKDQERSRSKEKSKQLESKSNEHDHSKSKEKDRRAQSRSRECDITKGKHSYNSRTRERSRSRDRSRRVRSRTHDRDRSRSKEYHRYREQEYRRRGRSRSRERRTPPGRSRSKDRRRRRRDSRSSEREESQSRNKDKYRNQESKSSHRKENSESEKRMYSKSRDHNSSNNSREKKADRDQSPFSKIKQSSQDNELKSSMLKNKEDEKIRSSVEKENQKSKGQENDHVHEKNKKFDHESSPGTDEDKSG

SEQ ID NO: 910243 - protein, 109 aa, Homo sapiens [sequence omitted]

SEQ ID NO: 910244 - protein, 139 aa, Homo sapiens
MNSGHSFSQTPSASFHGAGGGWGRPRSFPRAPTVHGGAGGARISLSFTTRSCPPPGGSWGSGRSSPLLGGNGKATMQNLNDRLASYLEKVRALEEANMKLESRILKWHQSLQKTFPIRNSTGDNGDNPRYFLQGGVPIL

SEQ ID NO: 910245 - protein, 224 aa, Homo sapiens [sequence omitted]

SEQ ID NO: 910246 - protein, 209 aa, Homo sapiens
MEKHHVPSDFNVNVKVDTGPREDLIKVLEDMRQEYELIIKKKHRDLDTWYKEQSAAMSQEAASPATVQSRQGDIHELKRTFQALEIDLQAQYSTKSALENMLSETQSRYSCKLQDMQEIISHYEEELTQLRHELERQNNEYQVLLGIKTHLEKEITTYRRLLEGESEGTREESKSSMKVSATPKIKAITQETINGRLVLCQVNEIQKHA

SEQ ID NO: 910247 - protein, 224 aa, Homo sapiens [sequence omitted]

SEQ ID NO: 910248 - protein, 224 aa, Homo sapiens [sequence omitted]

SEQ ID NO: 910249 - protein, 232 aa, Homo sapiens
LRAGWGSAGCPGPSPPSFYPQGRGERAYDIYSRLLRERIVCVMGPIDDSVASLVIAQLLFLQSESNKKPIHMYINSPGGVVTAGLAIYDTMQYILNPICTWCVGQAASMGSLLLAAGTPGMRHSLPNSRIMIHQPSGGARGQATDIAIQAEEIMKLKKQLYNIYAKHTKQSLQVIESAMERDRYMSPMEAQEFGILDKVLVHPPQDGEDEPTLVQKEPVEAAPAAEPVPAST

SEQ ID NO: 910250 - protein, 68 aa, Homo sapiens
RPPTTTTARIQASNDVRASPESCGGARGLPDPQLGPAHPLLLGLEGPLEELLICRGARYGRGIPAETL

SEQ ID NO: 910251 - protein, 277 aa, Homo sapiens
MWPGILVGGARVASCRYPALGPRLAAHFPAQRPPQRTLQNGLALQRCLHATATRALPLIPIVVEQTGRGERAYDIYSRLLRERIVCVMGPIDDSVASLVIAQLLFLQSESNKKPIHMYINSPGGVVTAGLAIYDTMQYILNPICTWCVGQAASMGSLLLAAGTPGMRHSLPNSRIMIHQPSGGARGQATDIAIQAEEIMKLKKQLYNIYAKHTKQSLQVIESAMERDRYMSPMEAQEFGILDKVLVHPPQDGEDEPTLVQKEPVEAAPAAEPVPAST

SEQ ID NO: 910252 - protein, 248 aa, Homo sapiens
NRLGTRLRVESAEADGSRRGVRRDVALPLIPIVVEQTGRGERAYDIYSRLLRERIVCVMGPIDDSVASLVIAQLLFLQSESNKKPIHMYINSPGGVVTAGLAIYDTMQYILNPICTWCVGQAASMGSLLLAAGTPGMRHSLPNSRIMIHQPSGGARGQATDIAIQAEEIMKLKKQLYNIYAKHTKQSLQVIESAMERDRYMSPMEAQEFGILDKVLVHPPQDGEDEPTLVQKEPVEAAPAAEPVPAST

SEQ ID NO: 910253 - protein, 136 aa, Homo sapiens
MTALPALLSHSSSSCNPRATRSPSTCTSTALSRIMIHQPSGGARGQATDIAIQAEEIMKLKKQLYNIYAKHTKQSLQVIESAMERDRYMSPMEAQEFGILDKVLVHPPQDGEDEPTLVQKEPVEAAPAAEPVPAST

SEQ ID NO: 910254 - protein, 242 aa, Homo sapiens
MWPGILVGGARVASCRYPALGPRLAAHFPAQRPPQRTLQNGLALQRCLHATATRALPLIPIVVEQTGRGERAYDIYSRLLRERIVCVMGPIDDSVASLVIAQLLFLQSESNKKPIHMYINSPGGVVTAGLAIYDTMQYILNPICTWCVGQAASMGSLLLAAGTPGMRHSLPNSRIMIHQPSGGARGQATDIAIQAEEIMKLKKQLYNIYAKHTKQSLQVIESAMERCRMTRADGSNSRHLQT

SEQ ID NO: 910255 - protein, 136 aa, Homo sapiens; identical to SEQ ID NO: 910253

SEQ ID NO: 910256 - protein, 193 aa, Homo sapiens
MWPGILVGGARVASCRYPALGPRLAAHFPAQRPPQRTLQNGLALQRCLHATATRALPLIPIVVEQTGRGERAYDIYSRLLRERIVCVMGPIDDSVASLVIAQLLFLQSESNKKPIHMYINSPGGVVTAGLAIYDTMQYILNPGFPNAQRSTKDWPGRMWRRLLLPLMIRHRYVELCRSQSRAPLNLNVGPALS

SEQ ID NO: 910257 - protein, 277 aa, Homo sapiens; identical to SEQ ID NO: 910251

SEQ ID NO: 910258 - protein, 277 aa, Homo sapiens; identical to SEQ ID NO: 910251

SEQ ID NO: 910259 - protein, 161 aa, Homo sapiens [sequence omitted]

SEQ ID NO: 910260 - protein, 143 aa, Homo sapiens
MWPGILVGGARVASCRYPALGPRLAAHFPAQRPPQRTLQNGLALQRCLHATATRALPLIPIVVEQTGRGERAYDIYSRLLRERIVCVMGPIDDSVASLVIAQLLFLQSESNKKPIHMYINSPGPSHRHCHPGRGDHEAQEAAL

SEQ ID NO: 910261 - protein, 171 aa, Homo sapiens
MWPGILVGGARVASCRYPALGPRLAAHFPAQRPPQRTLQNGLALQRCLHATATRALPLIPIVVEQTGRGERAYDIYSRLLRERIVCVMGPIDDSVASLVIAQLLFLQSESNKKPIHMYINSPGGVVTAGLAIYDTMQYILNPPQDGEDEPTLVQKEPVEAAPAAEPVPAST

SEQ ID NO: 910262 - protein, 127 aa, Homo sapiens
MWPGILVGGARVASCRYPALGPRLAAHFPAQRPPQRTLQNGLALQRCLHATATRALPLIPIVVEQTGRGERAYDIYSRLLRERIVCVMGPVSAPRRDPPQDSPKRLPTLPAPLLPWPQTFPQAPLPF

SEQ ID NO: 910263 - protein, 503 aa, Homo sapiens
VSASALPWSSPPWRGRRVGMAAGGDHGSPDSYRSPLASRYASPEMCFVFSDRYKFRTWRQLWLWLAEAEQTLGLPITDEQIQEMKSNLENIDFKMAAEEEKRLRHDVMAHVHTFGHCCPKAAGIIHLGATSCYVGDNTDLIILRNALDLLLPKLARVISRLADFAKERASLPTLGFTHFQPAQLTTVGKRCCLWIQDLCMDLQNLKRVRDDLRFRGVKGTTGTQASFLQLFEGDDHKVEQLDKMVTEKAGFKRAFIITGQTYTRKVDIEVLSVLASLGASVHKICTDIRLLANLKEMEEPFEKQQIGSSAMPYKRNPMRSERCCSLARHLMTLVMDPLQTASVQWFERTLDDSANRRICLAEAFLTADTILNTLQNISEGLVVYPKVIERRIRQELPFMATENIIMAMVKAGGSRQDCHEKIRVLSQQAASVVKQEGGDNDLIERIQVDAYFSPIHSQLDHLLDPSSFTGRASQQVQRFLEEEVYPLLKPYESVMKVKAELCL

SEQ ID NO: 910264 - protein, 503 aa, Homo sapiens; identical to SEQ ID NO: 910263

SEQ ID NO: 910265 - protein, 496 aa, Homo sapiens
VSASALPWSSPPWRGRRVGMAAGGDHGSPDSYRSPLASRYASPEMCFVFSDRYKFRTWRQLWLWLAEAEQTLGLPITDEQIQEMKSNLENIDFKMAAEEEKRLRHDVMAHVHTFGHCCPKAAGIIHLGATSCYVGDNTDLIILRNALDLLLPKLARVISRLADFAKERASLPTLGFTHFQPAQLTTVGKRCCLWIQDLCMDLQNLKRVRDDLRFRGVKGTTGTQASFLQLFEGDDHKVEQLDKMVTEKAGFKRAFIITGQTYTRKVDIEVLSVLASLGASVHKICTDIRLLANLKEMEEPFEKQQIGSSAMPYKRNPMRSERCCSLARHLMTLVMDPLQTASVQWFERTLDDSANRRICLAEAFLTADTILNTLQNISEGLVVYPKVIERRIRQELPFMATENIIMAMVKAGGSRQDCHEKIRVLSQQAASVVKQEGGDNDLIERIQVDAYFSPIHSQLDHLLDPSSFTGRASQQLQRFLEEVLWSPPTPSCKRVS

SEQ ID NO: 910266 - protein, 444 aa, Homo sapiens
VSASALPWSSPPWRGRRVGMAAGGDHGSPDSYRSPLASRYASPEMCFVFSDRYKFRTWRQLWLWLAEAEQTLGLPITDEQIQEMKSNLENIDFKMAAEEEKRLRHDVMAHVHTFGHCCPKAAGIIHLGATSCYVGDNTDLIILRNALDLLLPKLARVISRLADFAKERASLPTLGFTHFQPAQLTTVGKRCCLWIQDLCMDLQNLKRVRDDLRFRGVKGTTGTQASFLQLFEGDDHKVEQLDKMVTEKAGFKRAFIITGQTYTRKVDIEVLSVLASLGASVHKICTDIRLLANLKEMEEPFEKQQIGSSAMPYKRNPMRSERCCSLARHLMTLVMDPLQTASVQWFERTLDDSANRRICLAEAFLTADTILNTLQNISEGLVVYPKVIERRIRQELPFMATENIIMAMVKAGGSRQVQRFLEEEVYPLLKPYESVMKVKAELCL

SEQ ID NO: 910267 - protein, 488 aa, Homo sapiens
VSASALPWSSPPWRGRRVGMAAGGDHGSPDSYRSPLASRYASPEMCFVFSDRYKFRTWRQLWLWLAEAEQTLGLPITDEQIQEMKSNLENIDFKMAAEEEKRLRHDVMAHVHTFGHCCPKAAGIIHLGATSCYVGDNTLARVISRLADFAKERASLPTLGFTHFQPAQLTTVGKRCCLWIQDLCMDLQNLKRVRDDLRFRGVKGTTGTQASFLQLFEGDDHKVEQLDKMVTEKAGFKRAFIITGQTYTRKVDIEVLSVLASLGASVHKICTDIRLLANLKEMEEPFEKQQIGSSAMPYKRNPMRSERCCSLARHLMTLVMDPLQTASVQWFERTLDDSANRRICLAEAFLTADTILNTLQNISEGLVVYPKVIERRIRQELPFMATENIIMAMVKAGGSRQDCHEKIRVLSQQAASVVKQEGGDNDLIERIQVDAYFSPIHSQLDHLLDPSSFTGRASQQVQRFLEEEVYPLLKPYESVMKVKAELCL

SEQ ID NO: 910268 - protein, 304 aa, Homo sapiens
MDLQNLKRVRDDLRFRGVKGTTGTQASFLQLFEGDDHKVEQLDKMVTEKAGFKRAFIITGQTYTRKVDIEVLSVLASLGASVHKICTDIRLLANLKEMEEPFEKQQIGSSAMPYKRNPMRSERCCSLARHLMTLVMDPLQTASVQWFERTLDDSANRRICLAEAFLTADTILNTLQNISEGLVVYPKVIERRIRQELPFMATENIIMAMVKAGGSRQDCHEKIRVLSQQAASVVKQEGGDNDLIERIQVDAYFSPIHSQLDHLLDPSSFTGRASQQVQRFLEEEVYPLLKPYESVMKVKAELCL

SEQ ID NO: 910269 - protein, 329 aa, Homo sapiens
MLETILPAQLTTVGKRCCLWIQDLCMDLQNLKRVRDDLRFRGVKGTTGTQASFLQLFEGDDHKVEQLDKMVTEKAGFKRAFIITGQTYTRKVDIEVLSVLASLGASVHKICTDIRLLANLKEMEEPFEKQQIGSSAMPYKRNPMRSERCCSLARHLMTLVMDPLQTASVQWFERTLDDSANRRICLAEAFLTADTILNTLQNISEGLVVYPKVIERRIRQELPFMATENIIMAMVKAGGSRQDCHEKIRVLSQQAASVVKQEGGDNDLIERIQVDAYFSPIHSQLDHLLDPSSFTGRASQQVQRFLEEEVYPLLKPYESVMKVKAELCL

SEQ ID NO: 910270 - protein, 292 aa, Homo sapiens
VSASALPWSSPPWRGRRVGMAAGGDHGSPDSYRSPLASRYASPEMCFVFSDRYKFRTWRQLWLWLAEAEQTLGLPITDEQIQEMKSNLENIDFKMAAEEEKRLRHDVMAHVHTFGHCCPKAAGIIHLGATSCYVGDNTDLIILRNALDLLLPKLARVISRLADFAKERASLPTLGFTHFQPAQLTTVGKRCCLWIQDLCMDLQNLKRVRDDLRFRGVKGTTGTQASFLQLFEGDDHKVEQLDKMVTEKAGFKRAFIITGQTYTRKVDIEVLSVLASLGASVHKNCTATLLAT

SEQ ID NO: 910271 - protein, 157 aa, Homo sapiens
PTWLLVMEILNVTLVPYGNAQEQNVSGRWEFKCQHGEEECKFNKVDIEESKVHSSISTIMAMVKAGGSRQDCHEKIRVLSQQAASVVKQEGGDNDLIERIQVDAYFSPIHSQLDHLLDPSSFTGRASQQVQRFLEEEVYPLLKPYESVMKVKAELCL

SEQ ID NO: 910272 - protein, 444 aa, Homo sapiens; identical to SEQ ID NO: 910266

SEQ ID NO: 910273 - protein, 375 aa, Homo sapiens
VSASALPWSSPPWRGRRVGMAAGGDHGSPDSYRSPLASRYASPEMCFVFSDRYKFRTWRQLWLWLAEAEQTLGLPITDEQIQEMKSNLENIDFKMAAEEEKRLRHDVMAHVHTFGHCCPKAAGIIHLGATSCYVGDNTDLIILRNALDLLLPKLARVISRLADFAKERASLPTLGFTHFQPAQLTTVGKRCCLWIQDLCMDLQNLKRVRDDLRFRGVKGTTGTQASFLQLFEGDDHKVEQLDKMVTEKAGFKRAFIITGQTYTRKVDIEVLSVLASLGASVHKICTDIRLLANLKEMEEPFEKQQIGSSAMPYKRNPMRSERCCSLARHLMTLVMDPLQTASVQWFERTLDDSANRSVAQGHHIHQVEWRSEGGT

SEQ ID NO: 910274 - protein, 497 aa, Homo sapiens
VSASALPWSSPPWRGRRVGMAAGGDHGSPDSYRSPLASRYASPEMCFVFSDRYKFRTWRQLWLWLAEAEQTLGLPITDEQIQEMKSNLENIDFKMAAEEEKRLRHDVMAHVHTFGHCCPKAAGIIHLGATSCYVGDNTDLIILRNALDLLLPKLARVISRLADFAKERASLPTLGFTHFQPAQLTTVGKRCCLWIQDLCMDLQNLKRVRDDLRFRGVKGTTGTQASFLQLFEGDDHKVEQLDKMVTEKAGFKRAFIITGQTYTRKVDIEVLSVLASLGASVHKICRIASGNSGMGTLKTECSSAMPYKRNPMRSERCCSLARHLMTLVMDPLQTASVQWFERTLDDSANRRICLAEAFLTADTILNTLQNISEGLVVYPKVIERRIRQELPFMATENIIMAMVKAGGSRQDCHEKIRVLSQQAASVVKQEGGDNDLIERIQVDAYFSPIHSQLDHLLDPSSFTGRASQQVQRFLEEEVYPLLKPYESVMKVKAELCL

SEQ ID NO: 910275 - protein, 332 aa, Homo sapiens
MHLTCFCQRPAQLTTVGKRCCLWIQDLCMDLQNLKRVRDDLRFRGVKGTTGTQASFLQLFEGDDHKVEQLDKMVTEKAGFKRAFIITGQTYTRKVDIEVLSVLASLGASVHKICTDIRLLANLKEMEEPFEKQQIGSSAMPYKRNPMRSERCCSLARHLMTLVMDPLQTASVQWFERTLDDSANRRICLAEAFLTADTILNTLQNISEGLVVYPKVIERRIRQELPFMATENIIMAMVKAGGSRQDCHEKIRVLSQQAASVVKQEGGDNDLIERIQVDAYFSPIHSQLDHLLDPSSFTGRASQQVQRFLEEEVYPLLKPYESVMKVKAELCL

SEQ ID NO: 910276 - protein, 335 aa, Homo sapiens
VSASALPWSSPPWRGRRVGMAAGGDHGSPDSYRSPLASRYASPEMCFVFSDRYKFRTWRQLWLWLAEAEQTLGLPITDEQIQEMKSNLENIDFKMAAEEEKRLRHDVMAHVHTFGHCCPKAAGIIHLGATSCYVGDNTDLIILRNALDLLLPKLARVISRLADFAKERASLPTLGFTHFQPAQLTTVGKRCCLWIQDLCMDLQNLKRVRDDLRFRGVKGTTGTQASFLQLFEGDDHKVEQLDKMVTEKAGFKRAFIITGQTYTRKVDIEVLSVLASLGASVHKICRIASGNSGMGDLENRMVRGAKKEPVSNVGCPGTLAQNFSVGRVCPAGEPH

SEQ ID NO: 910277 - protein, 283 aa, Homo sapiens
VSASALPWSSPPWRGRRVGMAAGGDHGSPDSYRSPLASRYASPEMCFVFSDRYKFRTWRQLWLWLAEAEQTLGLPITDEQIQEMKSNLENIDFKMAAEEEKRLRHDVMAHVHTFGHCCPKAAGIIHLGATSCYVGDNTDLIILRNALDLLLPKLARVISRLADFAKERASLPTLGFTHFQPAQLTTVGKRCCLWIQDCHEKIRVLSQQAASVVKQEGGDNDLIERIQVDAYFSPIHSQLDHLLDPSSFTGRASQQVQRFLEEEVYPLLKPYESVMKVKAELCL

SEQ ID NO: 910278 - protein, 197 aa, Homo sapiens
GGAAGVSRRCNLLRRRPREPADPGLVAKSDVVTRIKTEEGEEAGGQKRQWQQRPEQPQPSGSSRRSFCRASVPAPILPAPSVVVWADLNSQVKSSWVIMAEGGFDPCECVCSHEHAMRRLINLLRQSQSYCTDTECLQELPGPSGDNGISVTMILVAWMVIALILFLLRPPNLRGSSLPGKPTSPHNGQDPPAPPVD

SEQ ID NO: 910279 - protein, 197 aa, Homo sapiens; identical to SEQ ID NO: 910278

SEQ ID NO: 910280 - protein, 197 aa, Homo sapiens; identical to SEQ ID NO: 910278

SEQ ID NO: 910281 - protein, 197 aa, Homo sapiens; identical to SEQ ID NO: 910278

SEQ ID NO: 910282 - protein, 197 aa, Homo sapiens; identical to SEQ ID NO: 910278

SEQ ID NO: 910283 - protein, 197 aa, Homo sapiens; identical to SEQ ID NO: 910278

SEQ ID NO: 910284 - protein, 197 aa, Homo sapiens; identical to SEQ ID NO: 910278

SEQ ID NO: 910285 - protein, 136 aa, Homo sapiens
GGAAGVSRRCNLLRRRPREPADPGLVAKSDVVTRIKTEEGEEAGGQKRQWQQRPEQPQPSGSSRRSFCRASVPAPILPAPSVVVWADLNSQVKSSWVIMAEGGFDPCECVCSHEHAMRRLINLYRDPLVIMASVLQ

SEQ ID NO: 910286 - protein, 133 aa, Homo sapiens
GGAAGVSRRCNLLRRRPREPADPGLVAKSDVVTRIKTEEGEEAGGQKRQWQQRPEQPQPSGSSRRSFCRASVPAPILPAPSVVVWADLNSQVKSSWVIMAEGGFDPCECVCSHEHAMRRLINLGQDPPAPPVD

SEQ ID NO: 910287 - protein, 197 aa, Homo sapiens; identical to SEQ ID NO: 910278

SEQ ID NO: 910288 - protein, 63 aa, Homo sapiens
MGSPRSIGETPLLGNWDRRRCTSRGREEAVSTKRAGFDRDRNATLNGEHNNRSTAGDTFLFAL

SEQ ID NO: 910289 - protein, 197 aa, Homo sapiens; identical to SEQ ID NO: 910278

SEQ ID NO: 910290 - protein, 197 aa, Homo sapiens; identical to SEQ ID NO: 910278

SEQ ID NO: 910291 - protein, 197 aa, Homo sapiens; identical to SEQ ID NO: 910278

SEQ ID NO: 910292 - protein, 148 aa, Homo sapiens
GGAAGVSRRCNLLRRRPREPADPGLVAKSDVVTRIKTDLNSQVKSSWVIMAEGGFDPCECVCSHEHAMRRLINLLRQSQSYCTDTECLQELPGPSGDNGISVTMILVAWMVIALILFLLRPPNLRGSSLPGKPTSPHNGQDPPAPPVD

SEQ ID NO: 910293 - protein, 152 aa, Homo sapiens
GGAAGVSRRCNLLRRRPREPADPGLVAKSDVVTRIKTEEGEEAGGQKRQWQQRPEQPQPSGSSRRSFCRASVPAPILPAPSVVVWADLNSQVKSSWVIMAEGGFDPCECVCSHEHAMRRLINLLRQSQSYCTDTECLQEWTRSTSSSCGLTL

SEQ ID NO: 910294 - protein, 197 aa, Homo sapiens; identical to SEQ ID NO: 910278

SEQ ID NO: 910295 - protein, 243 aa, Homo sapiens
TIGRYEAAVKETPCRGLGSPCPLPVSHLAAVCNPPAPPAGLDVLSLSLAPGACFRNSPHLCVLCFAVIRAKAVSEKEVDSGNDIYGNPIKRIQYEIKQIKMFKGPEKDIEFIYTAPSSAVCGVSLDVGGKKEYLIAGKAEGDGKMHITLCDFIVPWDTLSTTQKKSLNHRYQMGCECKITRCPMIPCYISSPDECLWMDWVTEKNINGHQAKFFACIKRSDGSCAWYRGAAPPKQEFLDIEDP

SEQ ID NO: 910296 - protein, 143 aa, Homo sapiens
MFKGPEKDIEFIYTAPSSAVCGVSLDVGGKKEYLIAGKAEGDGKMHITLCDFIVPWDTLSTTQKKSLNHRYQMGCECKITRCPMIPCYISSPDECLWMDWVTEKNINGHQAKFFACIKRSDGSCAWYRGAAPPKQEFLDIEDP

SEQ ID NO: 910297 - protein, 117 aa, Homo sapiens
SSVIPVYLIAGKAEGDGKMHITLCDFIVPWDTLSTTQKKSLNHRYQMGCECKITRCPMIPCYISSPDECLWMDWVTEKNINGHQAKFFACIKRSDGSCAWYRGAAPPKQEFLDIEDP

SEQ ID NO: 910298 - protein, 127 aa, Homo sapiens
KQLGPHRSQDVGGKKEYLIAGKAEGDGKMHITLCDFIVPWDTLSTTQKKSLNHRYQMGCECKITRCPMIPCYISSPDECLWMDWVTEKNINGHQAKFFACIKRSDGSCAWYRGAAPPKQEFLDIEDP

SEQ ID NO: 910299 - protein, 220 aa, Homo sapiens
MGAAARTLRLALGLLLLATLLRPADACSCSPVHPQQAFCNADVVIRAKAVSEKEVDSGNDIYGNPIKRIQYEIKQIKMFKGPEKDIEFIYTAPSSAVCGVSLDVGGKKEYLIAGKAEGDGKMHITLCDFIVPWDTLSTTQKKSLNHRYQMGCECKITRCPMIPCYISSPDECLWMDWVTEKNINGHQAKFFACIKRSDGSCAWYRGAAPPKQEFLDIEDP

SEQ ID NO: 910300 - protein, 220 aa, Homo sapiens; identical to SEQ ID NO: 910299

SEQ ID NO: 910301 - protein, 220 aa, Homo sapiens; identical to SEQ ID NO: 910299

SEQ ID NO: 910302 - protein, 220 aa, Homo sapiens; identical to SEQ ID NO: 910299

SEQ ID NO: 910303 - protein, 220 aa, Homo sapiens; identical to SEQ ID NO: 910299

SEQ ID NO: 910304 - protein, 220 aa, Homo sapiens; identical to SEQ ID NO: 910299

SEQ ID NO: 910305 - protein, 220 aa, Homo sapiens; identical to SEQ ID NO: 910299

SEQ ID NO: 910306 - protein, 220 aa, Homo sapiens; identical to SEQ ID NO: 910299

SEQ ID NO: 910307 - protein, 220 aa, Homo sapiens; identical to SEQ ID NO: 910299

SEQ ID NO: 910308 - protein, 243 aa, Homo sapiens
GWASSLSLEEETPCRGLGSPCPLPVSHLAAVCNPPAPPAGLDVLSLSLAPGACFRNSPHLCVLCFAVIRAKAVSEKEVDSGNDIYGNPIKRIQYEIKQIKMFKGPEKDIEFIYTAPSSAVCGVSLDVGGKKEYLIAGKAEGDGKMHITLCDFIVPWDTLSTTQKKSLNHRYQMGCECKITRCPMIPCYISSPDECLWMDWVTEKNINGHQAKFFACIKRSDGSCAWYRGAAPPKQEFLDIEDP

SEQ ID NO: 910309 - protein, 177 aa, Homo sapiens
MIRAKAVSEKEVDSGNDIYGNPIKRIQYEIKQIKMFKGPEKDIEFIYTAPSSAVCGVSLDVGGKKEYLIAGKAEGDGKMHITLCDFIVPWDTLSTTQKKSLNHRYQMGCECKITRCPMIPCYISSPDECLWMDWVTEKNINGHQAKFFACIKRSDGSCAWYRGAAPPKQEFLDIEDP

SEQ ID NO: 910310 - protein, 115 aa, Homo sapiens
MLWRPAGWERAVPVDVALLPAGVLGTTALPLAHCLLAWPVIRAKAVSEKEVDSGNDIYGNPIKRIQYEIKQIKMFKGPEKDIEFIYTAPSSAVCGVSLDVGGKKEYLIADAHHPL

SEQ ID NO: 910311 - protein, 220 aa, Homo sapiens; identical to SEQ ID NO: 910299

SEQ ID NO: 910312 - protein, 220 aa, Homo sapiens; identical to SEQ ID NO: 910299

SEQ ID NO: 910313 - protein, 220 aa, Homo sapiens; identical to SEQ ID NO: 910299

SEQ ID NO: 910314 - protein, 220 aa, Homo sapiens; identical to SEQ ID NO: 910299

SEQ ID NO: 910315 - protein, 220 aa, Homo sapiens; identical to SEQ ID NO: 910299

SEQ ID NO: 910316 - protein, 85 aa, Homo sapiens
SLQRQGSLQRQGSLQRQGSLQRQGSLQRQGSVEHWSCLDSPALWSYPGIPWRLQNLDAAVFYSTYFCQIGKETLSHRILKNWRLQ

SEQ ID NO: 910317 - protein, 135 aa, Homo sapiens [sequence omitted]

SEQ ID NO: 910318 - protein, 457 aa, Homo sapiens [sequence omitted]

SEQ ID NO: 910319 - protein, 439 aa, Homo sapiens
MQTVKKEQASLDASSNVDKMMVLNSALTEVSEDSTTGEELLLSEGSVGKNKSSACRRKREFIPDEKKDAMYWEKRRKNNEAAKRSREKRRLNDLVLENKLIALGEENATLKAELLSLKLKFGLISSTAYAQEIQKLSNSTAVYFQDYQTSKSNVSSFVDEHEPSMVSSSCISVIKHSPQSSLSDVSEVSSVEHTQESSVQGSCRSPENKFQIIKQEPMELESYTREPRDDRGSYTASIYQNYMGNSFSGYSHSPPLLQVNRSSSNSPRTSETDDGVVGKSSDGEDEQQVPKGPIHSPVELKHVHATVVKVPEVNSSALPHKLRIKAKAMQIKVEAFDNEFEATQKLSSPIDMTSKRHFELEKHSAPSMVHSSLTPFSVQVTNIQDWSLKSEHWHQKELSGKTQNSFNLYLKQGIANLSAEVVSLKRLIATQPISASDSG

SEQ ID NO: 910320 - protein, 457 aa, Homo sapiens [sequence omitted]

SEQ ID NO: 910321 - protein, 439 aa, Homo sapiens; identical to SEQ ID NO: 910319

SEQ ID NO: 910322 - protein, 1395 aa, Homo sapiens
MDTKLMCLLFFFSLPPLLVSNHTGRIKVVFTPSICKVTCTKGSCQNSCEKGNTTTLISENGHAADTLTATNFRVVICHLPCMNGGQCSSRDKCQCPPNFTGKLCQIPVHGASVPKLYQHSQQPGKALGTHVIHSTHTLPLTVTSQQGVKVKFPPNIVNIHVKHPPEASVQIHQVSRIDGPTGQKTKEAQPGQSQVSYQGLPVQKTQTIHSTYSHQQVIPHVYPVAAKTQLGRCFQETIGSQCGKALPGLSKQEDCCGTVGTSWGFNKCQKCPKKPSYHGYNQMMECLPGYKRVNNTFCQDINECQLQGVCPNGECLNTMGSYRCTCKIGFGPDPTFSSCVPDPPVISEEKGPCYRLVSSGRQCMHPLSVHLTKQLCCCSVGKAWGPHCEKCPLPGTAAFKEICPGGMGYTVSGVHRRRPIHHHVGKGPVFVKPKNTQPVAKSTHPPPLPAKEEPVEALTFSREHGPGVAEPEVATAPPEKEIPSLDQEKTKLEPGQPQLSPGISTIHLHPQFPVVIEKTSPPVPVEVAPEASTSSASQVIAPTQVTEINECTVNPDICGAGHCINLPVRYTCICYEGYRFSEQQRKCVDIDECTQVQHLCSQGRCENTEGSFLCICPAGFMASEEGTNCIDVDECLRPDVCGEGHCVNTVGAFRCEYCDSGYRMTQRGRCEDIDECLNPSTCPDEQCVNSPGSYQCVPCTEGFRGWNGQCLDVDECLEPNVCANGDCSNLEGSYMCSCHKGYTRTPDHKHCRDIDECQQGNLCVNGQCKNTEGSFRCTCGQGYQLSAAKDQCEDIDECQHRHLCAHGQCRNTEGSFQCVCDQGYRASGLGDHCEDINECLEDKSVCQRGDCINTAGSYDCTCPDGFQLDDNKTCQDINECEHPGLCGPQGECLNTEGSFHCVCQQGFSISADGRTCEDIDECVNNTVCDSHGFCDNTAGSFRCLCYQGFQAPQDGQGCVDVNECELLSGVCGEAFCENVEGSFLCVCADENQEYSPMTGQCRSRTSTDLDVDVDQPKEEKKECYYNLNDASLCDNVLAPNVTKQECCCTSGAGWGDNCEIFPCPVLGTAEFTEMCPKGKGFVPAGESSSEAGGENYKDADECLLFGQEICKNGFCLNTRPGYECYCKQGTYYDPVKLQCFDMDECQDPSSCIDGQCVNTEGSYNCFCTHPMVLDASEKRCIRPAESNEQIEETDVYQDLCWEHLSDEYVCSRPLVGKQTTYTECCCLYGEAWGMQCALCPLKDSDDYAQLCNIPVTGRRQPYGRDALVDFSEQYTPEADPYFIQDRFLNSFEELQAEECGILNGCENGRCVRVQEGYTCDCFDGYHLDTAKMTCVDVNECDELNNRMSLCKNAKCINTDGSYKCLCLPGYVPSDKPNYCTPLNTALNLEKDSDLE

SEQ ID NO: 910323 - protein, 656 aa, Homo sapiens
SRGSRMRQDKHCRDIDECQQGNLCVNGQCKNTEGSFRCTCGQGYQLSAAKDQCEDIDECQHRHLCAHGQCRNTEGSFQCVCDQGYRASGLGDHCEDINECLEDKSVCQRGDCINTAGSYDCTCPDGFQLDDNKTCQDINECEHPGLCGPQGECLNTEGSFHCVCQQGFSISADGRTCEDIDECVNNTVCDSHGFCDNTAGSFRCLCYQGFQAPQDGQGCVDVNECELLSGVCGEAFCENVEGSFLCVCADENQEYSPMTGQCRSRTSTDLDVDVDQPKEEKKECYYNLNDASLCDNVLAPNVTKQECCCTSGAGWGDNCEIFPCPVLGTAEFTEMCPKGKGFVPAGESSSEAGGENYKDADECLLFGQEICKNGFCLNTRPGYECYCKQGTYYDPVKLQCFDMDECQDPSSCIDGQCVNTEGSYNCFCTHPMVLDASEKRCIRPAESNEQIEETDVYQDLCWEHLSDEYVCSRPLVGKQTTYTECCCLYGEAWGMQCALCPLKDSDDYAQLCNIPVTGRRQPYGRDALVDFSEQYTPEADPYFIQDRFLNSFEELQAEECGILNGCENGRCVRVQEGYTCDCFDGYHLDTAKMTCVDVNECDELNNRMSLCKNAKCINTDGSYKCLCLPGYVPSDKPNYCTPLNTALNLEKDSDLE

SEQ ID NO: 910324 - protein, 1353 aa, Homo sapiens
MDTKLMCLLFFFSLPPLLVSNHTGRIKVVFTPSICKVTCTKGSCQNSCEKGNTTTLISENGHAADTLTATNFRVVICHLPCMNGGQCSSRDKCQCPPNFTGKLCQIPVHGASVPKLYQHSQQPGKALGTHVIHSTHTLPLTVTSQQGVKVKFPPNIVNIHVKHPPEASVQIHQVSRIDGPTGQKTKEAQPGQSQVSYQGLPVQKTQTIHSTYSHQQVIPHVYPVAAKTQLGRCFQETIGSQCGKALPGLSKQEDCCGTVGTSWGFNKCQKCPKKPSYHGYNQMMECLPGYKRVNNTFCQDINECQLQGVCPNGECLNTMGSYRCTCKIGFGPDPTFSSCVPDPPVISEEKGPCYRLVSSGRQCMHPLSVHLTKQLCCCSVGKAWGPHCEKCPLPGTAAFKEICPGGMGYTVSGVHRRRPIHHHVGKGPVFVKPKNTQPVAKSTHPPPLPAKEEPVEALTFSREHGPGVAEPEVATAPPEKEIPSLDQEKTKLEPGQPQLSPGISTIHLHPQFPVVIEKTSPPVPVEVAPEASTSSASQVIAPTQVTEINECTVNPDICGAGHCINLPVRYTCICYEGYRFSEQQRKCVDIDECTQVQHLCSQGRCENTEGSFLCICPAGFMASEEGTNCIDVDECLRPDVCGEGHCVNTVGAFRCEYCDSGYRMTQRGRCEDIDECLNPSTCPDEQCVNSPGSYQCVPCTEGFRGWNGQCLDVDECLEPNVCANGDCSNLEGSYMCSCHKGYTRTPDHKHCRDIDECQQGNLCVNGQCKNTEGSFRCTCGQGYQLSAAKDQCEDIDECQHRHLCAHGQCRNTEGSFQCVCDQGYRASGLGDHCEDINECLEDKSVCQRGDCINTAGSYDCTCPDGFQLDDNKTCQDINECEHPGLCGPQGECLNTEGSFHCVCQQGFSISADGRTCEDVNECELLSGVCGEAFCENVEGSFLCVCADENQEYSPMTGQCRSRTSTDLDVDVDQPKEEKKECYYNLNDASLCDNVLAPNVTKQECCCTSGAGWGDNCEIFPCPVLGTAEFTEMCPKGKGFVPAGESSSEAGGENYKDADECLLFGQEICKNGFCLNTRPGYECYCKQGTYYDPVKLQCFDMDECQDPSSCIDGQCVNTEGSYNCFCTHPMVLDASEKRCIRPAESNEQIEETDVYQDLCWEHLSDEYVCSRPLVGKQTTYTECCCLYGEAWGMQCALCPLKDSDDYAQLCNIPVTGRRQPYGRDALVDFSEQYTPEADPYFIQDRFLNSFEELQAEECGILNGCENGRCVRVQEGYTCDCFDGYHLDTAKMTCVDVNECDELNNRMSLCKNAKCINTDGSYKCLCLPGYVPSDKPNYCTPLNTALNLEKDSDLE

SEQ ID NO: 910325 - protein, 1395 aa, Homo sapiens; identical to SEQ ID NO: 910322

SEQ ID NO: 910326 - protein, 431 aa, Homo sapiens
FFGLIYIYIYICENVEGSFLCVCADENQEYSPMTGQCRSRTSTDLDVDVDQPKEEKKECYYNLNDASLCDNVLAPNVTKQECCCTSGAGWGDNCEIFPCPVLGTAEFTEMCPKGKGFVPAGESSSEAGGENYKDADECLLFGQEICKNGFCLNTRPGYECYCKQGTYYDPVKLQCFDMDECQDPSSCIDGQCVNTEGSYNCFCTHPMVLDASEKRCIRPAESNEQIEETDVYQDLCWEHLSDEYVCSRPLVGKQTTYTECCCLYGEAWGMQCALCPLKDSDDYAQLCNIPVTGRRQPYGRDALVDFSEQYTPEADPYFIQDRFLNSFEELQAEECGILNGCENGRCVRVQEGYTCDCFDGYHLDTAKMTCVDVNECDELNNRMSLCKNAKCINTDGSYKCLCLPGYVPSDKPNYCTPLNTALNLEKDSDLE

SEQ ID NO: 910327 - protein, 1276 aa, Homo sapiens
MDTKLMCLLFFFSLPPLLVSNHTGRIKVVFTPSICKVTCTKGSCQNSCEKGNTTTLISENGHAADTLTATNFRVVICHLPCMNGGQCSSRDKCQCPPNFTGKLCQIPVHGASVPKLYQHSQQPGKALGTHVIHSTHTLPLTVTSQQGVKVKFPPNIVNIHVKHPPEASVQIHQVSRIDGPTGQKTKEAQPGQSQVSYQGLPVQKTQTIHSTYSHQQVIPHVYPVAAKTQLGRCFQETIGSQCGKALPGLSKQEDCCGTVGTSWGFNKCQKCPKKPSYHGYNQMMECLPGYKRVNNTFCQDINECQLQGVCPNGECLNTMGSYRCTCKIGFGPDPTFSSCVPDPPVISEEKGPCYRLVSSGRQCMHPLSVHLTKQLCCCSVGKAWGPHCEKCPLPGTAAFKEICPGGMGYTVSGVHRRRPIHHHVGKGPVFVKPKNTQPVAKSTHPPPLPAKEEPVEALTFSREHGPGVAEPEVATAPPEKEIPSLDQEKTKLEPGQPQLSPGISTIHLHPQFPVVIEKTSPPVPVEVAPEASTSSASQVIAPTQVTEINECTVNPDICGAGHCINLPVRYTCICYEGYRFSEQQRKCVDIDECTQVQHLCSQGRCENTEGSFLCICPAGFMASEEGTNCIDVDECLRPDVCGEGHCVNTVGAFRCEYCDSGYRMTQRGRCEDIDECLNPSTCPDEQCVNSPGSYQCVPCTEGFRGWNGQCLDVDECLEPNVCANGDCSNLEGSYMCSCHKGYTRTPDHKHCRDIDECQQGNLCVNGQCKNTEGSFRCTCGQGYQLSAAKDQCEDIDECQHRHLCAHGQCRNTEGSFQCVCDQGYRASGLGDHCEDINECLEDKSVCQRGDCINTAGSYDCTCPDGFQLDDNKTCQDINECEHPGLCGPQGECLNTEGSFHCVCQQGFSISADGRTCEDIDECVNNTVCDSHGFCDNTAGSFRCLCYQGFQAPQDGQGCVDVNECELLSGVCGEAFCENVEGSFLCVCADENQEYSPMTGQCRSRTSTDLDVDVDQPKEEKKECYYNLNDASLCDNVLAPNVTKQECCCTSGAGWGDNCEIFPCPVLGTAEFTEMCPKGKGFVPAGESSSEAGGENYKDADECLLFGQEICKNGFCLNTRPGYECYCKQGTYYDPVKLQCFDMDECQDPSSCIDGQCVNTEGSYNCFCTHPMVLDASEKRCIRPAESNEQIEETDVYQDLCWEHLSDEYVCSRPLVGKQTTYTECCCLYGEAWGMQCALCPLKDSDDYAQLCNIPVTGQSSSPGGRRGREFSSSRRP

SEQ ID NO: 910328 - protein, 1092 aa, Homo sapiens
MDTKLMCLLFFFSLPPLLVSNHTGRIKVVFTPSICKVTCTKGSCQNSCEKGNTTTLISENGHAADTLTATNFRVVICHLPCMNGGQCSSRDKCQCPPNFTGKLCQIPVHGASVPKLYQHSQQPGKALGTHVIHSTHTLPLTVTSQQGVKVKFPPNIVNIHVKHPPEASVQIHQVSRIDGPTGQKTKEAQPGQSQVSYQGLPVQKTQTIHSTYSHQQVIPHVYPVAAKTQLGRCFQETIGSQCGKALPGLSKQEDCCGTVGTSWGFNKCQKCPKKPSYHGYNQMMECLPGYKRVNNTFCQDINECQLQGVCPNGECLNTMGSYRCTCKIGFGPDPTFSSCVPDPPVISEEKGPCYRLVSSGRQCMHPLSVHLTKQLCCCSVGKAWGPHCEKCPLPGTAAFKEICPGGMGYTVSGVHRRRPIHHHVGKGPVFVKPKNTQPVAKSTHPPPLPAKEEPVEALTFSREHGPGVAEPEVATAPPEKEIPSLDQEKTKLEPGQPQLSPGISTIHLHPQFPVVIEKTSPPVPVEVAPEASTSSASQVIAPTQVTEINECTVNPDICGAGHCINLPVRYTCICYEGYRFSEQQRKCVDIDECTQVQHLCSQGRCENTEGSFLCICPAGFMASEEGTNCIDVDECLRPDVCGEGHCVNTVGAFRCEYCDSGYRMTQRGRCEDIDECLNPSTCPDEQCVNSPGSYQCVPCTEGFRGWNGQCLDVDECLEPNVCANGDCSNLEGSYMCSCHKGYTRTPDHKHCRDIDECQQGNLCVNGQCKNTEGSFRCTCGQGYQLSAAKDQCEDIDECQHRHLCAHGQCRNTEGSFQCVCDQGYRASGLGDHCEDINECLEDKSVCQRGDCINTAGSYDCTCPDGFQLDDNKTCQDINECEHPGLCGPQGECLNTEGSFHCVCQQGFSISADGRTCEDIDECVNNTVCDSHGFCDNTAGSFRCLCYQGFQAPQDGQGCVDVNECELLSGVCGEAFCENVEGSFLCVCADENQEYSPMTGQCRSRTSTDLDVDVDQPKEEKKECYYNLNDASLCDNVLAPNVTKQECCCTSGAGWGDNCEIFPCPVLGTAEFTEMCPKGKGFVPAFDVPSVAK

SEQ ID NO: 910329 - protein, 300 aa, Homo sapiens
MDTKLMCLLFFFSLPPLLVSNHTGRIKVVFTPSICKVTCTKGSCQNSCEKGNTTTLISENGHAADTLTATNFRVVICHLPCMNGGQCSSRDKCQCPPNFTGKLCQIPVHGASVPKLYQHSQQPGKALGTHVIHSTHTLPLTVTSQQGVKVKFPPNIVNIHVKHPPEASVQIHQVSRIDGPTGQKTKEAQPGQSQVSYQGLPVQKTQTIHSTYSHQQVIPHVYPVAAKTQLGRCFQETIGSQCGKALPGLSKQEDCCGTVGTSHPFASVSQLAGSTGMSHHARVINKFFFVEMGVSLCCSG

SEQ ID NO: 910330 - protein, 91 aa, Homo sapiens
TGQKTKEAQPGQSQVSYQGLPVQKTQTIHSTYSHQQVIPHVYPVAAKTQLGRCFQETIGSQVNIITEPALAVSYRYGIILTRKPDLIKMLF

SEQ ID NO: 910331 - protein, 1395 aa, Homo sapiens; identical to SEQ ID NO: 910322

SEQ ID NO: 910332 - protein, 1400 aa, Homo sapiens
GEQSTEGSFPLRYVQDQVAAPFQLSNHTGRIKVVFTPSICKVTCTKGSCQNSCEKGNTTTLISENGHAADTLTATNFRVVICHLPCMNGGQCSSRDKCQCPPNFTGKLCQIPVHGASVPKLYQHSQQPGKALGTHVIHSTHTLPLTVTSQQGVKVKFPPNIVNIHVKHPPEASVQIHQVSRIDGPTGQKTKEAQPGQSQVSYQGLPVQKTQTIHSTYSHQQVIPHVYPVAAKTQLGRCFQETIGSQCGKALPGLSKQEDCCGTVGTSWGFNKCQKCPKKPSYHGYNQMMECLPGYKRVNNTFCQDINECQLQGVCPNGECLNTMGSYRCTCKIGFGPDPTFSSCVPDPPVISEEKGPCYRLVSSGRQCMHPLSVHLTKQLCCCSVGKAWGPHCEKCPLPGTAAFKEICPGGMGYTVSGVHRRRPIHHHVGKGPVFVKPKNTQPVAKSTHPPPLPAKEEPVEALTFSREHGPGVAEPEVATAPPEKEIPSLDQEKTKLEPGQPQLSPGISTIHLHPQFPVVIEKTSPPVPVEVAPEASTSSASQVIAPTQVTEINECTVNPDICGAGHCINLPVRYTCICYEGYRFSEQQRKCVDIDECTQVQHLCSQGRCENTEGSFLCICPAGFMASEEGTNCIDVDECLRPDVCGEGHCVNTVGAFRCEYCDSGYRMTQRGRCEDIDECLNPSTCPDEQCVNSPGSYQCVPCTEGFRGWNGQCLDVDECLEPNVCANGDCSNLEGSYMCSCHKGYTRTPDHKHCRDIDECQQGNLCVNGQCKNTEGSFRCTCGQGYQLSAAKDQCEDIDECQHRHLCAHGQCRNTEGSFQCVCDQGYRASGLGDHCEDINECLEDKSVCQRGDCINTAGSYDCTCPDGFQLDDNKTCQDINECEHPGLCGPQGECLNTEGSFHCVCQQGFSISADGRTCEDIDECVNNTVCDSHGFCDNTAGSFRCLCYQGFQAPQDGQGCVDVNECELLSGVCGEAFCENVEGSFLCVCADENQEYSPMTGQCRSRTSTDLDVDVDQPKEEKKECYYNLNDASLCDNVLAPNVTKQECCCTSGAGWGDNCEIFPCPVLGTAEFTEMCPKGKGFVPAGESSSEAGGENYKDADECLLFGQEICKNGFCLNTRPGYECYCKQGTYYDPVKLQCFDMDECQDPSSCIDGQCVNTEGSYNCFCTHPMVLDASEKRCIRPAESNEQIEETDVYQDLCWEHLSDEYVCSRPLVGKQTTYTECCCLYGEAWGMQCALCPLKDSDDYAQLCNIPVTGRRQPYGRDALVDFSEQYTPEADPYFIQDRFLNSFEELQAEECGILNGCENGRCVRVQEGYTCDCFDGYHLDTAKMTCVDVNECDELNNRMSLCKNAKCINTDGSYKCLCLPGYVPSDKPNYCTPLNTALNLEKDSDLE

SEQ ID NO: 910333 - protein, 517 aa, Homo sapiens
TRGYPYHSKSQGECLNTEGSFHCVCQQGFSISADGRTCEDIDECVNNTVCDSHGFCDNTAGSFRCLCYQGFQAPQDGQGCVDVNECELLSGVCGEAFCENVEGSFLCVCADENQEYSPMTGQCRSRTSTDLDVDVDQPKEEKKECYYNLNDASLCDNVLAPNVTKQECCCTSGAGWGDNCEIFPCPVLGTAEFTEMCPKGKGFVPAGESSSEAGGENYKDADECLLFGQEICKNGFCLNTRPGYECYCKQGTYYDPVKLQCFDMDECQDPSSCIDGQCVNTEGSYNCFCTHPMVLDASEKRCIRPAESNEQIEETDVYQDLCWEHLSDEYVCSRPLVGKQTTYTECCCLYGEAWGMQCALCPLKDSDDYAQLCNIPVTGRRQPYGRDALVDFSEQYTPEADPYFIQDRFLNSFEELQAEECGILNGCENGRCVRVQEGYTCDCFDGYHLDTAKMTCVDVNECDELNNRMSLCKNAKCINTDGSYKCLCLPGYVPSDKPNYCTPLNTALNLEKDSDLE

SEQ ID NO: 910334 - protein, 254 aa, Homo sapiens [sequence omitted]

SEQ ID NO: 910335 - protein, 119 aa, Homo sapiens
PVLSLGIRRRFLNSFEELQAEECGILNGCENGRCVRVQEGYTCDCFDGYHLDTAKMTCVDVNECDELNNRMSLCKNAKCINTDGSYKCLCLPGYVPSDKPNYCTPLNTALNLEKDSDLE

SEQ ID NO: 910336 - protein, 920 aa, Homo sapiens
MDTKLMCLLFFFSLPPLLVSNHTGRIKVVFTPSICKVTCTKGSCQNSCEKGNTTTLISENGHAADTLTATNFRVVICHLPCMNGGQCSSRDKCQCPPNFTGKLCQIPVHGASVPKLYQHSQQPGKALGTHVIHSTHTLPLTVTSQQGVKVKFPPNIVNIHVKHPPEASVQIHQVSRIDGPTGQKTKEAQPGQSQVSYQGLPVQKTQTIHSTYSHQQVIPHVYPVAAKTQLGRCFQETIGSQCGKALPGLSKQEDCCGTVGTSWGFNKCQKCPKKPSYHGYNQMMECLPGYKRVNNTFCQDINECQLQGVCPNGECLNTMGSYRCTCKIGFGPDPTFSSCVPDPPVISEEKGPCYRLVSSGRQCMHPLSVHLTKQLCCCSVGKAWGPHCEKCPLPGTAAFKEICPGGMGYTVSGVHRRRPIHHHVGKGPVFVKPKNTQPVAKSTHPPPLPAKEEPVEALTFSREHGPGVAEPEVATAPPEKEIPSLDQEKTKLEPGQPQLSPGISTIHLHPQFPVVIEKTSPPVPVEVAPEASTSSASQVIAPTQVTEINECTVNPDICGAGHCINLPVRYTCICYEGYRFSEQQRKCVDIDECTQVQHLCSQGRCENTEGSFLCICPAGFMASEEGTNCIDVDECLRPDVCGEGHCVNTVGAFRCEYCDSGYRMTQRGRCEDIDECLNPSTCPDEQCVNSPGSYQCVPCTEGFRGWNGQCLDVDECLEPNVCANGDCSNLEGSYMCSCHKGYTRTPDHKHCRDIDECQQGNLCVNGQCKNTEGSFRCTCGQGYQLSAAKDQCEDIDECQHRHLCAHGQCRNTEGSFQCVCDQGYRASGLGDHCEDINECLEDKSVCQRGDCINTAGSYDCTCPDGFQLDDNKTCQDINECEHPGLCGPQGECLNTEGSFHCVCQQGFSISADGRTCEASV

SEQ ID NO: 910337 - protein, 105 aa, Homo sapiens
NGGQCSSRDKCQCPPNFTGKLCQIPVHGASVPKLYQHSQQPGKALGTHVIHSTHTLPLTVTSQQGVKGKLFSFRPFARPLLTCQTHIEVKDLRVARAGIETERST

SEQ ID NO: 910338 - protein, 923 aa, Homo sapiens
RGGGLVCERMCEGREASRRSVVLRPARAGGGGGMRRGGGGAGAGVGVWRRQSSGSRSRRSSSAGVVHRLKTAVPFYPPTFFFFFLNNLEPMNAAGIRAPEAAGADGTRLAPGGSPCLRRRGRPEESPAAVVAPRGAGELQAAGAPLRFHPASPRRLHPASTPGPAWGWLLRRRRWAALLVLGLLVAGAADGCELVPRHLRGRRATGSAATAASSPAAAAGDSPALMTDPCMSLSPPCFTEEDRFSLEALQTIHKQMDDDKDGGIEVEESDEFIREDMKYKDATNKHSHLHREDKHITIEDLWKRWKTSEVHNWTLEDTLQWLIEFVELPQYEKNFRDNNVKGTTLPRIAVHEPSFMISQLKISDRSHRQKLQLKALDVVLFGPLTRPPHNWMKDFILTVSIVIGVGGCWFAYTQNKTSKEHVAKMMKDLESLQTAEQSLMDLQERLEKAQEENRNVAVEKQNLERKMMDEINYAKEEACRLRELREGAECELSRRQYAEQELEQVRMALKKAEKEFELRSSWSVPDALQKWLQLTHEVEVQYYNIKRQNAEMQLAIAKDEAEKIKKKRSTVFGTLHVAHSSSLDEVDHKILEAKKALSELTTCLRERLFRWQQIEKICGFQIAHNSGLPSLTSSLYSDHSWVVMPRVSIPPYPIAGGVDDLDEDTPPIVSQFPGTMAKPPGSLARSSSLCRSRRSIVPSSPQPQRAQLAPHAPHPSHPRHPHHPQHTPHSLPSPDPDILSVSSCPALYRNEEEEEAIYFSAEKQWEVPDTASECDSLNSSIGRKQSPPLSLEIYQTLSPRKISRDEVSLEDSSRGDSPVTVDVSWGSPDCVGLTETKSMIFSPASKVYNGILEKSCSMNQLSSGIPVPKPRHTSCSSAGNDSKPVQEAPSVARISSIPHDLCHNGEKSKKPSKIKSLFKKKSK

SEQ ID NO: 910339 - protein, 923 aa, Homo sapiens; identical to SEQ ID NO: 910338

SEQ ID NO: 910340 - protein, 816 aa, Homo sapiens
RGGGLVCERMCEGREASRRSVVLRPARAGGGGGMRRGGGGAGAGVGVWRRQSSGSRSRRSSSAGVVHRLKTAVPFYPPTFFFFFLNNLEPMNAAGIRAPEAAGADGTRLAPGGSPCLRRRGRPEESPAAVVAPRGAGELQAAGAPLRFHPASPRRLHPASTPGPAWGWLLRRRRWAALLVLGLLVAGAADGCELVPRHLRGRRATGSAATAASSPAAAAGDSPALMTDPCMSLSPPCFTEEDRFSLEALQTIHKQMDDDKDGGIEVEESDEFIREDMKYKDATNKHSHLHREDKHITIEDLWKRWKTSEVHNWTLEDTLQWLIEFVELPQYEKNFRDNNVKGTTLPRIAVHEPSFMISQLKISDRSHRQKLQLKALDVVLFGPLTRPPHNWMKDFILTVSIVIGVGGCWFAYTQNKTSKEHVAKMMKDLESLQTAEQSLMDLQERLEKAQEENRNVAVEKQNLERKMMDEINYAKEEACRLRELREGAECELSRRQYAEQELEQVRMALKKAEKEFELRSSWSVPDALQKWLQLTHEVEVQYYNIKRQNAEMQLAIAKDEAEKIKKKRSTVFGTLHVAHSSSLDEVDHKILEAKKALSELTTCLRERLFRWQQIEKICGFQIAHNSGLPSLTSSLYSDHSWVVMPRVSIPPYPIAGGVDDLDEDTPPIVSQFPGTMAKPPGSLARSSSLCRSRRSIVPSSPQPQRAQLAPHAPHPSHPRHPHHPQHTPHSLPSPDPDILSVSSCPALYRNEEEEEAIYFSAEKQWNTRECAVGDSQGPHVHGLVRFDKDFGSYSEYERKHWEVSRKCQTQLQNVTP

SEQ ID NO: 910341 - protein, 923 aa, Homo sapiens; identical to SEQ ID NO: 910338

SEQ ID NO: 910342 - protein, 337 aa, Homo sapiens
NFFIGFSRKALSELTTCLRERLFRWQQIEKICGFQIAHNSGLPSLTSSLYSDHSWVVMPRVSIPPYPIAGGVDDLDEDTPPIVSQFPGTMAKPPGSLARSSSLCRSRRSIVPSSPQPQRAQLAPHAPHPSHPRHPHHPQHTPHSLPSPDPDILSVSSCPALYRNEEEEEAIYFSAEKQWEVPDTASECDSLNSSIGRKQSPPLSLEIYQTLSPRKISRDEVSLEDSSRGDSPVTVDVSWGSPDCVGLTETKSMIFSPASKVYNGILEKSCSMNQLSSGIPVPKPRHTSCSSAGNDSKPVQEAPSVARISSIPHDLCHNGEKSKKPSKIKSLFKKKSK

SEQ ID NO: 910343 - protein, 796 aa, Homo sapiens
RGGGLVCERMCEGREASRRSVVLRPARAGGGGGMRRGGGGAGAGVGVWRRQSSGSRSRRSSSAGVVHRLKTAVPFYPPTFFFFFLNNLEPMNAAGIRAPEAAGADGTRLAPGGSPCLRRRGRPEESPAAVVAPRGAGELQAAGAPLRFHPASPRRLHPASTPGPAWGWLLRRRRWAALLVLGLLVAGAADGCELVPRHLRGRRATGSAATAASSPAAAAGDSPALMTDPCMSLSPPCFTEEDRFSLEALQTIHKQMDDDKDGGIEVEESDEFIREDMKYKDATNKHSHLHREDKHITIEDLWKRWKTSEVHNWTLEDTLQWLIEFVELPQYEKNFRDNNVKGTTLPRIAVHEPSFMISQLKISDRSHRQKLQLKALDVVLFGPLTRPPHNWMKDFILTVSIVIGVGGCWFAYTQNKTSKEHVAKMMKDLESLQTAEQSLMDLQERLEKAQEENRNVAVEKQNLERKMMDEINYAKEEACRLRELREGAECELSRRQYAEQELEQVRMALKKAEKEFELRSSWSVPDALQKWLQLTHEVEVQYYNIKRQNAEMQLAIAKDEAEKIKKKRSTVFGTLHVAHSSSLDEVDHKILEAKKALSELTTCLRERLFRWQQIEKICGFQIAHNSGLPSLTSSLYSDHSWVVMPRVSIPPYPIAGGVDDLDEDTPPIVSQFPGTMAKPPGSLARSSSLCRSRRSIVPSSPQPQRAQLAPHAPHPSHPRHPHHPQHTPHSLPSPDPDILSVSSCPALYRNEEEEEAIYFSAEKQCMIIVTSKMPLLTELVLCGFWKSEGKLESCTV

SEQ ID NO: 910344 - protein, 2035 aa, Homo sapiens
MASAVSPANLPAVLLQPRWKRVVGWSGPVPRPRHGHRAVAIKELIVVFGGGNEGIVDELHVYNTATNQWFIPAVRGDIPPGCAAYGFVCDGTRLLVFGGMVEYGKYSNDLYELQASRWEWKRLKAKTPKNGPPPCPRLGHSFSLVGNKCYLFGGLANDSEDPKNNIPRYLNDLYILELRPGSGVVAWDIPITYGVLPPPRESHTAVVYTEKDNKKSKLVIYGGMSGCRLGDLWTLDIDTLTWNKPSLSGVAPLPRSLHSATTIGNKMYVFGGWVPLVMDDVKVATHEKEWKCTNTLACLNLDTMAWETILMDTLEDNIPRARAGHCAVAINTRLYIWSGRDGYRKAWNNQVCCKDLWYLETEKPPPPARVQLVRANTNSLEVSWGAVATADSYLLQLQKYDIPATAATATSPTPNPVPSVPANPPKSPAPAAAAPAVQPLTQVGITLLPQAAPAPPTTTTIQVLPTVPGSSISVPTAARTQGVPAVLKVTGPQATTGTPLVTMRPASQAGKAPVTVTSLPAGVRMVVPTQSAQGTVIGSSPQMSGMAALAAAAAATQKIPPSSAPTVLSVPAGTTIVKTMAVTPGTTTLPATVKVASSPVMVSNPATRMLKTAAAQVGTSVSSATNTSTRPIITVHKSGTVTVAQQAQVVTTVVGGVTKTITLVKSPISVPGGSALISNLGKVMSVVQTKPVQTSAVTGQASTGPVTQIIQTKGPLPAGTILKLVTSADGKPTTIITTTQASGAGTKPTILGISSVSPSTTKPGTTTIIKTIPMSAIITQAGATGVTSSPGIKSPITIITTKVMTSGTGAPAKIITAVPKIATGHGQQGVTQVVLKGAPGQPGTILRTVPMGGVRLVTPVTVSAVKPAVTTLVVKGTTGVTTLGTVTGTVSTSLAGAGGHSTSASLATPITTLGTIATLSSQVINPTAITVSAAQTTLTAAGGLTTPTITMQPVSQPTQVTLITAPSGVEAQPVHDLPVSILASPTTEQPTATVTIADSGQGDVQPGTVTLVCSNPPCETHETGTTNTATTTVVANLGGHPQPTQVQFVCDRQEAAASLVTSTVGQQNGSVVRVCSNPPCETHETGTTNTATTATSNMAGQHGCSNPPCETHETGTTNTATTAMSSVGANHQRDARRACAAGTPAVIRISVATGALEAAQGSKSQCQTRQTSATSTTMTVMATGAPCSAGPLLGPSMAREPGGRSPAFVQLAPLSSKVRLSSPSIKDLPAGRHSHAVSTAAMTRSSVGAGEPRMAPVCESLQGGSPSTTVTVTALEALLCPSATVTQVCSNPPCETHETGTTNTATTSNAGSAQRVCSNPPCETHETGTTHTATTATSNGGTGQPEGGQQPPAGRPCETHQTTSTGTTMSVSVGALLPDATSSHRTVESGLEVAAAPSVTPQAGTALLAPFPTQRVCSNPPCETHETGTTHTATTVTSNMSSNQDPPPAASDQGEVESTQGDSVNITSSSAITTTVSSTLTRAVTTVTQSTPVPGPSVPPPEELQVSPGPRQQLPPRQLLQSASTALMGESAEVLSASQTPELPAAVDLSSTGEPSSGQESAGSAVVATVVVQPPPPTQSEVDQLSLPQELMAEAQAGTTTLMVTGLTPEELAVTAAAEAAAQAAATEEAQALAIQAVLQAAQQAVMGTGEPMDTSEAAATVTQAELGHLSAEGQEGQATTIPIVLTQQELAALVQQQQLQEAQAQQQHHHLPTEALAPADSLNDPAIESNCLNELAGTVPSTVALLPSTATESLAPSNTFVAPQPVVVASPAKLQAAATLTEVANGIESLGVKPDLPPPPSKAPMKKENQWFDVGVIKGTNVMVTHYFLPPDDAVPSDDDLGTVPDYNQLKKQELQPGTAYKFRVAGINACGRGPFSEISAFKTCLPGFPGAPCAIKISKSPDGAHLTWEPPSVTSGKIIEYSVYLAIQSSQAGGELKSSTPAQLAFMRVYCGPSPSCLVQSSSLSNAHIDYTTKPAIIFRIAARNEKGYGPATQVRWLQETSKDSSGTKPANKRPMSSPEMKSAPKKSKADGQ

SEQ ID NO: 910345 - protein, 1993 aa, Homo sapiens
  misc_feature (6)..(6): Xaa can be any naturally occurring amino acid
GYTPLXWDGGNEGIVYNCTLHTATNQWFIPAVRGDIPPGCAAYGFVCDGTRLLVFGGMVEYGKYSNDLYELQASRWEWKRLKAKTPKNGPPPCPRLGHSFSLVGNKCYLFGGLANDSEDPKNNIPRYLNDLYILELRPGSGVVAWDIPITYGVLPPPRESHTAVVYTEKDNKKSKLVIYGGMSGCRLGDLWTLDIDTLTWNKPSLSGVAPLPRSLHSATTIGNKMYVFGGWVPLVMDDVKVATHEKEWKCTNTLACLNLDTMAWETILMDTLEDNIPRARAGHCAVAINTRLYIWSGRDGYRKAWNNQVCCKDLWYLETEKPPPPARVQLVRANTNSLEVSWGAVATADSYLLQLQKYDIPATAATATSPTPNPVPSVPANPPKSPAPAAAAPAVQPLTQVGITLLPQAAPAPPTTTTIQVLPTVPGSSISVPTAARTQGVPAVLKVTGPQATTGTPLVTMRPASQAGKAPVTVTSLPAGVRMVVPTQSAQGTVIGSSPQMSGMAALAAAAAATQKIPPSSAPTVLSVPAGTTIVKTMAVTPGTTTLPATVKVASSPVMVSNPATRMLKTAAAQVGTSVSSATNTSTRPIITVHKSGTVTVAQQAQVVTTVVGGVTKTITLVKSPISVPGGSALISNLGKVMSVVQTKPVQTSAVTGQASTGPVTQIIQTKGPLPAGTILKLVTSADGKPTTIITTTQASGAGTKPTILGISSVSPSTTKPGTTTIIKTIPMSAIITQAGATGVTSSPGIKSPITIITTKVMTSGTGAPAKIITAVPKIATGHGQQGVTQVVLKGAPGQPGTILRTVPMGGVRLVTPVTVSAVKPAVTTLVVKGTTGVTTLGTVTGTVSTSLAGAGGHSTSASLATPITTLGTIATLSSQVINPTAITVSAAQTTLTAAGGLTTPTITMQPVSQPTQVTLITAPSGVEAQPVHDLPVSILASPTTEQPTATVTIADSGQGDVQPGTVTLVCSNPPCETHETGTTNTATTTVVANLGGHPQPTQVQFVCDRQEAAASLVTSTVGQQNGSVVRVCSNPPCETHETGTTNTATTATSNMAGQHGCSNPPCETHETGTTNTATTAMSSVGANHQRDARRACAAGTPAVIRISVATGALEAAQGSKSQCQTRQTSATSTTMTVMATGAPCSAGPLLGPSMAREPGGRSPAFVQLAPLSSKVRLSSPSIKDLPAGRHSHAVSTAAMTRSSVGAGEPRMAPVCESLQGGSPSTTVTVTALEALLCPSATVTQVCSNPPCETHETGTTNTATTSNAGSAQRVCSNPPCETHETGTTHTATTATSNGGTGQPEGGQQPPAGRPCETHQTTSTGTTMSVSVGALLPDATSSHRTVESGLEVAAAPSVTPQAGTALLAPFPTQRVCSNPPCETHETGTTHTATTVTSNMSSNQDPPPAASDQGEVESTQGDSVNITSSSAITTTVSSTLTRAVTTVTQSTPVPGPSVPPPEELQVSPGPRQQLPPRQLLQSASTALMGESAEVLSASQTPELPAAVDLSSTGEPSSGQESAGSAVVATVVVQPPPPTQSEVDQLSLPQELMAEAQAGTTTLMVTGLTPEELAVTAAAEAAAQAAATEEAQALAIQAVLQAAQQAVMGTGEPMDTSEAAATVTQAELGHLSAEGQEGQATTIPIVLTQQELAALVQQQQLQEAQAQQQHHHLPTEALAPADSLNDPAIESNCLNELAGTVPSTVALLPSTATESLAPSNTFVAPQPVVVASPAKLQAAATLTEVANGIESLGVKPDLPPPPSKAPMKKENQWFDVGVIKGTNVMVTHYFLPPDDAVPSDDDLGTVPDYNQLKKQELQPGTAYKFRVAGINACGRGPFSEISAFKTCLPGFPGAPCAIKISKSPDGAHLTWEPPSVTSGKIIEYSVYLAIQSSQAGGELKSSTPAQLAFMRVYCGPSPSCLVQSSSLSNAHIDYTTKPAIIFRIAARNEKGYGPATQVRWLQETSKDSSGTKPANKRPMSSPEMKSAPKKSKADGQ

SEQ ID NO: 910346 - protein, 2079 aa, Homo sapiens
MASAVSPANLPAVLLQPRWKRVVGWSGPVPRPRHGHRAVAIKELIVVFGGGNEGIVDELHVYNTATNQWFIPAVRGDIPPGCAAYGFVCDGTRLLVFGGMVEYGKYSNDLYELQASRWEWKRLKAKTPKNGPPPCPRLGHSFSLVGNKCYLFGGLANDSEDPKNNIPRYLNDLYILELRPGSGVVAWDIPITYGVLPPPRESHTAVVYTEKDNKKSKLVIYGGMSGCRLGDLWTLDIDTLTWNKPSLSGVAPLPRSLHSATTIGNKMYVFGGWVPLVMDDVKVATHEKEWKCTNTLACLNLDTMAWETILMDTLEDNIPRARAGHCAVAINTRLYIWSGRDGYRKAWNNQVCCKDLWYLETEKPPPPARVQLVRANTNSLEVSWGAVATADSYLLQLQKYDIPATAATATSPTPNPVPSVPANPPKSPAPAAAAPAVQPLTQVGITLLPQAAPAPPTTTTIQVLPTVPGSSISVPTAARTQGVPAVLKVTGPQATTGTPLVTMRPASQAGKAPVTVTSLPAGVRMVVPTQSAQGTVIGSSPQMSGMAALAAAAAATQKIPPSSAPTVLSVPAGTTIVKTMAVTPGTTTLPATVKVASSPVMVSNPATRMLKTAAAQVGTSVSSATNTSTRPIITVHKSGTVTVAQQAQVVTTVVGGVTKTITLVKSPISVPGGSALISNLGKVMSVVQTKPVQTSAVTGQASTGPVTQIIQTKGPLPAGTILKLVTSADGKPTTIITTTQASGAGTKPTILGISSVSPSTTKPGTTTIIKTIPMSAIITQAGATGVTSSPGIKSPITIITTKVMTSGTGAPAKIITAVPKIATGHGQQGVTQVVLKGAPGQPGTILRTVPMGGVRLVTPVTVSAVKPAVTTLVVKGTTGVTTLGTVTGTVSTSLAGAGGHSTSASLATPITTLGTIATLSSQVINPTAITVSAAQTTLTAAGGLTTPTITMQPVSQPTQVTLITAPSGVEAQPVHDLPVSILASPTTEQPTATVTIADSGQGDVQPGTVTLVCSNPPCETHETGTTNTATTTVVANLGGHPQPTQVQFVCDRQEAAASLVTSTVGQQNGSVVRVCSNPPCETHETGTTNTATTATSNMAGQHGCSNPPCETHETGTTNTATTAMSSVGANHQRDARRACAAGTPAVIRISVATGALEAAQGSKSQCQTRQTSATSTTMTVMATGAPCSAGPLLGPSMAREPGGRSPAFVQLAPLSSKVRLSSPSIKDLPAGRHSHAVSTAAMTRSSVGAGEPRMAPVCESLQGGSPSTTVTVTALEALLCPSATVTQVCSNPPCETHETGTTNTATTSNAGSAQRVCSNPPCETHETGTTHTATTATSNGGTGQPEGGQQPPAGRPCETHQTTSTGTTMSVSVGALLPDATSSHRTVESGLEVAAAPSVTPQAGTALLAPFPTQRVCSNPPCETHETGTTHTATTVTSNMSSNQDPPPAASDQGEVESTQGDSVNITSSSAITTTVSSTLTRAVTTVTQSTPVPGPSVPKISSMTETAPRALTTEVPIPAKITVTIANTETSDMPFSAVDILQPPEELQVSPGPRQQLPPRQLLQSASTALMGESAEVLSASQTPELPAAVDLSSTGEPSSGQESAGSAVVATVVVQPPPPTQSEVDQLSLPQELMAEAQAGTTTLMVTGLTPEELAVTAAAEAAAQAAATEEAQALAIQAVLQAAQQAVMGTGEPMDTSEAAATVTQAELGHLSAEGQEGQATTIPIVLTQQELAALVQQQQLQEAQAQQQHHHLPTEALAPADSLNDPAIESNCLNELAGTVPSTVALLPSTATESLAPSNTFVAPQPVVVASPAKLQAAATLTEVANGIESLGVKPDLPPPPSKAPMKKENQWFDVGVIKGTNVMVTHYFLPPDDAVPSDDDLGTVPDYNQLKKQELQPGTAYKFRVAGINACGRGPFSEISAFKTCLPGFPGAPCAIKISKSPDGAHLTWEPPSVTSGKIIEYSVYLAIQSSQAGGELKSSTPAQLAFMRVYCGPSPSCLVQSSSLSNAHIDYTTKPAIIFRIAARNEKGYGPATQVRWLQETSKDSSGTKPANKRPMSSPEMKSAPKKSKADGQ

SEQ ID NO: 910347 - protein, 1732 aa, Homo sapiens
MAWETILMDTLEDNIPRARAGHCAVAINTRLYIWSGRDGYRKAWNNQVCCKDLWYLETEKPPPPARVQLVRANTNSLEVSWGAVATADSYLLQLQKYDIPATAATATSPTPNPVPSVPANPPKSPAPAAAAPAVQPLTQVGITLLPQAAPAPPTTTTIQVLPTVPGSSISVPTAARTQGVPAVLKVTGPQATTGTPLVTMRPASQAGKAPVTVTSLPAGVRMVVPTQSAQGTVIGSSPQMSGMAALAAAAAATQKIPPSSAPTVLSVPAGTTIVKTMAVTPGTTTLPATVKVASSPVMVSNPATRMLKTAAAQVGTSVSSATNTSTRPIITVHKSGTVTVAQQAQVVTTVVGGVTKTITLVKSPISVPGGSALISNLGKVMSVVQTKPVQTSAVTGQASTGPVTQIIQTKGPLPAGTILKLVTSADGKPTTIITTTQASGAGTKPTILGISSVSPSTTKPGTTTIIKTIPMSAIITQAGATGVTSSPGIKSPITIITTKVMTSGTGAPAKIITAVPKIATGHGQQGVTQVVLKGAPGQPGTILRTVPMGGVRLVTPVTVSAVKPAVTTLVVKGTTGVTTLGTVTGTVSTSLAGAGGHSTSASLATPITTLGTIATLSSQVINPTAITVSAAQTTLTAAGGLTTPTITMQPVSQPTQVTLITAPSGVEAQPVHDLPVSILASPTTEQPTATVTIADSGQGDVQPGTVTLVCSNPPCETHETGTTNTATTTVVANLGGHPQPTQVQFVCDRQEAAASLVTSTVGQQNGSVVRVCSNPPCETHETGTTNTATTATSNMAGQHGCSNPPCETHETGTTNTATTAMSSVGANHQRDARRACAAGTPAVIRISVATGALEAAQGSKSQCQTRQTSATSTTMTVMATGAPCSAGPLLGPSMAREPGGRSPAFVQLAPLSSKVRLSSPSIKDLPAGRHSHAVSTAAMTRSSVGAGEPRMAPVCESLQGGSPSTTVTVTALEALLCPSATVTQVCSNPPCETHETGTTNTATTSNAGSAQRVCSNPPCETHETGTTHTATTATSNGGTGQPEGGQQPPAGRPCETHQTTSTGTTMSVSVGALLPDATSSHRTVESGLEVAAAPSVTPQAGTALLAPFPTQRVCSNPPCETHETGTTHTATTVTSNMSSNQDPPPAASDQGEVESTQGDSVNITSSSAITTTVSSTLTRAVTTVTQSTPVPGPSVPPPEELQVSPGPRQQLPPRQLLQSASTALMGESAEVLSASQTPELPAAVDLSSTGEPSSGQESAGSAVVATVVVQPPPPTQSEVDQLSLPQELMAEAQAGTTTLMVTGLTPEELAVTAAAEAAAQAAATEEAQALAIQAVLQAAQQAVMGTGEPMDTSEAAATVTQAELGHLSAEGQEGQATTIPIVLTQQELAALVQQQQLQEAQAQQQHHHLPTEALAPADSLNDPAIESNCLNELAGTVPSTVALLPSTATESLAPSNTFVAPQPVVVASPAKLQAAATLTEVANGIESLGVKPDLPPPPSKAPMKKENQWFDVGVIKGTNVMVTHYFLPPDDAVPSDDDLGTVPDYNQLKKQELQPGTAYKFRVAGINACGRGPFSEISAFKTCLPGFPGAPCAIKISKSPDGAHLTWEPPSVTSGKIIEYSVYLAIQSSQAGGELKSSTPAQLAFMRVYCGPSPSCLVQSSSLSNAHIDYTTKPAIIFRIAARNEKGYGPATQVRWLQETSKDSSGTKPANKRPMSSPEMKSAPKKSKADGQ

SEQ ID NO: 910348 - protein, 1422 aa, Homo sapiens
ENGAPGPPISRFPLSAPPLSGLCKSGTVTVAQQAQVVTTVVGGVTKTITLVKSPISVPGGSALISNLGKVMSVVQTKPVQTSAVTGQASTGPVTQIIQTKGPLPAGTILKLVTSADGKPTTIITTTQASGAGTKPTILGISSVSPSTTKPGTTTIIKTIPMSAIITQAGATGVTSSPGIKSPITIITTKVMTSGTGAPAKIITAVPKIATGHGQQGVTQVVLKGAPGQPGTILRTVPMGGVRLVTPVTVSAVKPAVTTLVVKGTTGVTTLGTVTGTVSTSLAGAGGHSTSASLATPITTLGTIATLSSQVINPTAITVSAAQTTLTAAGGLTTPTITMQPVSQPTQVTLITAPSGVEAQPVHDLPVSILASPTTEQPTATVTIADSGQGDVQPGTVTLVCSNPPCETHETGTTNTATTTVVANLGGHPQPTQVQFVCDRQEAAASLVTSTVGQQNGSVVRVCSNPPCETHETGTTNTATTATSNMAGQHGCSNPPCETHETGTTNTATTAMSSVGANHQRDARRACAAGTPAVIRISVATGALEAAQGSKSQCQTRQTSATSTTMTVMATGAPCSAGPLLGPSMAREPGGRSPAFVQLAPLSSKVRLSSPSIKDLPAGRHSHAVSTAAMTRSSVGAGEPRMAPVCESLQGGSPSTTVTVTALEALLCPSATVTQVCSNPPCETHETGTTNTATTSNAGSAQRVCSNPPCETHETGTTHTATTATSNGGTGQPEGGQQPPAGRPCETHQTTSTGTTMSVSVGALLPDATSSHRTVESGLEVAAAPSVTPQAGTALLAPFPTQRVCSNPPCETHETGTTHTATTVTSNMSSNQDPPPAASDQGEVESTQGDSVNITSSSAITTTVSSTLTRAVTTVTQSTPVPGPSVPPPEELQVSPGPRQQLPPRQLLQSASTALMGESAEVLSASQTPELPAAVDLSSTGEPSSGQESAGSAVVATVVVQPPPPTQSEVDQLSLPQELMAEAQAGTTTLMVTGLTPEELAVTAAAEAAAQAAATEEAQALAIQAVLQAAQQAVMGTGEPMDTSEAAATVTQAELGHLSAEGQEGQATTIPIVLTQQELAALVQQQQLQEAQAQQQHHHLPTEALAPADSLNDPAIESNCLNELAGTVPSTVALLPSTATESLAPSNTFVAPQPVVVASPAKLQAAATLTEVANGIESLGVKPDLPPPPSKAPMKKENQWFDVGVIKGTNVMVTHYFLPPDDAVPSDDDLGTVPDYNQLKKQELQPGTAYKFRVAGINACGRGPFSEISAFKTCLPGFPGAPCAIKISKSPDGAHLTWEPPSVTSGKIIEYSVYLAIQSSQAGGELKSSTPAQLAFMRVYCGPSPSCLVQSSSLSNAHIDYTTKPAIIFRIAARNEKGYGPATQVRWLQETSKDSSGTKPANKRPMSSPEMKSAPKKSKADGQ

SEQ ID NO: 910349 - protein, 1064 aa, Homo sapiens
SCTAWASTPLGAVIRVTWVGWYTGCMVMFGVVSPPGTVTLVCSNPPCETHETGTTNTATTTVVANLGGHPQPTQVQFVCDRQEAAASLVTSTVGQQNGSVVRVCSNPPCETHETGTTNTATTATSNMAGQHGCSNPPCETHETGTTNTATTAMSSVGANHQRDARRACAAGTPAVIRISVATGALEAAQGSKSQCQTRQTSATSTTMTVMATGAPCSAGPLLGPSMAREPGGRSPAFVQLAPLSSKVRLSSPSIKDLPAGRHSHAVSTAAMTRSSVGAGEPRMAPVCESLQGGSPSTTVTVTALEALLCPSATVTQVCSNPPCETHETGTTNTATTSNAGSAQRVCSNPPCETHETGTTHTATTATSNGGTGQPEGGQQPPAGRPCETHQTTSTGTTMSVSVGALLPDATSSHRTVESGLEVAAAPSVTPQAGTALLAPFPTQRVCSNPPCETHETGTTHTATTVTSNMSSNQDPPPAASDQGEVESTQGDSVNITSSSAITTTVSSTLTRAVTTVTQSTPVPGPSVPPPEELQVSPGPRQQLPPRQLLQSASTALMGESAEVLSASQTPELPAAVDLSSTGEPSSGQESAGSAVVATVVVQPPPPTQSEVDQLSLPQELMAEAQAGTTTLMVTGLTPEELAVTAAAEAAAQAAATEEAQALAIQAVLQAAQQAVMGTGEPMDTSEAAATVTQAELGHLSAEGQEGQATTIPIVLTQQELAALVQQQQLQEAQAQQQHHHLPTEALAPADSLNDPAIESNCLNELAGTVPSTVALLPSTATESLAPSNTFVAPQPVVVASPAKLQAAATLTEVANGIESLGVKPDLPPPPSKAPMKKENQWFDVGVIKGTNVMVTHYFLPPDDAVPSDDDLGTVPDYNQLKKQELQPGTAYKFRVAGINACGRGPFSEISAFKTCLPGFPGAPCAIKISKSPDGAHLTWEPPSVTSGKIIEYSVYLAIQSSQAGGELKSSTPAQLAFMRVYCGPSPSCLVQSSSLSNAHIDYTTKPAIIFRIAARNEKGYGPATQVRWLQETSKDSSGTKPANKRPMSSPEMKSAPKKSKADGQ

SEQ ID NO: 910350 - protein, 2035 aa, Homo sapiens; identical to SEQ ID NO: 910344

SEQ ID NO: 910351 - protein, 2035 aa, Homo sapiens; identical to SEQ ID NO: 910344

SEQ ID NO: 910352 - protein, 491 aa, Homo sapiens
MASAVSPANLPAVLLQPRWKRVVGWSGPVPRPRHGHRAVAIKELIVVFGGGNEGIVDELHVYNTATNQWFIPAVRGDIPPGCAAYGFVCDGTRLLVFGGMVEYGKYSNDLYELQASRWEWKRLKAKTPKNGPPPCPRLGHSFSLVGNKCYLFGGLANDSEDPKNNIPRYLNDLYILELRPGSGVVAWDIPITYGVLPPPRESHTAVVYTEKDNKKSKLVIYGGMSGCRLGDLWTLDIDTLTWNKPSLSGVAPLPRSLHSATTIGNKMYVFGGWVPLVMDDVKVATHEKEWKCTNTLACLNLDTMAWETILMDTLEDNIPRARAGHCAVAINTRLYIWSGRDGYRKAWNNQVCCKDLWYLETEKPPPPARVQLVRANTNSLEVSWGAVATADSYLLQLQKYDIPATAATATSPTPNPVPSVPANPPKSPAPAAAAPAVQPLTQVGITLLPQAAPAPPTTTTIQVLPTVPGSSISVPTAARTQGEPGDQGRLK

SEQ ID NO: 910353 - protein, 103 aa, Homo sapiens
MPCLLQVIGSSPQMSGMAALAAAAAATQKIPPSSAPTVLSVPAGTTIVKTMAVTPGTTTLPATVKVASSPVMVSVFRGLSLWSNKHSHSLRALELAVGPWAAE

SEQ ID NO: 910354 - protein, 1936 aa, Homo sapiens
MVEYGKYSNDLYELQASRWEWKRLKAKTPKNGPPPCPRLGHSFSLVGNKCYLFGGLANDSEDPKNNIPRYLNDLYILELRPGSGVVAWDIPITYGVLPPPRESHTAVVYTEKDNKKSKLVIYGGMSGCRLGDLWTLDIDTLTWNKPSLSGVAPLPRSLHSATTIGNKMYVFGGWVPLVMDDVKVATHEKEWKCTNTLACLNLDTMAWETILMDTLEDNIPRARAGHCAVAINTRLYIWSGRDGYRKAWNNQVCCKDLWYLETEKPPPPARVQLVRANTNSLEVSWGAVATADSYLLQLQKYDIPATAATATSPTPNPVPSVPANPPKSPAPAAAAPAVQPLTQVGITLLPQAAPAPPTTTTIQVLPTVPGSSISVPTAARTQGVPAVLKVTGPQATTGTPLVTMRPASQAGKAPVTVTSLPAGVRMVVPTQSAQGTVIGSSPQMSGMAALAAAAAATQKIPPSSAPTVLSVPAGTTIVKTMAVTPGTTTLPATVKVASSPVMVSNPATRMLKTAAAQVGTSVSSATNTSTRPIITVHKSGTVTVAQQAQVVTTVVGGVTKTITLVKSPISVPGGSALISNLGKVMSVVQTKPVQTSAVTGQASTGPVTQIIQTKGPLPAGTILKLVTSADGKPTTIITTTQASGAGTKPTILGISSVSPSTTKPGTTTIIKTIPMSAIITQAGATGVTSSPGIKSPITIITTKVMTSGTGAPAKIITAVPKIATGHGQQGVTQVVLKGAPGQPGTILRTVPMGGVRLVTPVTVSAVKPAVTTLVVKGTTGVTTLGTVTGTVSTSLAGAGGHSTSASLATPITTLGTIATLSSQVINPTAITVSAAQTTLTAAGGLTTPTITMQPVSQPTQVTLITAPSGVEAQPVHDLPVSILASPTTEQPTATVTIADSGQGDVQPGTVTLVCSNPPCETHETGTTNTATTTVVANLGGHPQPTQVQFVCDRQEAAASLVTSTVGQQNGSVVRVCSNPPCETHETGTTNTATTATSNMAGQHGCSNPPCETHETGTTNTATTAMSSVGANHQRDARRACAAGTPAVIRISVATGALEAAQGSKSQCQTRQTSATSTTMTVMATGAPCSAGPLLGPSMAREPGGRSPAFVQLAPLSSKVRLSSPSIKDLPAGRHSHAVSTAAMTRSSVGAGEPRMAPVCESLQGGSPSTTVTVTALEALLCPSATVTQVCSNPPCETHETGTTNTATTSNAGSAQRVCSNPPCETHETGTTHTATTATSNGGTGQPEGGQQPPAGRPCETHQTTSTGTTMSVSVGALLPDATSSHRTVESGLEVAAAPSVTPQAGTALLAPFPTQRVCSNPPCETHETGTTHTATTVTSNMSSNQDPPPAASDQGEVESTQGDSVNITSSSAITTTVSSTLTRAVTTVTQSTPVPGPSVPPPEELQVSPGPRQQLPPRQLLQSASTALMGESAEVLSASQTPELPAAVDLSSTGEPSSGQESAGSAVVATVVVQPPPPTQSEVDQLSLPQELMAEAQAGTTTLMVTGLTPEELAVTAAAEAAAQAAATEEAQALAIQAVLQAAQQAVMGTGEPMDTSEAAATVTQAELGHLSAEGQEGQATTIPIVLTQQELAALVQQQQLQEAQAQQQHHHLPTEALAPADSLNDPAIESNCLNELAGTVPSTVALLPSTATESLAPSNTFVAPQPVVVASPAKLQAAATLTEVANGIESLGVKPDLPPPPSKAPMKKENQWFDVGVIKGTNVMVTHYFLPPDDAVPSDDDLGTVPDYNQLKKQELQPGTAYKFRVAGINACGRGPFSEISAFKTCLPGFPGAPCAIKISKSPDGAHLTWEPPSVTSGKIIEYSVYLAIQSSQAGGELKSSTPAQLAFMRVYCGPSPSCLVQSSSLSNAHIDYTTKPAIIFRIAARNEKGYGPATQVRWLQETSKDSSGTKPANKRPMSSPEMKSAPKKSKADGQ

SEQ ID NO: 910355 - protein, 2035 aa, Homo sapiens; identical to SEQ ID NO: 910344

SEQ ID NO: 910356 - protein, 1533 aa, Homo sapiens
MRPASQAGKAPVTVTSLPAGVRMVVPTQSAQGTVIGSSPQMSGMAALAAAAAATQKIPPSSAPTVLSVPAGTTIVKTMAVTPGTTTLPATVKVASSPVMVSNPATRMLKTAAAQVGTSVSSATNTSTRPIITVHKSGTVTVAQQAQVVTTVVGGVTKTITLVKSPISVPGGSALISNLGKVMSVVQTKPVQTSAVTGQASTGPVTQIIQTKGPLPAGTILKLVTSADGKPTTIITTTQASGAGTKPTILGISSVSPSTTKPGTTTIIKTIPMSAIITQAGATGVTSSPGIKSPITIITTKVMTSGTGAPAKIITAVPKIATGHGQQGVTQVVLKGAPGQPGTILRTVPMGGVRLVTPVTVSAVKPAVTTLVVKGTTGVTTLGTVTGTVSTSLAGAGGHSTSASLATPITTLGTIATLSSQVINPTAITVSAAQTTLTAAGGLTTPTITMQPVSQPTQVTLITAPSGVEAQPVHDLPVSILASPTTEQPTATVTIADSGQGDVQPGTVTLVCSNPPCETHETGTTNTATTTVVANLGGHPQPTQVQFVCDRQEAAASLVTSTVGQQNGSVVRVCSNPPCETHETGTTNTATTATSNMAGQHGCSNPPCETHETGTTNTATTAMSSVGANHQRDARRACAAGTPAVIRISVATGALEAAQGSKSQCQTRQTSATSTTMTVMATGAPCSAGPLLGPSMAREPGGRSPAFVQLAPLSSKVRLSSPSIKDLPAGRHSHAVSTAAMTRSSVGAGEPRMAPVCESLQGGSPSTTVTVTALEALLCPSATVTQVCSNPPCETHETGTTNTATTSNAGSAQRVCSNPPCETHETGTTHTATTATSNGGTGQPEGGQQPPAGRPCETHQTTSTGTTMSVSVGALLPDATSSHRTVESGLEVAAAPSVTPQAGTALLAPFPTQRVCSNPPCETHETGTTHTATTVTSNMSSNQDPPPAASDQGEVESTQGDSVNITSSSAITTTVSSTLTRAVTTVTQSTPVPGPSVPPPEELQVSPGPRQQLPPRQLLQSASTALMGESAEVLSASQTPELPAAVDLSSTGEPSSGQESAGSAVVATVVVQPPPPTQSEVDQLSLPQELMAEAQAGTTTLMVTGLTPEELAVTAAAEAAAQAAATEEAQALAIQAVLQAAQQAVMGTGEPMDTSEAAATVTQAELGHLSAEGQEGQATTIPIVLTQQELAALVQQQQLQEAQAQQQHHHLPTEALAPADSLNDPAIESNCLNELAGTVPSTVALLPSTATESLAPSNTFVAPQPVVVASPAKLQAAATLTEVANGIESLGVKPDLPPPPSKAPMKKENQWFDVGVIKGTNVMVTHYFLPPDDAVPSDDDLGTVPDYNQLKKQELQPGTAYKFRVAGINACGRGPFSEISAFKTCLPGFPGAPCAIKISKSPDGAHLTWEPPSVTSGKIIEYSVYLAIQSSQAGGELKSSTPAQLAFMRVYCGPSPSCLVQSSSLSNAHIDYTTKPAIIFRIAARNEKGYGPATQVRWLQETSKDSSGTKPANKRPMSSPEMKSAPKKSKADGQ

SEQ ID NO: 910357 - protein, 1115 aa, Homo sapiens
MVPACVVTVQDSGRDRQTASCSTNSPPRVSPQPVSQPTQVTLITAPSGVEAQPVHDLPVSILASPTTEQPTATVTIADSGQGDVQPGTVTLVCSNPPCETHETGTTNTATTTVVANLGGHPQPTQVQFVCDRQEAAASLVTSTVGQQNGSVVRVCSNPPCETHETGTTNTATTATSNMAGQHGCSNPPCETHETGTTNTATTAMSSVGANHQRDARRACAAGTPAVIRISVATGALEAAQGSKSQCQTRQTSATSTTMTVMATGAPCSAGPLLGPSMAREPGGRSPAFVQLAPLSSKVRLSSPSIKDLPAGRHSHAVSTAAMTRSSVGAGEPRMAPVCESLQGGSPSTTVTVTALEALLCPSATVTQVCSNPPCETHETGTTNTATTSNAGSAQRVCSNPPCETHETGTTHTATTATSNGGTGQPEGGQQPPAGRPCETHQTTSTGTTMSVSVGALLPDATSSHRTVESGLEVAAAPSVTPQAGTALLAPFPTQRVCSNPPCETHETGTTHTATTVTSNMSSNQDPPPAASDQGEVESTQGDSVNITSSSAITTTVSSTLTRAVTTVTQSTPVPGPSVPPPEELQVSPGPRQQLPPRQLLQSASTALMGESAEVLSASQTPELPAAVDLSSTGEPSSGQESAGSAVVATVVVQPPPPTQSEVDQLSLPQELMAEAQAGTTTLMVTGLTPEELAVTAAAEAAAQAAATEEAQALAIQAVLQAAQQAVMGTGEPMDTSEAAATVTQAELGHLSAEGQEGQATTIPIVLTQQELAALVQQQQLQEAQAQQQHHHLPTEALAPADSLNDPAIESNCLNELAGTVPSTVALLPSTATESLAPSNTFVAPQPVVVASPAKLQAAATLTEVANGIESLGVKPDLPPPPSKAPMKKENQWFDVGVIKGTNVMVTHYFLPPDDAVPSDDDLGTVPDYNQLKKQELQPGTAYKFRVAGINACGRGPFSEISAFKTCLPGFPGAPCAIKISKSPDGAHLTWEPPSVTSGKIIEYSVYLAIQSSQAGGELKSSTPAQLAFMRVYCGPSPSCLVQSSSLSNAHIDYTTKPAIIFRIAARNEKGYGPATQVRWLQETSKDSSGTKPANKRPMSSPEMKSAPKKSKADGQ

SEQ ID NO: 910358 - protein, 1723 aa, Homo sapiens
MASAVSPANLPAVLLQPRWKRVVGWSGPVPRPRHGHRAVAIKELIVVFGGGNEGIVDELHVYNTATNQWFIPAVRGDIPPGCAAYGFVCDGTRLLVFGGMVEYGKYSNDLYELQASRWEWKRLKAKTPKNGPPPCPRLGHSFSLVGNKCYLFGGLANDSEDPKNNIPRYLNDLYILELRPGSGVVAWDIPITYGVLPPPRESHTAVVYTEKDNKKSKLVIYGGMSGCRLGDLWTLDIDTLTWNKPSLSGVAPLPRSLHSATTIGNKMYVFGGWVPLVMDDVKVATHEKEWKCTNTLACLNLDTMAWETILMDTLEDNIPRARAGHCAVAINTRLYIWSGRDGYRKAWNNQVCCKDLWYLETEKPPPPARVQLVRANTNSLEVSWGAVATADSYLLQLQKYDIPATAATATSPTPNPVPSVPANPPKSPAPAAAAPAVQPLTQVGITLLPQAAPAPPTTTTIQVLPTVPGSSISVPTAARTQGVPAVLKVTGPQATTGTPLVTMRPASQAGKAPVTVTSLPAGVRMVVPTQSAQGTVIGSSPQMSGMAALAAAAAATQKIPPSSAPTVLSVPAGTTIVKTMAVTPGTTTLPATVKVASSPVMVSNPATRMLKTAAAQVGTSVSSATNTSTRPIITVHKSGTVTVAQQAQVVTTVVGGVTKTITLVKSPISVPGGSALISNLGKVMSVVQTKPVQTSAVTGQASTGPVTQIIQTKGPLPAGTILKLVTSADGKPTTIITTTQASGAGTKPTILGISSVSPSTTKPGTTTIIKTIPMSAIITQAGATGVTSSPGIKSPITIITTKVMTSGTGAPAKIITAVPKIATGHGQQGVTQVVLKGAPGQPGTILRTVPMGGVRLVTPVTVSAVKPAVTTLVVKGTTGVTTLGTVTGTVSTSLAGAGGHSTSASLATPITTLGTIATLSSQVINPTAITVSAAQTTLTAAGGLTTPTITMQPVSQPTQVTLITAPSGVEAQPVHDLPVSILASPTTEQPTATVTIADSGQGDVQPGTVTLVCSNPPCETHETGTTNTATTTVVANLGGHPQPTQVQFVCDRQEAAASLVTSTVGQQNGSVVRVCSNPPCETHETGTTNTATTATSNMAGQHGCSNPPCETHETGTTNTATTAMSSVGANHQRDARRACAAGTPAVIRISVATGALEAAQGSKSQCQTRQTSATSTTMTVMATGAPCSAGPLLGPSMAREPGGRSPAFVQLAPLSSKVRLSSPSIKDLPAGRHSHAVSTAAMTRSSVGAGEPRMAPVCESLQGGSPSTTVTVTALEALLCPSATVTQVCSNPPCETHETGTTNTATTSNAGSAQRVCSNPPCETHETGTTHTATTATSNGGTGQPEGGQQPPAGRPCETHQTTSTGTTMSVSVGALLPDATSSHRTVESGLEVAAAPSVTPQAGTALLAPFPTQRVCSNPPCETHETGTTHTATTVTSNMSSNQDPPPAASDQGEVESTQGDSVNITSSSAITTTVSSTLTRAVTTVTQSTPVPGPSVPPPEELQVSPGPRQQLPPRQLLQSASTALMGESAEVLSASQTPELPAAVDLSSTGEPSSGQESAGSAVVATVVVQPPPPTQSEVDQLSLPQELMAEAQAGTTTLMVTGLTPEELAVTAAAEAAAQAAATEEAQALAIQAVLQAAQQAVMGTGEPMDTSEAAATVTQAELGHLSAEGQEGQATTIPIVLTQQELAALVQQQQLQEAQAQQQHHPLPFLFLSVFKII

SEQ ID NO: 910359 - protein, 632 aa, Homo sapiens
MASAVSPANLPAVLLQPRWKRVVGWSGPVPRPRHGHRAVAIKELIVVFGGGNEGIVDELHVYNTATNQWFIPAVRGDIPPGCAAYGFVCDGTRLLVFGGMVEYGKYSNDLYELQASRWEWKRLKAKTPKNGPPPCPRLGHSFSLVGNKCYLFGGLANDSEDPKNNIPRYLNDLYILELRPGSGVVAWDIPITYGVLPPPRESHTAVVYTEKDNKKSKLVIYGGMSGCRLGDLWTLDIDTLTWNKPSLSGVAPLPRSLHSATTIGNKMYVFGGWVPLVMDDVKVATHEKEWKCTNTLACLNLDTMAWETILMDTLEDNIPRARAGHCAVAINTRLYIWSGRDGYRKAWNNQVCCKDLWYLETEKPPPPARVQLVRANTNSLEVSWGAVATADSYLLQLQKYDIPATAATATSPTPNPVPSVPANPPKSPAPAAAAPAVQPLTQVGITLLPQAAPAPPTTTTIQVLPTVPGSSISVPTAARTQGVPAVLKVTGPQATTGTPLVTMRPASQAGKAPVTVTSLPAGVRMVVPTQSAQGTVIGSSPQMSGMAALAAAAAATQKIPPSSAPTVLSVPAGTTIVKTMAVTPGTTTLPATVKVASSPVMVSVFRGLSLWSNKHSHSLRALELAVGPWAAE

SEQ ID NO: 910360 - protein, 341 aa, Homo sapiens
MASAVSPANLPAVLLQPRWKRVVGWSGPVPRPRHGHRAVAIKELIVVFGGGNEGIVDELHVYNTATNQWFIPAVRGDIPPGCAAYGFVCDGTRLLVFGGMVEYGKYSNDLYELQASRWEWKRLKAKTPKNGPPPCPRLGHSFSLVGNKCYLFGGLANDSEDPKNNIPRYLNDLYILELRPGSGVVAWDIPITYGVLPPPRESHTAVVYTEKDNKKSKLVIYGGMSGCRLGDLWTLDIDTLTWNKPSLSGVAPLPRSLHSATTIGNKMYVFGGWVPLVMDDVKVATHEKEWKCTNTLACLNLGMASSGSEWPVGGCRRLALLSLRAVWGVRGASWAPGSLWN

SEQ ID NO: 910361 - protein, 98 aa, Homo sapiens
TPRTFLLQQGTSLTPGHFLLHHKLPRVPSGGLLIPRFSLQVLILQASRWEWKRLKAKTPKNGPPPCPRLGHSFSLVGNKCYLFGGLANDSEDPKNNIP

SEQ ID NO: 910362 - protein, 522 aa, Homo sapiens
MPRKKAAAAAWEEPSSGNGTARAGPRKRGGPAGRKRERPERCSSSSGGGSSGDEDGLELDGAPGGGKRAARPATAGKAGGAAVVITEPEHTKERVKLEGSKCKGQLLIFGATNWDLIGRKEVPKQQAAYRNLGQNLWGPHRYGCLAGVRVRTVVSGSCAAHSLLITTEGKLWSWGRNEKGQLGHGDTKRVEAPRLIEGLSHEVIVSAACGRNHTLALTETGSVFAFGENKMGQLGLGNQTDAVPSPAQIMYNGQPITKMACGAEFSMIMDCKGNLYSFGCPEYGQLGHNSDGKFIARAQRIEYDCELVPRRVAIFIEKTKDGQILPVPNVVVRDVACGANHTLVLDSQKRVFSWGFGGYGRLGHAEQKDEMVPRLVKLFDFPGRGASQIYAGYTCSFAVSEVGGLFFWGATNTSRESTMYPKAVQDLCGWRIRSLACGKSSIIVAADESTISWGPSPTFGELGYGDHKPKSSTAAQEVKTLDGIFSEQVAMGYSHSLVIARDESETEKEKIKKLPEYNPRTL

SEQ ID NO: 910363 - protein, 109 aa, Homo sapiens
SPCEHTDTSLVLVLLLMAGSVVSTGHNSDGKFIARAQRIEYDCELVPRRVAIFIEKTKDGQILPVPNVVVRDVACGANHTVRLGFSHFLRVAPGWKGCLCSSFLTLGFG

SEQ ID NO: 910364 - protein, 522 aa, Homo sapiens; identical to SEQ ID NO: 910362

SEQ ID NO: 910365 - protein, 522 aa, Homo sapiens; identical to SEQ ID NO: 910362

SEQ ID NO: 910366 - protein, 112 aa, Homo sapiens
LGVIGRGYMYPKAVQDLCGWRIRSLACGKSSIIVAADESTISWGPSPTFGELGYGDHKPKSSTAAQEVKTLDGIFSEQVAMGYSHSLVIARDESETEKEKIKKLPEYNPRTL

SEQ ID NO: 910367 - protein, 115 aa, Homo sapiens
KWQLTLMPLSIAAWVQVWGCWPCSDSLPVCRKSSIIVAADESTISWGPSPTFGELGYGDHKPKSSTAAQEVKTLDGIFSEQVAMGYSHSLVIARDESETEKEKIKKLPEYNPRTL

SEQ ID NO: 910368 - protein, 109 aa, Homo sapiens
GTEGLKVQASWQKMVTAVASALSSKIPLSLLPMIQRYLEDKVTGPPPSKITLACFGSIRVTPSPLFLADGPRPVSVLFLPLAACTPTAFWLRHYRIGRVPPGGGLGICV

SEQ ID NO: 910369 - protein, 522 aa, Homo sapiens; identical to SEQ ID NO: 910362

SEQ ID NO: 910370 - protein, 522 aa, Homo sapiens; identical to SEQ ID NO: 910362

SEQ ID NO: 910371 - protein, 522 aa, Homo sapiens; identical to SEQ ID NO: 910362

SEQ ID NO: 910372 - protein, 90 aa, Homo sapiens
RLGTRLGVDRPRLWSLFLPPAWILPRAGRPVAETRGTVLLTQLPLVTFAWLWYQIVGITEESPSLRVSTDAVTATCVLVKCPSSPPCVLR

SEQ ID NO: 910373 - protein, 89 aa, Homo sapiens
NRRDECVIRTRLWSLFLPPAWILPRAGRPVAETRGTVLLTQLPLVTFAWLWYQIVGITEESPSLRVSTDAVTATCVLVKCPSSPPCVLR

SEQ ID NO: 910374 - protein, 522 aa, Homo sapiens; identical to SEQ ID NO: 910362

SEQ ID NO: 910375 - protein, 509 aa, Homo sapiens
MPRKKAAAAAWEEPSSGNGTARAGPRKRGGPAGRKRERPERCSSSSGGGSSGDEDGLELDGAPGGGKRAARPATAGKAGGAAVVITEPEHTKERVKLEGSKCKGQLLIFGATNWDLIGRKEVPKQQAAYRNLGQNLWGPHRYGCLAGVRVRTVVSGSCAAHSLLITTEGKLWSWGRNEKGQLGHGDTKRVEAPRLIEGLSHEVIVSAACGRNHTLALTETGSVFAFGENKMGQLGLGNQTDAVPSPAQIMYNGQPITKMACGAEFSMIMDCKGNLYSFGCPEYGQLGHNSDGKFIARAQRIEYDCELVPRRVAIFIEKTKDGQILPVPNVVVRDVACGANHTLVLDSQKRVFSWGFGGYGRLGHAEQKDEMVPRLVKLFDFPGRGASQIYAGYTCSFAVSEVGGLFFWGATNTSRESTMYPKAVQDLCGWRIRSLACGKSSIIVAADESTISWGPSPTFGELGYGDHKPKSSTAAQEVKTLDGIFSEQVSGGSCASSGTCPYPVVCHSS

SEQ ID NO: 910376 - protein, 128 aa, Homo sapiens
MNSNFGAEYGSRHNSDGKFIARAQRIEYDCELVPRRVAIFIEKTKDGQILPVPNVVVRDVACGANHTLVLDSQKRVFSWGFGGYGRLGHAEQKDEMVPRLVKLFDFPGRGASQIYAGYTCSFAVSEVG

SEQ ID NO: 910377 - protein, 522 aa, Homo sapiens; identical to SEQ ID NO: 910362

SEQ ID NO: 910378 - protein, 133 aa, Homo sapiens [sequence omitted]

SEQ ID NO: 910379 - protein, 522 aa, Homo sapiens; identical to SEQ ID NO: 910362

SEQ ID NO: 910380 - protein, 522 aa, Homo sapiens; identical to SEQ ID NO: 910362

SEQ ID NO: 910381 - protein, 522 aa, Homo sapiens; identical to SEQ ID NO: 910362

SEQ ID NO: 910382 - protein, 119 aa, Homo sapiens
KARYEAGCWIGRGDGPASSQVHSPVLARRISPFCASLDRLVLWSLFLPPAWILPRAGRPVAETRGTVLLTQLPLVTFAWLWYQIVGITEESPSLRVSTDAVTATCVLVKCPSSPPCVLR

SEQ ID NO: 910383 - protein, 91 aa, Homo sapiens
EKTRLGGPVVMAELWSLFLPPAWILPRAGRPVAETRGTVLLTQLPLVTFAWLWYQIVGITEESPSLRVSTDAVTATCVLVKCPSSPPCVLR

SEQ ID NO: 910384 - protein, 522 aa, Homo sapiens; identical to SEQ ID NO: 910362

SEQ ID NO: 910385 - protein, 371 aa, Homo sapiens
MPRKKAAAAAWEEPSSGNGTARAGPRKRGGPAGRKRERPERCSSSSGGGSSGDEDGLELDGAPGGGKRAARPATAGKAGGAAVVITEPEHTKERVKLEGSKCKGQLLIFGATNWDLIGRKEVPKQQAAYRNLGQNLWGPHRYGCLAGVRVRTVVSGSCAAHSLLITTEGKLWSWGRNEKGQLGHGDTKRVEAPRLIEGLSHEVIVSAACGRNHTLALTETGSVFAFGENKMGQLGLGNQTDAVPSPAQIMYNGQPITKMACGAEFSMIMDCKGNLYSFGCPEYGQLGHNSDGKFIARAQRIEYDCELVPRRVAIFIEKTKDGQILPVPNVVVRDVACGANHTVRLGFSHFLRVAPGWKGCLCSSFLTLGFG

SEQ ID NO: 910386 - protein, 297 aa, Homo sapiens; identical to SEQ ID NO: 755456

SEQ ID NO: 910387 - protein, 297 aa, Homo sapiens; identical to SEQ ID NO: 755456

SEQ ID NO: 910388 - protein, 297 aa, Homo sapiens; identical to SEQ ID NO: 755456

SEQ ID NO: 910389 - protein, 240 aa, Homo sapiens
MEDYTKIEKIGEGTYGVVYKGRHKTTGQVVAMKKIRLESEEEGVPSTAIREISLLKELRHPNIVSLQDVLMQDSRLYLIFEFLSMDLKKYLDSIPPGQYMDSSLVKVVTLWYRSPEVLLGSARYSTPVDIWSIGTIFAELATKKPLFHGDSEIDQLFRIFRALGTPNNEVWPEVESLQDYKNTFPKWKPGSLASHVKNLDENGLDLLSKMLIYDPAKRISGKMALNHPYFNDLDNQIKKM

SEQ ID NO: 910390 - protein, 144 aa, Homo sapiens
MEDYTKIEKIGEGTYGVVYKGRHKTTGQVVAMKKIRLESEEEGVPSTAIREISLLKELRHPNIVSLQDVLMQDSRLYLIFEFLSMDLKKYLDSIPPGQYMDSSLVKSYLYQILQGIVFCHSRRVLHRDLKPCQSFWNTYQSIYT

SEQ ID NO: 910391 - protein, 109 aa, Homo sapiens
MEDYTKIEKIGEGTYGVVYKGRHKTTGQVVAMKKIRLESEEEGVPSTAIREISLLKELRHPNIVSLQDVLMQDSRLYLIFEFLSMDLKKYLDSIPPGQYMDSSLVKVKA

SEQ ID NO: 910392 - protein, 297 aa, Homo sapiens; identical to SEQ ID NO: 755456

SEQ ID NO: 910393 - protein, 297 aa, Homo sapiens; identical to SEQ ID NO: 755456

SEQ ID NO: 910394 - protein, 246 aa, Homo sapiens
GSEEILGKKLKDEIKPGILHKHILKTAIFEFLSMDLKKYLDSIPPGQYMDSSLVKSYLYQILQGIVFCHSRRVLHRDLKPQNLLIDDKGTIKLADFGLARAFGIPIRVYTHEVVTLWYRSPEVLLGSARYSTPVDIWSIGTIFAELATKKPLFHGDSEIDQLFRIFRALGTPNNEVWPEVESLQDYKNTFPKWKPGSLASHVKNLDENGLDLLSKMLIYDPAKRISGKMALNHPYFNDLDNQIKKM

SEQ ID NO: 910395 - protein, 144 aa, Homo sapiens; identical to SEQ ID NO: 910390

SEQ ID NO: 910396 - protein, 584 aa, Homo sapiens
PSHPPGEAAGDPLSAPWEKAPAMSNQYQEEGCSERPECKSKSPTLLSSYCIDSILGRRSPCKMRLLGAAQSLPAPLTSRADPEKAVQGSPKSSSAPFEAELHLPPKLRRLYGPGGGRLLQGAAAAAAAAAAAAAAAATATAGPRGEAPPPPPPTARPGERPDGAGAAAAAAAAAAAAWDTLKISQAPQVSISRSKSYRENGAPFVPPPPALDELGGPGGVTHPEERLGVAGGPGSAPAAGGGTGTEDDEEELLEDEEDEDEEEELLEDDEEELLEDDARALLKEPRRCPVAATGAVAAAAAAAVATEGGELSPKEELLLHPEDAEGKDGEDSVCLSAGSDSEEGLLKRKQRRYRTTFTSYQLEELERAFQKTHYPDVFTREELAMRLDLTEARVQVWFQNRRAKWRKREKAGAQTHPPGLPFPGPLSATHPLSPYLDASPFPPHHPALDSAWTAAAAAAAAAFPSLPPPPGSASLPPSGAPLGLSTFLGAAVFRHPAFISPAFGRLFSTMAPLTSASTAAALLRQPTPAVEGAVASGALADPATAAADRRASSIAALRLKAKEHAAQLTQLNILPGTSTGKEVC

SEQ ID NO: 910397 - protein, 220 aa, Homo sapiens
PPSLLLLSSPFLLPHSLLGDSVIAAPGLGINRPFKRNHRIHATGPWGLRSPRRPVDPGPARPLGEYLDSVFSPQSVPCPRKALSAGSSFRPRPLPTSPPRPIRVPWVPRPSAAPATSGGRRCPGAAHSSRGHDRAVCSPCRLFSTMAPLTSASTAAALLRQPTPAVEGAVASGALADPATAAADRRASSIAALRLKAKEHAAQLTQLNILPGTSTGKEVC

SEQ ID NO: 910398 - protein, 229 aa, Homo sapiens
PSHPPGEAAGDPLSAPWEKAPAMSNQYQEEGCSERPECKSKSPTLLSSYCIDSILGRRSPCKMRLLGAAQSLPAPLTSRADPEKAVQGSPKSSSAPFEAELHRRRRRLPEPTSASGLGQPAAQRGAAGPEHFPRSGSVPTPSFHQPGIRQALFHNGPPDQRVDRGRALRQPTPAVEGAVASGALADPATAAADRRASSIAALRLKAKEHAAQLTQLNILPGTSTGKEVC

SEQ ID NO: 910399 - protein, 110 aa, Homo sapiens
LTQEGRREKPWPVSLLLSQKQAPGRKKLWKALALLEAIIIGKGLQHAKFASHTFVKKTVTWQGRWDSQQVQHIWKSPYYTRFSNSTSFLGNAVFKERAFFEPWLPVTLML

SEQ ID NO: 910400 - protein, 228 aa, Homo sapiens
LTQEGRREKPWPVSLLLSQKQAPGRKKLWKALALLEAIIIGKGLQHAKFASHTFVKKTVTWQGRWDSQQVQHIWKSPYYTRFSNSTSFLGNDYRVGGIFSAPRAQGLWSHGIREGICGKKYSEQVPDVLQLNEIFKTLNSKNCPSLKDKPKVIIIQACHVGEANVFENTRHSNTVLICIHHEFSVYVCFLVSKNIHCQHSRCGFCELYDWLVDICFIFKSETLMFGGF

SEQ ID NO: 910401 - protein, 140 aa, Homo sapiens
LTQEGRREKPWPVSLLLSQKQAPGRKKLWKALALLEAIIIGKGLQHAKFASHTFVKKTVTWQGRWDSQQVQHIWKSPYYTRFSNSTSFLAVSPLFCRSAAIRWGSTTDTVHLGIIDGGCRTAKIAACSFLWKLRPREALT

SEQ ID NO: 910402 - protein, 228 aa, Homo sapiens; identical to SEQ ID NO: 910400

SEQ ID NO: 910403 - protein, 142 aa, Homo sapiens
LTQEGRREKPWPVSLLLSQKQAPGRKKLWKALALLEAIIIGKGLQHAKFASHTFVKKTVTWQGRWDSQQVQHIWKSPYYTRFSNSTSFLENHGVVLVKDSVPASENISLPTPGDFEDDAINQVHIEKDFIAFCSSTLGSTFI

SEQ ID NO: 910404 - protein, 854 aa, Homo sapiens
MLAKQEAQMNLMKQAVEIYVHHEIYNLIFKYVGTMEASEDAAFNKITRSLQDLQQKDIGVKPEFSFNIPRAKRELAQLNKCTSPQQKLVCLRKVVQLITQSPSQRVNLETMCADDLLSVLLYLLVKTEIPNWMANLSYIKNFRFSSLAKDELGYCLTSFEAAIEYIRQGSLSAKPPESEGFGDRLFLKQRMSLLSQMTSSPTDCLFKHIASGNQKEVERLLSQEDHDKDTVQKMCHPLCFCDDCEKLVSGRLNDPSVVTPFSRDDRGHTPLHVAAVCGQASLIDLLVSKGAMVNATDYHGATPLHLACQKGYQSVTLLLLHYKASAEVQDNNGNTPLHLACTYGHEDCVKALVYYDVESCRLDIGNEKGDTPLHIAARWGYQGVIETLLQNGASTEIQNRLKETPLKCALNSKILSVMEAYHLSFERRQKSSEAPVQSPQRSVDSISQESSTSSFSSMSAGSRQEETKKDYREVEKLLRAVADGDLEMVRYLLEWTEEDLEDAEDTVSAADPEFCHPLCQCPKCAPAQKRLAKVPASGLGVNVTSQDGSSPLHVAALHGRADLIRLLLKHGANAGARNADQAVPLHLACQQGHFQVVKCLLDSNAKPNKKDLSGNTPLIYACSGGHHELVALLLQHGASINASNNKGNTALHEAVIEKHVFVVELLLLHGASVQVLNKRQRTAVDCAEQNSKIMELLQVVPSCVASLDDVAETDRKEYVTVKIRKKWNSKLYDLPDEPFTRQFYFVHSAGQFKGKTSREIMARDRSVPNLTEGSLHEPGRQSVTLRQNNLPAQSGSHAAEKGNSDWPERPGLTQTGPGHRRMLRRHTVEDAVVSQGPEAAGPLSTPQEVSASRS

SEQ ID NO: 910405 - protein, 1050 aa, Homo sapiens
MALYDEDLLKNPFYLALQKCRPDLCSKVAQIHGIVLVPCKGSLSSSIQSTCQFESYILIPVEEHFQTLNGKDVFIQGNRIKLGAGFACLLSVPILFEETFYNEKEESFSILCIAHPLEKRESSEEPLAPSDPFSLKTIEDVREFLGRHSERFDRNIASFHRTFRECERKSLRHHIDSANALYTKCLQQLLRDSHLKMLAKQEAQMNLMKQAVEIYVHHEIYNLIFKYVGTMEASEDAAFNKITRSLQDLQQKDIGVKPEFSFNIPRAKRELAQLNKCTSPQQKLVCLRKVVQLITQSPSQRVNLETMCADDLLSVLLYLLVKTEIPNWMANLSYIKNFRFSSLAKDELGYCLTSFEAAIEYIRQGSLSAKPPESEGFGDRLFLKQRMSLLSQMTSSPTDCLFKHIASGNQKEVERLLSQEDHDKDTVQKMCHPLCFCDDCEKLVSGRLNDPSVVTPFSRDDRGHTPLHVAAVCGQASLIDLLVSKGAMVNATDYHGATPLHLACQKGYQSVTLLLLHYKASAEVQDNNGNTPLHLACTYGHEDCVKALVYYDVESCRLDIGNEKGDTPLHIAARWGYQGVIETLLQNGASTEIQNRLKETPLKCALNSKILSVMEAYHLSFERRQKSSEAPVQSPQRSVDSISQESSTSSFSSMSAGSRQEETKKDYREVEKLLRAVADGDLEMVRYLLEWTEEDLEDAEDTVSAADPEFCHPLCQCPKCAPAQKRLAKVPASGLGVNVTSQDGSSPLHVAALHGRADLIRLLLKHGANAGARNADQAVPLHLACQQGHFQVVKCLLDSNAKPNKKDLSGNTPLIYACSGGHHELVALLLQHGASINASNNKGNTALHEAVIEKHVFVVELLLLHGASVQVLNKRQRTAVDCAEQNSKIMELLQVVPSCVASLDDVAETDRKEYVTVKIRKKWNSKLYDLPDEPFTRQFYFVHSAGQFKGKTSREIMARDRSVPNLTEGSLHEPGRQSVTLRQNNLPAQSGSHAAEKGNSDWPERPGLTQTGPGHRRMLRRHTVEDAVVSQGPEAAGPLSTPQEVSASRS

SEQ ID NO: 910406 - protein, 744 aa, Homo sapiens
MCADDLLSVLLYLLVKTEIPNWMANLSYIKNFRFSSLAKDELGYCLTSFEAAIEYIRQGSLSAKPPESEGFGDRLFLKQRMSLLSQMTSSPTDCLFKHIASGNQKEVERLLSQEDHDKDTVQKMCHPLCFCDDCEKLVSGRLNDPSVVTPFSRDDRGHTPLHVAAVCGQASLIDLLVSKGAMVNATDYHGATPLHLACQKGYQSVTLLLLHYKASAEVQDNNGNTPLHLACTYGHEDCVKALVYYDVESCRLDIGNEKGDTPLHIAARWGYQGVIETLLQNGASTEIQNRLKETPLKCALNSKILSVMEAYHLSFERRQKSSEAPVQSPQRSVDSISQESSTSSFSSMSAGSRQEETKKDYREVEKLLRAVADGDLEMVRYLLEWTEEDLEDAEDTVSAADPEFCHPLCQCPKCAPAQKRLAKVPASGLGVNVTSQDGSSPLHVAALHGRADLIRLLLKHGANAGARNADQAVPLHLACQQGHFQVVKCLLDSNAKPNKKDLSGNTPLIYACSGGHHELVALLLQHGASINASNNKGNTALHEAVIEKHVFVVELLLLHGASVQVLNKRQRTAVDCAEQNSKIMELLQVVPSCVASLDDVAETDRKEYVTVKIRKKWNSKLYDLPDEPFTRQFYFVHSAGQFKGKTSREIMARDRSVPNLTEGSLHEPGRQSVTLRQNNLPAQSGSHAAEKGNSDWPERPGLTQTGPGHRRMLRRHTVEDAVVSQGPEAAGPLSTPQEVSASRS

SEQ ID NO: 910407 - protein, 220 aa, Homo sapiens
MHGASINASNNKGNTALHEAVIEKHVFVVELLLLHGASVQVLNKRQRTAVDCAEQNSKIMELLQVVPSCVASLDDVAETDRKEYVTVKIRKKWNSKLYDLPDEPFTRQFYFVHSAGQFKGKTSREIMARDRSVPNLTEGSLHEPGRQSVTLRQNNLPAQSGSHAAEKGNSDWPERPGLTQTGPGHRRMLRRHTVEDAVVSQGPEAAGPLSTPQEVSASRS

SEQ ID NO: 910408 - protein, 1050 aa, Homo sapiens; identical to SEQ ID NO: 910405

SEQ ID NO: 910409 - protein, 135 aa, Homo sapiens [sequence omitted]

SEQ ID NO: 910410 - protein, 252 aa, Homo sapiens
MALYDEDLLKNPFYLALQKCRPDLCSKVAQIHGIVLVPCKGSLSSSIQSTCQFESYILIPVEEHFQTLNGKDVFIQGNRIKLGAGFACLLSVPILFEETFYNEKEESFSILCIAHPLEKRESSEEPLAPSDPFSLKTIEDVREFLGRHSERFDRNIASFHRTFRECERKSLRHHIDSANALYTKCLQQLLRDSHLKMLAKQEAQMNLMKQAVEIYVHHEIYNLIFKYVGTMEASEVGSQLLSPKMEAFFCAF

SEQ ID NO: 910411 - protein, 1050 aa, Homo sapiens; identical to SEQ ID NO: 910405

SEQ ID NO: 910412 - protein, 1017 aa, Homo sapiens
REFIILLFEFIILPREFMILLREFIILLEEHFQTLNGKDVFIQGNRIKLGAGFACLLSVPILFEETFYNEKEESFSILCIAHPLEKRESSEEPLAPSDPFSLKTIEDVREFLGRHSERFDRNIASFHRTFRECERKSLRHHIDSANALYTKCLQQLLRDSHLKMLAKQEAQMNLMKQAVEIYVHHEIYNLIFKYVGTMEASEDAAFNKITRSLQDLQQKDIGVKPEFSFNIPRAKRELAQLNKCTSPQQKLVCLRKVVQLITQSPSQRVNLETMCADDLLSVLLYLLVKTEIPNWMANLSYIKNFRFSSLAKDELGYCLTSFEAAIEYIRQGSLSAKPPESEGFGDRLFLKQRMSLLSQMTSSPTDCLFKHIASGNQKEVERLLSQEDHDKDTVQKMCHPLCFCDDCEKLVSGRLNDPSVVTPFSRDDRGHTPLHVAAVCGQASLIDLLVSKGAMVNATDYHGATPLHLACQKGYQSVTLLLLHYKASAEVQDNNGNTPLHLACTYGHEDCVKALVYYDVESCRLDIGNEKGDTPLHIAARWGYQGVIETLLQNGASTEIQNRLKETPLKCALNSKILSVMEAYHLSFERRQKSSEAPVQSPQRSVDSISQESSTSSFSSMSAGSRQEETKKDYREVEKLLRAVADGDLEMVRYLLEWTEEDLEDAEDTVSAADPEFCHPLCQCPKCAPAQKRLAKVPASGLGVNVTSQDGSSPLHVAALHGRADLIRLLLKHGANAGARNADQAVPLHLACQQGHFQVVKCLLDSNAKPNKKDLSGNTPLIYACSGGHHELVALLLQHGASINASNNKGNTALHEAVIEKHVFVVELLLLHGASVQVLNKRQRTAVDCAEQNSKIMELLQVVPSCVASLDDVAETDRKEYVTVKIRKKWNSKLYDLPDEPFTRQFYFVHSAGQFKGKTSREIMARDRSVPNLTEGSLHEPGRQSVTLRQNNLPAQSGSHAAEKGNSDWPERPGLTQTGPGHRRMLRRHTVEDAVVSQGPEAAGPLSTPQEVSASRS

SEQ ID NO: 910413 - protein, 304 aa, Homo sapiens
LYDALVAPAGSNVYRGVSFLIAARWGYQGVIETLLHLACQQGHFQVVKCLLDSNAKPNKKDLSGNTPLIYACSGGHHELVALLLQHGASINASNNKGNTALHEAVIEKHVFVVELLLLHGASVQVLNKRQRTAVDCAEQNSKIMELLQVVPSCVASLDDVAETDRKEYVTVKIRKKWNSKLYDLPDEPFTRQFYFVHSAGQFKGKTSREIMARDRSVPNLTEGSLHEPGRQSVTLRQNNLPAQSGSHAAEKGNSDWPERPGLTQTGPGHRRMLRRHTVEDAVVSQGPEAAGPLSTPQEVSASRS

SEQ ID NO: 910414 - protein, 161 aa, Homo sapiens
MELLQVVPSCVASLDDVAETDRKEYVTVKIRKKWNSKLYDLPDEPFTRQFYFVHSAGQFKGKTSREIMARDRSVPNLTEGSLHEPGRQSVTLRQNNLPAQSGSHAAEKGNSDWPERPGLTQTGPGHRRMLRRHTVEDAVVSQGPEAAGPLSTPQEVSASRS

SEQ ID NO: 910415 - protein, 1050 aa, Homo sapiens; identical to SEQ ID NO: 910405

SEQ ID NO: 910416 - protein, 81 aa, Homo sapiens
MSAGSRQEETKKDYREVRLPEEGLGRGGLGGPGQWCPAEEPWPDKGRPLSLLAHAEAAAALWWPRLVPSSWAQQHLAVLYI

SEQ ID NO: 910417 - protein, 432 aa, Homo sapiens
MISAAQLLDELMGRDRNLAPDEKRSNVRWDHESVCKYYLCGFCPAELFTNTRSDLGPCEKIHDENLRKQYEKSSRFMKVGYERDFLRYLQSLLAEVERRIRRGHARLALSQNQQSSGAAGPTGKNEEKIQVLTDKIDVLLQQIEELGSEGKVEEAQGMMKLVEQLKEERELLRSTTSTIESFAAQEKQMEVCEVCGAFLIVGDAQSRVDDHLMGKQHMGYAKIKATVEELKEKLRKRTEEPDRDERLKKEKQEREEREKEREREREERERKRRREEEEREKERARDRERRKRSRSRSRHSSRTSDRRCSRSRDHKRSRSRERRRSRSRDRRRSRSHDRSERKHRSRSRDRRRSKSRDRKSYKHRSKSRDREQDRKSKEKEKRGSDDKKSSVKSGSREKQSEDTNTESKESDTKNEVNGTSEDIKSEGDTQSN

SEQ ID NO: 910418 - protein, 356 aa, Homo sapiens [sequence omitted]

SEQ ID NO: 910419 - protein, 356 aa, Homo sapiens [sequence omitted]

SEQ ID NO: 910420 - protein, 432 aa, Homo sapiens; identical to SEQ ID NO: 910417

SEQ ID NO: 910421 - protein, 432 aa, Homo sapiens; identical to SEQ ID NO: 910417

SEQ ID NO: 910422 - protein, 432 aa, Homo sapiens; identical to SEQ ID NO: 910417

SEQ ID NO: 910423 - protein, 415 aa, Homo sapiens
LNALYFLILPGAAKNIWEDYHECVIMSDTGLESCKQPFTTIPSKIVTNGFSHHPPARILSISLILTKSPRFTICIEQLSILSHELVFFPTCPVLALTPTGKYKAVELKAVYFQVLAEKIDVLLQQIEELGSEGKVEEAQGMMKLVEQLKEERELLRSTTSTIESFAAQEKQMEVCEVCGAFLIVGDAQSRVDDHLMGKQHMGYAKIKATVEELKEKLRKRTEEPDRDERLKKEKQEREEREKEREREREERERKRRREEEEREKERARDRERRKRSRSRSRHSSRTSDRRCSRSRDHKRSRSRERRRSRSRDRRRSRSHDRSERKHRSRSRDRRRSKSRDRKSYKHRSKSRDREQDRKSKEKEKRGSDDKKSSVKSGSREKQSEDTNTESKESDTKNEVNGTSEDIKSEGDTQSN

SEQ ID NO: 910424 - protein, 432 aa, Homo sapiens; identical to SEQ ID NO: 910417

SEQ ID NO: 910425 - protein, 432 aa, Homo sapiens; identical to SEQ ID NO: 910417

SEQ ID NO: 910426 - protein, 185 aa, Homo sapiens
MNERQEREEREKEREREREERERKRRREEEEREKERARDRERRKRSRSRSRHSSRTSDRRCSRSRDHKRSRSRERRRSRSRDRRRSRSHDRSERKHRSRSRDRRRSKSRDRKSYKHRSKSRDREQDRKSKEKEKRGSDDKKSSVKSGSREKQSEDTNTESKESDTKNEVNGTSEDIKSEGDTQSN

SEQ ID NO: 910427 - protein, 159 aa, Homo sapiens
MVGGGLYTCPELVGRGPILDRSRSRHSSRTSDRRCSRSRDHKRSRSRERRRSRSRDRRRSRSHDRSERKHRSRSRDRRRSKSRDRKSYKHRSKSRDREQDRKSKEKEKRGSDDKKSSVKSGSREKQSEDTNTESKESDTKNEVNGTSEDIKSEGDTQSN

SEQ ID NO: 910428 - protein, 432 aa, Homo sapiens; identical to SEQ ID NO: 910417

SEQ ID NO: 910429 - protein, 93 aa, Homo sapiens
CSLLLLVDSEVSPTRDTFGHEVEKEGGAEVEIDEEAEAMIDQKENTDLEVGIEEDQKAGIESHISTGAKVGTENKIENPRRKKRGDLMIKKVV

SEQ ID NO: 910430 - protein, 432 aa, Homo sapiens; identical to SEQ ID NO: 910417

SEQ ID NO: 910431 - protein, 346 aa, Homo sapiens
MISAAQLLDELMGRDRNLAPDEKRSNVRWDHESVCKYYLCGFCPAELFTNTRSDLGPCEKIHDENLRKQYEKSSRFMKVGYERDFLRYLQSLLAEVERRIRRGHARLALSQNQQSSGAAGPTGKNEEKIQVLTDKIDVLLQQIEELGSEGKVEEAQGMMKLVEQLKEERELLRSTTSTIESFAAQEKQMEVCEVCGAFLIVGDAQSRVDDHLMGKQHMGYAKIKATVEELKEKLRKRTEEPDRDERLKKEKQEREEREKEREREREERERKRRREEEEREKERARDRERRKRSRSRSRHSSRTSDRRCSRSRDHKRSRSRERRRSRERKRRREEEEREKERARDKK

SEQ ID NO: 910432 - protein, 487 aa, Homo sapiens
MISAAQLLDELMGRDRNLAPDEKRSNVRWDHESVCKYYLCGFCPAELFTNTRSDLGPCEKIHDENLRKQYEKSSRFMKVGYERDFLRYLQSLLAEVERRIRRGHARLALSQNQQSSGAAGPTGKNEEKIQVLTDKIDVLLQQIEELGSEGKVEEAQGMMKLVEQLKEERELLRSTTSTIESFAAQEKQMEVCEVCGAFLIVGDAQSRVDDHLMGKQHMGYAKIKATVEELKEKLRKRTEEPDRDERLKKEKQEREEREKEREREREERERKRRREEEEREKERARDRERRKRSRSRSRHSSRTSDRRCSRSRDHKRSRSRERRRSRSRDRRRSRSHDRSERKHRSRSRDRRRSKSRDRKSYKHRSKSRDREQDRKSKEKEKRGSDDKKSSVKSGSREKQSEDTNTESKESDTKNEVNGTSEDIKSQRKYAQMKMELSRVRRHTKASSEGKDSVVLQNILRYIVLSQLFCSRLVPPLVCLFGNYRPHL

SEQ ID NO: 910433 - protein, 401 aa, Homo sapiens
MISAAQLLDELMGRDRNLAPDEKRSNVRWDHESVCKYYLCGFCPAELFTNTRSDLGPCEKIHDENLRKQYEKSSRFMKVGYERDFLRYLQSLLAEVERRIRRGHARLALSQNQQSSGAAGPTGKNEEKIQVLTDKIDVLLQQIEELGSEGKVEEAQGMMKLVEQLKEERELLRSTTSTIESFAAQEKQMEVCEVCGAFLIVGDAQSRVDDHLMGKQHMGYAKIKATVEELKEKLRKRTEEPDRDERLKKEKQEREEREKEREREREERERKRRREEEEREKERARDRERRKRSRSRSRHSSRTSDRRCSRSRDHKRSRSRERRRSRSRDRRRSRSHDRSERKHRSRSRDRRRSKSRDRKSYKHRSKSRDREQDRKSKEKAEDKIIGLTTSPLRDNKTTLPH

SEQ ID NO: 910434 - protein, 432 aa, Homo sapiens; identical to SEQ ID NO: 910417

SEQ ID NO: 910435 - protein, 432 aa, Homo sapiens; identical to SEQ ID NO: 910417

SEQ ID NO: 910436 - protein, 432 aa, Homo sapiens; identical to SEQ ID NO: 910417

SEQ ID NO: 910437 - protein, 381 aa, Homo sapiens
MISAAQLLDELMGRDRNLAPDEKRSNVRWDHESVCKYYLCGFCPAELFTNTRSDLGPCEKIHDENLRKQYEKSSRFMKVGYERDFLRYLQSLLAEVERRIRRGHARLALSQNQQSSGAAGPTGKNEEKIQVLTDKIDVLLQQIEELGSEGKVEEAQGMMKLVEQLKEERELLRSTTSTIESFAAQEKQMEVCEVCGAFLIVGDAQSRVDDHLMGKQHMGYAKIKATVEELKEKLRKRTEEPDRDERLKKEKQEREEREKEREREREERERKRRREEEEREKERARDRERRKRSRSRSRHSSRTSDRRCSRSRDHKRSRSRERRRSRSRDRRRSRSHDRSERKHRSRSRDRRRSKSRDRKSYKHRSKSRDREQDRKSKEKAA

SEQ ID NO: 910438 - protein, 432 aa, Homo sapiens; identical to SEQ ID NO: 910417

SEQ ID NO: 910439 - protein, 432 aa, Homo sapiens; identical to SEQ ID NO: 910417

SEQ ID NO: 910440 - protein, 432 aa, Homo sapiens; identical to SEQ ID NO: 910417

SEQ ID NO: 910441 - protein, 432 aa, Homo sapiens; identical to SEQ ID NO: 910417

SEQ ID NO: 910442 - protein, 141 aa, Homo sapiens
CSLLLLVDSEVSPTRDTFGHEVEKEGGAEVEIDEEAEAMIDQKENTDLEVGIEEDQKAGIESHISTGAKVGTENKIENPRRKQTQNKEGTLTDYPQTRTCELSWYVDEQRYDVTRPANHLNFDTDTRDYLHDTDWSIGDPG

SEQ ID NO: 910443 - protein, 557 aa, Homo sapiens
AALGAGSRRAARSAEPELDAAAATATCAAVIKMSWHPQYRSSKFRHVFGKPASKENCYDSVPITRSVHDNHFCAVNPHFIAVVTECAGGGAFLVIPLHQTGKLDPHYPKVCGHRGNVLDVKWNPFDDFEIASCSEDATIKIWSIPKQLLTRNLTAYRKELVGHARRVGLVEWHPTAANILFSAGYDYKVMIWNLDTKESVITSPMSTISCHQDVILSMSFNTNGSLLATTCKDRKIRVIDPRAGTVLQEASYKGHRASKVLFLGNLKKLMSTGTSRWNNRQVALWDQDNLSVPLMEEDLDGSSGVLFPFYDADTSMLYVVGKGDGNIRYYEVSADKPHLSYLTEYRSYNPQKGIGVMPKRGLDVSSCEIFRFYKLITTKSLIEPISMIVPRRSESYQEDIYPPTAGAQPSLTAQEWLSGMNRDPILVSLRPGSELLRPHPLPAERPIFNSMAPASPRLLNQTEKLAAEDGWRSSSLLEEKMPRWAAEHRLEEKKTWLTNGFDVFECPPPKTENELLQMFYRQQEEIRRLRELLTQREVQAKQLELEIKNLRMGSEQL

SEQ ID NO: 910444 - protein, 557 aa, Homo sapiens; identical to SEQ ID NO: 910443

SEQ ID NO: 910445 - protein, 501 aa, Homo sapiens
AALGAGSRRAARSAEPELDAAAATATCAAVIKMSWHPQYRSSKFRHVFGKPASKENCYDSVPITRSVHDNHFCAVNPHFIAVVTECAGGGAFLVIPLHQTGKLDPHYPKVCGHRGNVLDVKWNPFDDFEIASCSEDATIKIWSIPKQLLTRNLTAYRKELVGHARRVGLVEWHPTAANILFSAGYDYKVMIWNLDTKESVITSPMSTISCHQDVILSMSFNTNGSLLATTCKDRKIRVIDPRAGTVLQEASYKGHRASKVLFLGNLKKLMSTGTSRWNNRQVALWDQDNLSVPLMEEDLDGSSGVLFPFYDADTSMLYVVGKGDGNIRYYEVSADKPHLSYLTEYRSYNPQKGIGVMPKRGLDVSSCEIFRFYKLITTKSLIEPISMIVPRRSESYQEDIYPPTAGAQPSLTAQEWLSGMNRDPILVSLRPGSELLRPHPLPAERPIFNSMAPASPRLLNQTEKLAAEDGWRSSSLLEEKMPSCCRCSTGNRRRSEGSGSC

SEQ ID NO: 910446 - protein, 525 aa, Homo sapiens
MSWHPQYRSSKFRHVFGKPASKENCYDSVPITRSVHDNHFCAVNPHFIAVVTECAGGGAFLVIPLHQTGKLDPHYPKVCGHRGNVLDVKWNPFDDFEIASCSEDATIKIWSIPKQLLTRNLTAYRKELVGHARRVGLVEWHPTAANILFSAGYDYKVMIWNLDTKESVITSPMSTISCHQDVILSMSFNTNGSLLATTCKDRKIRVIDPRAGTVLQEASYKGHRASKVLFLGNLKKLMSTGTSRWNNRQVALWDQDNLSVPLMEEDLDGSSGVLFPFYDADTSMLYVVGKGDGNIRYYEVSADKPHLSYLTEYRSYNPQKGIGVMPKRGLDVSSCEIFRFYKLITTKSLIEPISMIVPRRSESYQEDIYPPTAGAQPSLTAQEWLSGMNRDPILVSLRPGSELLRPHPLPAERPIFNSMAPASPRLLNQTEKLAAEDGWRSSSLLEEKMPRWAAEHRLEEKKTWLTNGFDVFECPPPKTENELLQMFYRQQEEIRRLRELLTQREVQAKQLELEIKNLRMGSEQL

SEQ ID NO: 910447 - protein, 557 aa, Homo sapiens; identical to SEQ ID NO: 910443

SEQ ID NO: 910448 - protein, 154 aa, Homo sapiens
  misc_feature (36)..(36): Xaa can be any naturally occurring amino acid
MSTTDEEDGRPSNPESSVEIDTIDIALRACQDITRXLVRAAVCAVSLGKGTRTKSTDTHAVGVTPSRATRDVWMAPQEKRLSVERDGRSDWYFAHNAPRTEEHHVEMQFACPYVCKRVTGQEIRRLRELLTQREVQAKQLELEIKNLRMGSEQL

SEQ ID NO: 910449 - protein, 653 aa, Homo sapiens
LGFVSSAASERGCSSCVPTPGSAMAELCPLAEELSCSICLEPFKEPVTTPCGHNFCGSCLNETWAVQGSPYLCPQCRAVYQARPQLHKNTVLCNVVEQFLQADLAREPPADVWTPPARASAPSPNAQVACDHCLKEAAVKTCLVCMASFCQEHLQPHFDSPAFQDHPLQPPVRDLLRRKCSQHNRLREFFCPEHSECICHICLVEHKTCSPASLSQASADLEATLRHKLTVMYSQINGASRALDDVRNRQQDVRMTANRKVEQLQQEYTEMKALLDASETTSTRKIKEEEKRVNSKFDTIYQILLKKKSEIQTLKEEIEQSLTKRDEFEFLEKASKLRGISTKPVYIPEVELNHKLIKGIHQSTIDLKNELKQCIGRLQELTPSSGDPGEHDPASTHKSTRPVKKVSKEEKKSKKPPPVPALPSKLPTFGAPEQLVDLKQAGLEAAAKATSSHPNSTSLKAKVLETFLAKSRPELLEYYIKVILDYNTAHNKVALSECYTVASVAEMPQNYRPHPQRFTYCSQVLGLHCYKKGIHYWEVELQKNNFCGVGICYGSMNRQGPESRLGRNSASWCVEWFNTKISAWHNNVEKTLPSTKATRVGVLLNCDHGFVIFFAVADKVHLMYKFRVDFTEALYPAFWVFSAGATLSICSPK

SEQ ID NO: 910450 - protein, 653 aa, Homo sapiens; identical to SEQ ID NO: 910449

SEQ ID NO: 910451 - protein, 759 aa, Homo sapiens
LGFVSSAASERGCSSCVPTPGSAMAELCPLAEELSCSICLEPFKEPVTTPCGHNFCGSCLNETWAVQGSPYLCPQCRAVYQARPQLHKNTVLCNVVEQFLQADLAREPPADVWTPPARASAPSPNAQVACDHCLKEAAVKTCLVCMASFCQEHLQPHFDSPAFQDHPLQPPVRDLLRRKCSQHNRLREFFCPEHSECICHICLVEHKTCSPASLSQASADLEATLRHKLTVMYSQINGASRALDDVRNRQQDVRMTANRKVEQLQQEYTEMKALLDASETTSTRKIKEEEKRVNSKFDTIYQILLKKKSEIQTLKEEIEQSLTKRDEFEFLEKASKLRGISTKPVYIPEVELNHKLIKGIHQSTIDLKNELKQCIGRLQELTPSSGDPGEHDPASTHKSTRPVKKVSKEEKKSKKPRKLCISATVRFLRLPEHRTNAGSESRPLSSGFCDGFYMIPFCNGSRPEAGGETSISEMNKVTLALSVFPCVVLLFRRVFVEVALNQCEGSRGHPVALYHISLSLPPAPVPALPSKLPTFGAPEQLVDLKQAGLEAAAKATSSHPNSTSLKAKVLETFLAKSRPELLEYYIKVILDYNTAHNKVALSECYTVASVAEMPQNYRPHPQRFTYCSQVLGLHCYKKGIHYWEVELQKNNFCGVGICYGSMNRQGPESRLGRNSASWCVEWFNTKISAWHNNVEKTLPSTKATRVGVLLNCDHGFVIFFAVADKVHLMYKFRVDFTEALYPAFWVFSAGATLSICSPK

SEQ ID NO: 910452 - protein, 422 aa, Homo sapiens
MYSQINGASRALDDVRNRQQDVRMTANRKVEQLQQEYTEMKALLDASETTSTRKIKEEEKRVNSKFDTIYQILLKKKSEIQTLKEEIEQSLTKRDEFEFLEKASKLRGISTKPVYIPEVELNHKLIKGIHQSTIDLKNELKQCIGRLQELTPSSGDPGEHDPASTHKSTRPVKKVSKEEKKSKKPPPVPALPSKLPTFGAPEQLVDLKQAGLEAAAKATSSHPNSTSLKAKVLETFLAKSRPELLEYYIKVILDYNTAHNKVALSECYTVASVAEMPQNYRPHPQRFTYCSQVLGLHCYKKGIHYWEVELQKNNFCGVGICYGSMNRQGPESRLGRNSASWCVEWFNTKISAWHNNVEKTLPSTKATRVGVLLNCDHGFVIFFAVADKVHLMYKFRVDFTEALYPAFWVFSAGATLSICSPK

SEQ ID NO: 910453 - protein, 479 aa, Homo sapiens
LGFVSSAASERGCSSCVPTPGSAMAELCPLAEELSCSICLEPFKEPVTTPCGHNFCGSCLNETWAVQGSPYLCPQCRAVYQARPQLHKNTVLCNVVEQFLQADLAREPPADVWTPPARASAPSPNAQVACDHCLKEAAVKTCLVCMASFCQEHLQPHFDSPAFQDHPLQPPVRDLLRRKCSQHNRLREFFCPEHSECICHICLVEHKTCSPASLSQASADLEATLRHKLTVMYSQINGASRALDDVRNRQQDVRMTANRKVEQLQQEYTEMKALLDASETTSTRKIKEEEKRVNSKFDTIYQILLKKKSEIQTLKEEIEQSLTKRDEFEFLEKASKLRGISTKPVYIPEVELNHKLIKGIHQSTIDLKNELKQCIGRLQELTPSSGDPGEHDPASTHKSTRPVKKVSKEEKKSKKPPPVPALPSKLPTFGAPEQLVDLKQAGLEAAAKATSSHPNSTSLKAKVLETFLAKSRPELLECE

SEQ ID NO: 910454 - protein, 479 aa, Homo sapiens; identical to SEQ ID NO: 910453

SEQ ID NO: 910455 - protein, 409 aa, Homo sapiens
LGFVSSAASERGCSSCVPTPGSAMAELCPLAEELSCSICLEPFKEPVTTPCGHNFCGSCLNETWAVQGSPYLCPQCRAVYQARPQLHKNTVLCNVVEQFLQADLAREPPADVWTPPARASAPSPNAQVACDHCLKEAAVKTCLVCMASFCQEHLQPHFDSPAFQDHPLQPPVRDLLRRKCSQHNRLREFFCPEHSECICHICLVEHKTCSPASLSQASADLEATLRHKLTVMYSQINGASRALDDVRNRQQDVRMTANRKVEQLQQEYTEMKALLDASETTSTRKIKEEEKRVNSKFDTIYQILLKKKSEIQTLKEEIEQSLTKRDEFEFLEKASKLRGISTKPVYIPEVELNHKLIKGIHQSTIDLKNELKQCIGRLQELTPSSGDPGEHDPASTHKSTRPVKKVSSK

SEQ ID NO: 910456 - protein, 93 aa, Homo sapiens
MGKELWGVHSEFVLQITLCFLSQLQPKPPAHIRTQHLSRPRCWRPSWPSPDLSSWSVSSFGAGARFHWFCLSCAALCSSLWGQLAGYISHSPS

SEQ ID NO: 910457 - protein, 653 aa, Homo sapiens; identical to SEQ ID NO: 910449

SEQ ID NO: 910458 - protein, 422 aa, Homo sapiens; identical to SEQ ID NO: 910452

SEQ ID NO: 910459 - protein, 147 aa, Homo sapiens [sequence omitted]

SEQ ID NO: 910460 - protein, 438 aa, Homo sapiens
LGFVSSAASERGCSSCVPTPGSAMAELCPLAEELSCSICLEPFKEPVTTPCGHNFCGSCLNETWAVQGSPYLCPQCRAVYQARPQLHKNTVLCNVVEQFLQADLAREPPADVWTPPARASAPSPNAQVACDHCLKEAAVKTCLVCMASFCQEHLQPHFDSPAFQDHPLQPPVRDLLRRKCSQHNRLREFFCPEHSECICHICLVEHKTCSPASLSQASADLEATLRHKLTVMYSQINGASRALDDVRNRQQDVRMTANRKVEQLQQEYTEMKALLDASETTSTRKIKEEEKRVNSKFDTIYQILLKKKSEIQTLKEEIEQSLTKRDEFEFLEKASKLRGISTKPVYIPEVELNHKLIKGIHQSTIDLKNELKQCIGRLQELTPSSGDPGEHDPASTHKSTRPVKKVSKEEKKSKKPRKLCISATVRFLRLPEHRTKCW

SEQ ID NO: 910461 - protein, 137 aa, Homo sapiens
MLSSDVSWWLWLQLGEETESDLQNKLRVDTPKLLAHDNLPSKPACFKSTNSSWPSPDLSSWSVSSFGAGARFHWFCLSCAALCSSLWGQLAGYISHSPSLVLYFVAPLFSPSHQCLSLLFLTSSDFTIGPLTLPLAV

SEQ ID NO: 910462 - protein, 112 aa, Homo sapiens
MCFNCPVFGFYLLIAPFVPGAAFKDVGPCDQVIKLSEVRSWPGDVSVPVLSSPRKSCFGIVVYLDSYKEQGSNLGKLSEAYKNLKGFGGGTVTKGCLYVFGHKAHRCMFCKD

SEQ ID NO: 910463 - protein, 314 aa, Homo sapiens
MAPPQVLAFGLLLAAATATFAAAQEECVCENYKLAVNCFVNNNRQCQCTSVGAQNTVICSKLAAKCLVMKAEMNGSKLGRRAKPEGALQNNDGLYDPDCDESGLFKAKQCNGTSTCWCVNTAGVRRTDKDTEITCSERVRTYWIIIELKHKAREKPYDSKSLRTALQKEITTRYQLDPKFITSILYENNVITIDLVQNSSQKTQNDVDIADVAYYFEKDVKGESLFHSKKMDLTVNGEQLDLDPGQTLIYYVDEKAPEFSMQGLKAGVIAVIVVVVIAVVAGIVVLVISRKKRMAKYEKAEIKEMGEMHRELNA

SEQ ID NO: 910464 - protein, 390 aa, Homo sapiens
MAPPQVLAFGLLLAAATATFAAAQEGEARIGAKLWSWAGLGGNGPRPSAPETGIIGRGPRGRAFQRGDRTVRPCSGSGPPRGRKRRGPSRGAASLRSFARLECVCENYKLAVNCFVNNNRQCQCTSVGAQNTVICSKLAAKCLVMKAEMNGSKLGRRAKPEGALQNNDGLYDPDCDESGLFKAKQCNGTSTCWCVNTAGVRRTDKDTEITCSERVRTYWIIIELKHKAREKPYDSKSLRTALQKEITTRYQLDPKFITSILYENNVITIDLVQNSSQKTQNDVDIADVAYYFEKDVKGESLFHSKKMDLTVNGEQLDLDPGQTLIYYVDEKAPEFSMQGLKAGVIAVIVVVVIAVVAGIVVLVISRKKRMAKYEKAEIKEMGEMHRELNA

SEQ ID NO: 910465 - protein, 411 aa, Homo sapiens
QRARAVESSPGVRMPRLPGSSTFLYPVPAPFPPGPILQGFRAALLRLKGSLSTESSNLLGGHQRSLTPPWRRSTWGGAERGARAHTCGEGRAPTAAPGLGEGSLLISPNSRAVTHQRAPAARECVCENYKLAVNCFVNNNRQCQCTSVGAQNTVICSKLAAKCLVMKAEMNGSKLGRRAKPEGALQNNDGLYDPDCDESGLFKAKQCNGTSTCWCVNTAGVRRTDKDTEITCSERVRTYWIIIELKHKAREKPYDSKSLRTALQKEITTRYQLDPKFITSILYENNVITIDLVQNSSQKTQNDVDIADVAYYFEKDVKGESLFHSKKMDLTVNGEQLDLDPGQTLIYYVDEKAPEFSMQGLKAGVIAVIVVVVIAVVAGIVVLVISRKKRMAKYEKAEIKEMGEMHRELNA

SEQ ID NO: 910466 - protein, 185 aa, Homo sapiens
ICEFRILECSETYWIIIELKHKAREKPYDSKSLRTALQKEITTRYQLDPKFITSILYENNVITIDLVQNSSQKTQNDVDIADVAYYFEKDVKGESLFHSKKMDLTVNGEQLDLDPGQTLIYYVDEKAPEFSMQGLKAGVIAVIVVVVIAVVAGIVVLVISRKKRMAKYEKAEIKEMGEMHRELNA

SEQ ID NO: 910467 - protein, 128 aa, Homo sapiens
RVVLRLLIKAQIRLRDAENDVDIADVAYYFEKDVKGESLFHSKKMDLTVNGEQLDLDPGQTLIYYVDEKAPEFSMQGLKAGVIAVIVVVVIAVVAGIVVLVISRKKRMAKYEKAEIKEMGEMHRELNA

SEQ ID NO: 910468 - protein, 314 aa, Homo sapiens; identical to SEQ ID NO: 910463

SEQ ID NO: 910469 - protein, 314 aa, Homo sapiens; identical to SEQ ID NO: 910463

SEQ ID NO: 910470 - protein, 314 aa, Homo sapiens; identical to SEQ ID NO: 910463

SEQ ID NO: 910471 - protein, 225 aa, Homo sapiens
MAPPQVLAFGLLLAAATATFAAAQEECVCENYKLAVNCFVNNNRQCQCTSVGAQNTVICSKLAAKCLVMKAEMNGSKLGRRAKPEGALQNNDGLYDPDCDESGLFKAKQCNGTSTCWCVNTAGVRRTDKDTEITCSERVRTYWIIIELKHKAREKPYDSKSLRTALQKEITTRYQLDPKFITSILYENNVITIDLVQNSSQKTQNDVDIADVAYYFEKDNWSCCN

SEQ ID NO: 910472 - protein, 225 aa, Homo sapiens
MAPPQVLAFGLLLAAATATFAAAQEECVCENYKLAVNCFVNNNRQCQCTSVGAQNTVICSKLAAKCLVMKAEMNGSKLGRRAKPEGALQNNDGLYDPDCDESGLFKAKQCNGTSTCWCVNTAGVRRTDKDTEITCSERVRTYWIIIELKHKAREKPYDSKSLRTALQLETRMSTTSQLEEAEHKVQSLQTALEKNSPEFFDLKTKYDEETTAKADEIEMIMTDLD

SEQ ID NO: 910473 - protein, 314 aa, Homo sapiens; identical to SEQ ID NO: 910463

SEQ ID NO: 910474 - protein, 314 aa, Homo sapiens; identical to SEQ ID NO: 910463

SEQ ID NO: 910475 - protein, 272 aa, Homo sapiens
NRARYRISELCQNTVIWSKLAAKCLVMKAEMNGSKLGRRAKPEGALQNNDGLYDPDCDESGLFKAKQCNGTSTCWCVNTAGVRRTDKDTEITCSERVRTYWIIIELKHKAREKPYDSKSLRTALQKEITTRYQLDPKFITSILYENNVITIDLVQNSSQKTQNDVDIADVAYYFEKDVKGESLFHSKKMDLTVNGEQLDLDPGQTLIYYVDEKAPEFSMQGLKAGVIAVIVVVVIAVVAGIVVLVISRKKRMAKYEKAEIKEMGEMHRELNA

SEQ ID NO: 910476 - protein, 314 aa, Homo sapiens; identical to SEQ ID NO: 910463

SEQ ID NO: 910477 - protein, 144 aa, Homo sapiens
RSHAMSQHAPACAGFFMYSSFWFSPQLAWGPGSSPPRLLAAVAYYFEKDVKGESLFHSKKMDLTVNGEQLDLDPGQTLIYYVDEKAPEFSMQGLKAGVIAVIVVVVIAVVAGIVVLVISRKKRMAKYEKAEIKEMGEMHRELNA

SEQ ID NO: 910478 - protein, 297 aa, Homo sapiens
MAPPQVLAFGLLLAAATATFAAAQEECVCENYKLAVNCFVNNNRQCQCTSVGAQNTVICSKLAAKCLVMKAEMNGSKLGRRAKPEGALQNNDGLYDPDCDESGLFKAKQCNGTSTCWCVNTAGVRRTDKDTEITCSERVRTYWIIIELKHKAREKPYDSKSLRTALQKEITTRYQLDPKFITSILYENNVITIDLVQNSSQKTQNDVDIADVAYYFEKDVKGESLFHSKKMDLTVNGEQLDLDPGQTRHRLKKEEAQIVLKKLGTEDENGNWSSPEAALSAQVKDTEGETVMLTHRP

SEQ ID NO: 910479 - protein, 249 aa, Homo sapiens
MAPPQVLAFGLLLAAATATFAAAQEECVCENYKLAVNCFVNNNRQCQCTSVGAQNTVICSKLAAKCLVMKAEMNGSKLGRRAKPEGALQNNDGLYDPDCDESGLFKAKQCNGTSTCWCVNTAGVRRTDKDTEITCSERVRTYWIIIELKHKAREKPYDSKSLRTALQKEITTRYQLDPKFITSILYENNVITIDLVQNSSQKTQNDVDIADVAYYFEKDITKTSVQMHPSCLSNDIAPDRNSRVHTRSP

SEQ ID NO: 910480 - protein, 141 aa, Homo sapiens
MAPPQVLAFGLLLAAATATFAAAQEECVCENYKLAVNCFVNNNRQCQCTSVGAQNTVICSKLAAKCLVMKAEMNGSKLGRRAKPEGALQNNDGLYDPDCDESGLFKAKQCNGTSTCWCVNTAGVRRTDKDTLHPEDTLHPE

SEQ ID NO: 910481 - protein, 379 aa, Homo sapiens
LMLPATVLLYRKLGIILMMVKCVSCGFASFFFQSLCCFFGPEKNCGQILWPCAHLPWDAGTGDPGGEKAGRPRPGSVGGMPGSCSEQYELQPLARRRSPSFDTSTATSKLSHRPSALSEDLQLHDGPCCSRPPPAPASPRELLLDHQAVFSQCPALQTSSPYKQAGPSPKTRARQDSQGEEAEPLPASPEAPAHSPKAKAADPPDGFCSSASTLEGLSVSDETCLSTSEPSARVPDSVGVSPDDLDDTGQPVLERGQLNGKRDTLWLALRETVYDPSLPASHHSSLSWKGRGGPGDGSPVVLPNASQTCQMFGCAGPALTHQAIAAEGDPGRLDRARNPVMDDKARAAIGWSPKVFLQIHRERSHPPAVDVKPCQMSQP

SEQ ID NO: 910482 - protein, 202 aa, Homo sapiens
EARGPPGSGAVEAFGGERVSSTMSGLSGPPARRGPFPLALLLLFLLGPRLVLAISFHLPINSRKCLREEIHKDLLVTGAYEISDQSGGAGGLRSHLKITDSAGHILYSKEDATKGKFAFTTEDYDMFEVCFESKGTGRIPDQLVILDMKHGVEAKNYEEIAKVEKLKPLEVELRRLEDLSESIVNDFAYMKKREEEMRDTNE

SEQ ID NO: 910483 - protein, 241 aa, Homo sapiens
EARGPPGSGAVEAFGGERVSSTMSGLSGPPARRGPFPLALLLLFLLGPRLVLAISFHLPINSRKCLREEIHKDLLVTGAYEISDQSGGAGGLRSHLKITDSAGHILYSKEDATKGKFAFTTEDYDMFEVCFESKGTGRIPDQLVILDMKHGVEAKNYEEIAKVEKLKPLEVELRRLEDLSESIVNDFAYMKKREEEMRDTNESTNTRVLYFSIFSMFCLIGLATWQVFYLRRFFKAKKLIE

SEQ ID NO: 910484 - protein, 241 aa, Homo sapiens; identical to SEQ ID NO: 910483

SEQ ID NO: 910485 - protein, 241 aa, Homo sapiens; identical to SEQ ID NO: 910483

SEQ ID NO: 910486 - protein, 154 aa, Homo sapiens
MFFWWEKNFIITDSAGHILYSKEDATKGKFAFTTEDYDMFEVCFESKGTGRIPDQLVILDMKHGVEAKNYEEIAKVEKLKPLEVELRRLEDLSESIVNDFAYMKKREEEMRDTNESTNTRVLYFSIFSMFCLIGLATWQVFYLRRFFKAKKLIE

SEQ ID NO: 910487 - protein, 241 aa, Homo sapiens; identical to SEQ ID NO: 910483

SEQ ID NO: 910488 - protein, 134 aa, Homo sapiens
PLPPPLLLSSSPTLPLGTRLCVNSAEEGTGRIPDQLVILDMKHGVEAKNYEEIAKVEKLKPLEVELRRLEDLSESIVNDFAYMKKREEEMRDTNESTNTRVLYFSIFSMFCLIGLATWQVFYLRRFFKAKKLIE

SEQ ID NO: 910489 - protein, 116 aa, Homo sapiens
SPTSLGALAACAATSRCGIGRRGAGREDGRLRRGEARVRGSRAGGGLGVVLASRERKGRAVEPAPSPRWLPVAGRGGSPTPGNPKKGCEALADVVTPELGRLSTSYTSFGLRYIEP

SEQ ID NO: 910490 - protein, 241 aa, Homo sapiens; identical to SEQ ID NO: 910483

SEQ ID NO: 910491 - protein, 241 aa, Homo sapiens; identical to SEQ ID NO: 910483

SEQ ID NO: 910492 - protein, 241 aa, Homo sapiens; identical to SEQ ID NO: 910483

SEQ ID NO: 910493 - protein, 241 aa, Homo sapiens; identical to SEQ ID NO: 910483

SEQ ID NO: 910494 - protein, 222 aa, Homo sapiens
EARGPPGSGAVEAFGGERVSSTMSGLSGPPARRGPFPLALLLLFLLGPRLVLAISFHLPINSRKCLREEIHKDLLVTGAYEISDQSGGAGGLRSHLKITDSAGHILYSKEDATKGKFAFTTEDYDMFEVCFESKGTGRIPDQLVILDMKHGVEAKNYEELSESIVNDFAYMKKREEEMRDTNESTNTRVLYFSIFSMFCLIGLATWQVFYLRRFFKAKKLIE

SEQ ID NO: 910495 - protein, 120 aa, Homo sapiens
QGEELWLFPSIEEGTGRIPDQLVILDMKHGVEAKNYEEIAKVEKLKPLEVELRRLEDLSESIVNDFAYMKKREEEMRDTNESTNTRVLYFSIFSMFCLIGLATWQVFYLRRFFKAKKLIE

SEQ ID NO: 910496 - protein, 219 aa, Homo sapiens
SALLRVLYSRVFYLRVCSPRFLDGMAAGQRRSSLSRLGSQAEGLLISQTMGGQAETLLTSQTGWRPGRGCNLGSLGGQGRRLGGGCSEPRSRHCTPALAPIEHWVNETPSAIPAPREAEVVDHSRLGAGVEAKNYEEIAKVEKLKPLEVELRRLEDLSESIVNDFAYMKKREEEMRDTNESTNTRVLYFSIFSMFCLIGLATWQVFYLRRFFKAKKLIE

SEQ ID NO: 910497 - protein, 592 aa, Homo sapiens
PKSADVNPKYQCDLVSKNGNDVYRYPSPLHAVAVQSPMFLLCLTGNPLREEDRLGNHASDICGGSELDAVKTDSSLPSPSSLWSASHPSSSKKMDGYILSLVQKKTHPVRTNKPRTSVNADPTKGLLRNGSVCVRAPGGVSQGNSVNLKNSKQACLPSGGIPSLNNGTFSPPKQWSKESKAEQAESKRVPLPEGCPSGAASDLQSKHLPKTAKPASQEHVRCSAIGTGESPKESAQLSGASPKESPSRGPAPPQENKVVQPLKKMSQKNSLQGVPPATPPLLSTAFPVEERPALDFKSEGSSQSLEEAHLVKAQFIPGQQPSVRLHRGHRNMGVVKNSSLKHRGPALQGLENGLPTVREKTRAGSKKCRFPDDLDTNKKLKKASSKGRKSGGGPEAGVPGRPAGGGHRAGSRAHGHGREAVVAKPKHKRTDYRRWKSSAEISYEEALRRARRGRRENVGLYPAPVPLPYASPYAYVASDSEYSAECESLFHSTVVDTSEDEQSNYTTNCFGDSESSVSEGEFVGESTTTSDSEESGGLIWSQFVQTLPIQTVTAPDLHNHPAKTFVKIKASHNLKKKILRFRSGSLKLMTTV

SEQ ID NO: 910498 - protein, 592 aa, Homo sapiens; identical to SEQ ID NO: 910497

SEQ ID NO: 910499 - protein, 1195 aa, Homo sapiens
MGEEGPPSLEYIQAKDLFPPKELVKEEENLQVPFTVLQGEGVEFLGRAADALIAISNYRLHIKFKDSVINVPLRMIDSVESRDMFQLHISCKDSKVVRCHFSTFKQCQEWLSRLSRATARPAKPEDLFAFAYHAWCLGLTEEDQHTHLCQPGEHIRCRQEAELARMGFDLQNVWRVSHINSNYKLCPSYPQKLLVPVWITDKELENVASFRSWKRIPVVVYRHLRNGAAIARCSQPEISWWGWRNADDEYLVTSIAKACALDPGTRATGGSLSTGNNDTSEACDADFDSSLTACSGVESTAAPQKLLILDARSYTAAVANRAKGGGCECEEYYPNCEVVFMGMANIHAIRNSFQYLRAVCSQMPDPSNWLSALESTKWLQHLSVMLKAAVLVANTVDREGRPVLVHCSDGWDRTPQIVALAKILLDPYYRTLEGFQVLVESDWLDFGHKFGDRCGHQENVEDQNEQCPVFLQWLDSVHQLLKQFPCLFEFNEAFLVKLVQHTYSCLYGTFLANNPCEREKRNIYKRTCSVWALLRAGNKNFHNFLYTPSSDMVLHPVCHVRALHLWTAVYLPASSPCTLGEENMDLYLSPVAQSQEFSGRSLDRLPKTRSMDDLLSACDTSSPLTRTSSDPNLNNHCQEVRVGLEPWHSNPEGSETSFVDSGVGGPQQTVGEVGLPPPLPSSQKDYLSNKPFKSHKSCSPSYKLLNTAVPREMKSNTSDPEIKVLEETKGPAPDPSAQDELGRTLDGIGEPPEHCPETEAVSALSKVISNKCDGVCNFPESSQNSPTGTPQQAQPDSMLGVPSKCVLDHSLSTVCNPPSAACQTPLDPSTDFLNQDPSGSVASISHQEQLSSVPDLTHGEEDIGKRGNNRNGQLLENPRFGKMPLELVRKPISQSQISEFSFLGSNWDSFQGMVTSFPSGEATPRRLLSYGCCSKRPNSKQMRATGPCFGGQWAQREGVKSPVCSSHSNGHCTGPGGKNQMWLSSHPKQVSSTKPVPLNCPSPVPPLYLDDDGLPFPTDVIQHRLRQIEAGYKQEVEQLRRQVRELQMRLDIRHCCAPPAEPPMDYEDDFTCLKESDGSDTEDFGSDHSEDCLSEASWEPVDKKETEVTRWVPDHMASHCYNCDCEFWLAKRRHHCRNCGNVFCAGCCHLKLPIPDQQLYDPVLVCNSCYEHIQVSRARELMSQQLKKPIATASS

SEQ ID NO: 910500 - protein, 1030 aa, Homo sapiens [sequence omitted]

SEQ ID NO: 910501 - protein, 1195 aa, Homo sapiens; identical to SEQ ID NO: 910499

SEQ ID NO: 910502 - protein, 855 aa, Homo sapiens
MGMANIHAIRNSFQYLRAVCSQMPDPSNWLSALESTKWLQHLSVMLKAAVLVANTVDREGRPVLVHCSDGWDRTPQIVALAKILLDPYYRTLEGFQVLVESDWLDFGHKFGDRCGHQENVEDQNEQCPVFLQWLDSVHQLLKQFPCLFEFNEAFLVKLVQHTYSCLYGTFLANNPCEREKRNIYKRTCSVWALLRAGNKNFHNFLYTPSSDMVLHPVCHVRALHLWTAVYLPASSPCTLGEENMDLYLSPVAQSQEFSGRSLDRLPKTRSMDDLLSACDTSSPLTRTSSDPNLNNHCQEVRVGLEPWHSNPEGSETSFVDSGVGGPQQTVGEVGLPPPLPSSQKDYLSNKPFKSHKSCSPSYKLLNTAVPREMKSNTSDPEIKVLEETKGPAPDPSAQDELGRTLDGIGEPPEHCPETEAVSALSKVISNKCDGVCNFPESSQNSPTGTPQQAQPDSMLGVPSKCVLDHSLSTVCNPPSAACQTPLDPSTDFLNQDPSGSVASISHQEQLSSVPDLTHGEEDIGKRGNNRNGQLLENPRFGKMPLELVRKPISQSQISEFSFLGSNWDSFQGMVTSFPSGEATPRRLLSYGCCSKRPNSKQMRATGPCFGGQWAQREGVKSPVCSSHSNGHCTGPGGKNQMWLSSHPKQVSSTKPVPLNCPSPVPPLYLDDDGLPFPTDVIQHRLRQIEAGYKQEVEQLRRQVRELQMRLDIRHCCAPPAEPPMDYEDDFTCLKESDGSDTEDFGSDHSEDCLSEASWEPVDKKETEVTRWVPDHMASHCYNCDCEFWLAKRRHHCRNCGNVFCAGCCHLKLPIPDQQLYDPVLVCNSCYEHIQVSRARELMSQQLKKPIATASS

SEQ ID NO: 910503 - protein, 732 aa, Homo sapiens
APCPQGGCVGGGLPLRSSGTGCWTGCTSQLSPERLYSYRQTLCTHRAGANNPCEREKRNIYKRTCSVWALLRAGNKNFHNFLYTPSSDMVLHPVCHVRALHLWTAVYLPASSPCTLGEENMDLYLSPVAQSQEFSGRSLDRLPKTRSMDDLLSACDTSSPLTRTSSDPNLNNHCQEVRVGLEPWHSNPEGSETSFVDSGVGGPQQTVGEVGLPPPLPSSQKDYLSNKPFKSHKSCSPSYKLLNTAVPREMKSNTSDPEIKVLEETKGPAPDPSAQDELGRTLDGIGEPPEHCPETEAVSALSKVISNKCDGVCNFPESSQNSPTGTPQQAQPDSMLGVPSKCVLDHSLSTVCNPPSAACQTPLDPSTDFLNQDPSGSVASISHQEQLSSVPDLTHGEEDIGKRGNNRNGQLLENPRFGKMPLELVRKPISQSQISEFSFLGSNWDSFQGMVTSFPSGEATPRRLLSYGCCSKRPNSKQMRATGPCFGGQWAQREGVKSPVCSSHSNGHCTGPGGKNQMWLSSHPKQVSSTKPVPLNCPSPVPPLYLDDDGLPFPTDVIQHRLRQIEAGYKQEVEQLRRQVRELQMRLDIRHCCAPPAEPPMDYEDDFTCLKESDGSDTEDFGSDHSEDCLSEASWEPVDKKETEVTRWVPDHMASHCYNCDCEFWLAKRRHHCRNCGNVFCAGCCHLKLPIPDQQLYDPVLVCNSCYEHIQVSRARELMSQQLKKPIATASS

SEQ ID NO: 910504 - protein, 224 aa, Homo sapiens
MCIGAGWWYFSRGQASKQVSSTKPVPLNCPSPVPPLYLDDDGLPFPTDVIQHRLRQIEAGYKQEVEQLRRQVRELQMRLDIRHCCAPPAEPPMDYEDDFTCLKESDGSDTEDFGSDHSEDCLSEASWEPVDKKETEVTRWVPDHMASHCYNCDCEFWLAKRRHHCRNCGNVFCAGCCHLKLPIPDQQLYDPVLVCNSCYEHIQVSRARELMSQQLKKPIATASS

SEQ ID NO: 910505 - protein, 1195 aa, Homo sapiens; identical to SEQ ID NO: 910499

SEQ ID NO: 910506 - protein, 1195 aa, Homo sapiens; identical to SEQ ID NO: 910499

SEQ ID NO: 910507 - protein, 1195 aa, Homo sapiens
MGEEGPPSLEYIQAKDLFPPKELVKEEENLQVPFTVLQGEGVEFLGRAADALIAISNYRLHIKFKDSVINVPLRMIDSVESRDMFQLHISCKDSKVVRCHFSTFKQCQEWLSRLSRATARPAKPEDLFAFAYHAWCLGLTEEDQHTHLCQPGEHIRCRQEAELARMGFDLQNVWRVSHINSNYKLCPSYPQKLLVPVWITDKELENVASFRSWKRIPVVVYRHLRNGAAIARCSQPEISWWGWRNADDEYLVTSIAKACALDPGTRATGGSLSTGNNDTSEACDADFGKVWMMLTPQGAGPLLGFIGSQGVPSESLEKMTTHGVLGSLPCQKLWGMRGLQLHVLPSERECQRASKRLGGWLTQGLLPAVCLDSSLTACSGVESTAAPQKLLILDARSYTAAVANRAKGGGCECEEYYPNCEVVFMGMANIHAIRNSFQYLRAVCSQMPDPSNWLSALESTKWLQHLSVMLKAAVLVANTVDREGRPVLVHCSDGWDRTPQIVALAKILLDPYYRTLEGFQVLVESDWLDFGHKFGDRCGHQENVEDQNEQCPVFLQWLDSVHQLLKQFPCLFEFNEAFLVKLVQHTYSCLYGTFLANNPCEREKRNIYKRTCSVWALLRAGNKNFHNFLYTPSSDMVLHPVCHVRALHLWTAVYLPASSPCTLGEENMDLYLSPVAQSQEFSGRSLDRLPKTRSMDDLLSACDTSSPLTRTSSDPNLNNHCQEVRVGLEPWHSNPEGSETSFVDSGVGGPQQTVGEVGLPPPLPSSQKDYLSNKPFKSHKSCSPSYKLLNTAVPREMKSNTSDPEIKVLEETKGPAPDPSAQDELGRTLDGIGEPPEHCPETEAVSALSKVISNKCDGVCNFPESSQNSPTGTPQQAQPDSMLGVPSKCVLDHSLSTVCNPPSAACQTPLDPSTDFLNQDPSGSVASISHQEQLSSVPDLTHGEEDIGKRGNNRNGQLLENPRFGKMPLELVRKPISQSQISEFSFLGSNWDSFQGMVTSFPSGEATPRRLLSYGCCSKRPNSKQMRATGPCFGGQWAQREGVKSPVCSSHSNGHCTGPGGKNQMWLSSHPKQVSSTKPVPLNCPSPVPPLYLDDDGLPFPTDVIQHRLRQIEAGYKQEVEQLRRQVRELQMRLDIRHCCAPPAEPPMDYEDDFVSSHQLPYTHYLLCSSSLPSIQHLFVGYLLCATELGAWAIG

SEQ ID NO: 910508 - protein, 318 aa, Homo sapiens
MGEEGPPSLEYIQAKDLFPPKELVKEEENLQVPFTVLQGEGVEFLGRAADALIAISNYRLHIKFKDSVINVPLRMIDSVESRDMFQLHISCKDSKVVRCHFSTFKQCQEWLSRLSRATARPAKPEDLFAFAYHAWCLGLTEEDQHTHLCQPGEHIRCRQEAELARMGFDLQNVWRVSHINSNYKLCPSYPQKLLVPVWITDKELENVASFRSWKRIPVVVYRHLRNGAAIARCSQPEISWWGWRNADDEYLVTSIAKACALDPGTRATGGSLSTGNNDTSEACDADFGKVWMMLTPQGAGPLLGFIGSQGVPSESLGR

SEQ ID NO: 910509 - protein, 1272 aa, Homo sapiens
APLWRGGERRAGAARRPGHQRPSLLAAAAAPGEPRSRDAAGARGWRAAQRLRGHVRWPRPPATMSLTARVSCSMLSCFGEEGPPSLEYIQAKDLFPPKELVKEEENLQVPFTVLQGEGVEFLGRAADALIAISNYRLHIKFKDSVINVPLRMIDSVESRDMFQLHISCKDSKVVRCHFSTFKQCQEWLSRLSRATARPAKPEDLFAFAYHAWCLGLTEEDQHTHLCQPGEHIRCRQEAELARMGFDLQNVWRVSHINSNYKLCPSYPQKLLVPVWITDKELENVASFRSWKRIPVVVYRHLRNGAAIARCSQPEISWWGWRNADDEYLVTSIAKACALDPGTRATGGSLSTGNNDTSEACDADFDSSLTACSGVESTAAPQKLLILDARSYTAAVANRAKGGGCECEEYYPNCEVVFMGMANIHAIRNSFQYLRAVCSQMPDPSNWLSALESTKWLQHLSVMLKAAVLVANTVDREGRPVLVHCSDGWDRTPQIVALAKILLDPYYRTLEGFQVLVESDWLDFGHKFGDRCGHQENVEDQNEQCPVFLQWLDSVHQLLKQFPCLFEFNEAFLVKLVQHTYSCLYGTFLANNPCEREKRNIYKRTCSVWALLRAGNKNFHNFLYTPSSDMVLHPVCHVRALHLWTAVYLPASSPCTLGEENMDLYLSPVAQSQEFSGRSLDRLPKTRSMDDLLSACDTSSPLTRTSSDPNLNNHCQEVRVGLEPWHSNPEGSETSFVDSGVGGPQQTVGEVGLPPPLPSSQKDYLSNKPFKSHKSCSPSYKLLNTAVPREMKSNTSDPEIKVLEETKGPAPDPSAQDELGRTLDGIGEPPEHCPETEAVSALSKVISNKCDGVCNFPESSQNSPTGTPQQAQPDSMLGVPSKCVLDHSLSTVCNPPSAACQTPLDPSTDFLNQDPSGSVASISHQEQLSSVPDLTHGEEDIGKRGNNRNGQLLENPRFGKMPLELVRKPISQSQISEFSFLGSNWDSFQGMVTSFPSGEATPRRLLSYGCCSKRPNSKQMRATGPCFGGQWAQREGVKSPVCSSHSNGHCTGPGGKNQMWLSSHPKQVSSTKPVPLNCPSPVPPLYLDDDGLPFPTDVIQHRLRQIEAGYKQEVEQLRRQVRELQMRLDIRHCCAPPAEPPMDYEDDFTCLKESDGSDTEDFGSDHSEDCLSEASWEPVDKKETEVTRWVPDHMASHCYNCDCEFWLAKRRHHCRNCGNVFCAGCCHLKLPIPDQQLYDPVLVCNSCYEHIQVSRARELMSQQLKKPIATASS

SEQ ID NO: 910510 - protein, 1195 aa, Homo sapiens; identical to SEQ ID NO: 910499

SEQ ID NO: 910511 - protein, 1278 aa, Homo sapiens
MGEEGPPSLEYIQAKDLFPPKELVKEEENLQVPFTVLQGEGVEFLGRAADALIAISNYRLHIKFKDSVINVPLRMIDSVESRDMFQLHISCKDSKVVRCHFSTFKQCQEWLSRLSRATARPAKPEDLFAFAYHAWCLGLTEEDQHTHLCQPGEHIRCRQEAELARMGFDLQNVWRVSHINSNYKLCPSYPQKLLVPVWITDKELENVASFRSWKRIPVVVYRHLRNGAAIARCSQPEISWWGWRNADDEYLVTSIAKACALDPGTRATGGSLSTGNNDTSEACDADFGKVWMMLTPQGAGPLLGFIGSQGVPSESLEDDNTRGAGVPALSEAVGYEGSLLHVLPSERECQRASKRLGGWLTQGLLPAVCLDSSLTACSGVESTAAPQKLLILDARSYTAAVANRAKGGGCECEEYYPNCEVVFMGMANIHAIRNSFQYLRAVCSQMPDPSNWLSALESTKWLQHLSVMLKAAVLVANTVDREGRPVLVHCSDGWDRTPQIVALAKILLDPYYRTLEGFQVLVESDWLDFGHKFGDRCGHQENVEDQNEQCPVFLQWLDSVHQLLKQFPCLFEFNEAFLVKLVQHTYSCLYGTFLANNPCEREKRNIYKRTCSVWALLRAGNKNFHNFLYTPSSDMVLHPVCHVRALHLWTAVYLPASSPCTLGEENMDLYLSPVAQSQEFSGRSLDRLPKTRSMDDLLSACDTSSPLTRTSSDPNLNNHCQEVRVGLEPWHSNPEGSETSFVDSGVGGPQQTVGEVGLPPPLPSSQKDYLSNKPFKSHKSCSPSYKLLNTAVPREMKSNTSDPEIKVLEETKGPAPDPSAQDELGRTLDGIGEPPEHCPETEAVSALSKVISNKCDGVCNFPESSQNSPTGTPQQAQPDSMLGVPSKCVLDHSLSTVCNPPSAACQTPLDPSTDFLNQDPSGSVASISHQEQLSSVPDLTHGEEDIGKRGNNRNGQLLENPRFGKMPLELVRKPISQSQISEFSFLGSNWDSFQGMVTSFPSGEATPRRLLSYGCCSKRPNSKQMRATGPCFGGQWAQREGVKSPVCSSHSNGHCTGPGGKNQMWLSSHPKQVSSTKPVPLNCPSPVPPLYLDDDGLPFPTDVIQHRLRQIEAGYKQEVEQLRRQVRELQMRLDIRHCCAPPAEPPMDYEDDFTCLKESDGSDTEDFGSDHSEDCLSEASWEPVDKKETEVTRWVPDHMASHCYNCDCEFWLAKRRHHCRNCGNVFCAGCCHLKLPIPDQQLYDPVLVCNSCYEHIQVSRARELMSQQLKKPIATASS

SEQ ID NO: 910512 - protein, 585 aa, Homo sapiens
MDDLLSACDTSSPLTRTSSDPNLNNHCQEVRVGLEPWHSNPEGSETSFVDSGVGGPQQTVGEVGLPPPLPSSQKDYLSNKPFKSHKSCSPSYKLLNTAVPREMKSNTSDPEIKVLEETKGPAPDPSAQDELGRTLDGIGEPPEHCPETEAVSALSKVISNKCDGVCNFPESSQNSPTGTPQQAQPDSMLGVPSKCVLDHSLSTVCNPPSAACQTPLDPSTDFLNQDPSGSVASISHQEQLSSVPDLTHGEEDIGKRGNNRNGQLLENPRFGKMPLELVRKPISQSQISEFSFLGSNWDSFQGMVTSFPSGEATPRRLLSYGCCSKRPNSKQMRATGPCFGGQWAQREGVKSPVCSSHSNGHCTGPGGKNQMWLSSHPKQVSSTKPVPLNCPSPVPPLYLDDDGLPFPTDVIQHRLRQIEAGYKQEVEQLRRQVRELQMRLDIRHCCAPPAEPPMDYEDDFTCLKESDGSDTEDFGSDHSEDCLSEASWEPVDKKETEVTRWVPDHMASHCYNCDCEFWLAKRRHHCRNCGNVFCAGCCHLKLPIPDQQLYDPVLVCNSCYEHIQVSRARELMSQQLKKPIATASS

SEQ ID NO: 910513 - protein, 1195 aa, Homo sapiens; identical to SEQ ID NO: 910499

SEQ ID NO: 910514 - protein, 1195 aa, Homo sapiens; identical to SEQ ID NO: 910499

SEQ ID NO: 910515 - protein, 888 aa, Homo sapiens
MGEEGPPSLEYIQAKDLFPPKELVKEEENLQVPFTVLQGEGVEFLGRAADALIAISNYRLHIKFKDSVINVPLRMIDSVESRDMFQLHISCKDSKVVRCHFSTFKQCQEWLSRLSRATARPAKPEDLFAFAYHAWCLGLTEEDQHTHLCQPGEHIRCRQEAELARMGFDLQNVWRVSHINSNYKLCPSYPQKLLVPVWITDKELENVASFRSWKRIPVVVYRHLRNGAAIARCSQPEISWWGWRNADDEYLVTSIAKACALDPGTRATGGSLSTGNNDTSEACDADFGKVWMMLTPQGAGPLLGFIGSQGVPSESLEKMTTHGVLGSLPCQKLWGMRGLQLHVLPSERECQRASKRLGGWLTQGLLPAVCLDSSLTACSGVESTAAPQKLLILDARSYTAAVANRAKGGGCECEEYYPNCEVVFMGMANIHAIRNSFQYLRAVCSQMPDPSNWLSALESTKWLQHLSVMLKAAVLVANTVDREGRPVLVHCSDGWDRTPQIVALAKILLDPYYRTLEGFQVLVESDWLDFGHKFGDRCGHQENVEDQNEQCPVFLQWLDSVHQLLKQFPCLFEFNEAFLVKLVQHTYSCLYGTFLANNPCEREKRNIYKRTCSVWALLRAGNKNFHNFLYTPSSDMVLHPVCHVRALHLWTAVYLPASSPCTLGEENMDLYLSPVAQSQEFSGRSLDRLPKTRSMDDLLSACDTSSPLTRTSSDPNLNNHCQEVRVGLEPWHSNPEGSETSFVDSGVGGPQQTVGEVGLPPPLPSSQKDYLSNKPFKSHKSCSPSYKLLNTAVPREMKSNTSDPEIKVLEETKGPAPDPSAQDELGRTLDGIGEPPEHCPETEAICLLSVAVLRDCPISEQTAWPWRETLGSWLRCVHQILLSELLWV

SEQ ID NO: 910516 - protein, 126 aa, Homo sapiens
ASNGIARLRGSGGRRLVRRGSQYPCHGRMGEEGPPSLEYIQAKDLFPPKELVKEEENLQVPFTVLQGEGVEFLGRAADALIAISNYRLHIKFKDSVINVPLRMIDSVESRDMFQLHISCKDSKVVR

SEQ ID NO: 910517 - protein, 106 aa, Homo sapiens
MGLLSILRKLKSAPDQEVRILLLGLDNAGKTTLLKQLASEDISHITPTQGFNIKSVQSQGFKLNVWDIGGQRKIRPYWKNYFENTDILIYVIDSADRKRFEETGQN

SEQ ID NO: 910518 - protein, 182 aa, Homo sapiens
MGLLSILRKLKSAPDQEVRILLLGLDNAGKTTLLKQLASEDISHITPTQGFNIKSVQSQGFKLNVWDIGGQRKIRPYWKNYFENTDILIYVIDSADRKRFEETGQELAELLEEEKLSCVPVLIFANKQDLLTAAPASEIAEGLNLHTIRDRVWQIQSCSALTGEGVQDGMNWVCKNVNAKKK

SEQ ID NO: 910519 - protein, 103 aa, Homo sapiens
MCSEGRGESSQYQSPVQTDNIEETGQELAELLEEEKLSCVPVLIFANKQDLLTAAPASEIAEGLNLHTIRDRVWQIQSCSALTGEGVQDGMNWVCKNVNAKKK

SEQ ID NO: 910520 - protein, 165 aa, Homo sapiens
MGLLSILRKLKSAPDQEVRILLLGLDNAGKTTLLKQLASEDISHITPTQGFNIKSVQSQGFKLNVWDIGGQRKIRPYWKNYFENTDILELAELLEEEKLSCVPVLIFANKQDLLTAAPASEIAEGLNLHTIRDRVWQIQSCSALTGEGVQDGMNWVCKNVNAKKK

SEQ ID NO: 910521 - protein, 182 aa, Homo sapiens; identical to SEQ ID NO: 910518

SEQ ID NO: 910522 - protein, 44 aa, Homo sapiens
MESPKFPPGRFDEGELIYHKRDLTNLEKRYHRESEENSPNIRRP

SEQ ID NO: 910523 - protein, 190 aa, Homo sapiens
NLSPLWLLKGLLSILRKLKSAPDQEVRILLLGLDNAGKTTLLKQLASEDISHITPTQGFNIKSVQSQGFKLNVWDIGGQRKIRPYWKNYFENTDILIYVIDSADRKRFEETGQELAELLEEEKLSCVPVLIFANKQDLLTAAPASEIAEGLNLHTIRDRVWQIQSCSALTGEGVQDGMNWVCKNVNAKKK

SEQ ID NO: 910524 - protein, 52 aa, Homo sapiens
MEKVQYLTRSAIRRASTIEMPQQARQKLQNLFINFCLILICLLLICIIVMLL

SEQ ID NO: 910525 - protein, 52 aa, Homo sapiens; identical to SEQ ID NO: 910524

SEQ ID NO: 910526 - protein, 52 aa, Homo sapiens; identical to SEQ ID NO: 910524

SEQ ID NO: 910527 - protein, 506 aa, Homo sapiens
MVDQLFCKKFAEALGSTEAKAVPYQKFEAHPNDLYVEGLPENIPFRSPSWYGIPRLEKIIQVGNRIKFVIKRPELLTHSTTEVTQPRTNTPVKEDWNVRITKLRKQVEEIFNLKFAQALGLTEAVKVPYPVFESNPEFLYVEGLPEGIPFRSPTWFGIPRLERIVHGSNKIKFVVKKPELVISYLPPGMASKINTKALQSPKRPRSPGSNSKVPEIEVTVEGPNNNNPQTSAVRTPTQTNGSNVPFKPRGREFSFEAWNAKITDLKQKVENLFNEKCGEALGLKQAVKVPFALFESFPEDFYVEGLPEGVPFRRPSTFGIPRLEKILRNKAKIKFIIKKPEMFETAIKESTSSKSPPRKINSSPNVNTTASGVEDLNIIQVTIPDDDNERLSKVEKARQLREQVNDLFSRKFGEAIGMGFPVKVPYRKITINPGCVVVDGMPPGVSFKAPSYLEISSMRRILDSAEFIKFTVIRPFPGLVINNQLVDQSDHLAQPRLFYQDKGLCI

SEQ ID NO: 910528 - protein, 390 aa, Homo sapiens
MVDQLFCKKFAEALGSTEAKAVPYQKFEAHPNDLYVEGLPENIPFRSPSWYGIPRLEKIIQVGNRIKFVIKRPELLTHSTTEVTQPRTNTPVKEDWNVRITKLRKQVEEIFNLKFAQALGLTEAVKVPYPVFESNPEFLYVEGLPEGIPFRSPTWFGIPRLERIVHGSNKIKFVVKKPELVISYLPPGMASKINTKALQSPKRPRSPGSNSKVPEIEVTVEGPNNNNPQTSAVRTPTQTNGSNVPFKPRGREFSFEAWNAKITDLKQKVENLFNEKCGEALGLKQAVKVPFALFESFPEDFYVEGLPEGVPFRRPSTFGIPRLEKILRNKAKIKFIIKKPEMFETAIKESTSSKSPPRKINSSPNVNTTASGVEDLNIIQVTIPAWLCGG

SEQ ID NO: 910529 - protein, 506 aa, Homo sapiens; identical to SEQ ID NO: 910527

SEQ ID NO: 910530 - protein, 534 aa, Homo sapiens
MVDQLFCKKFAEALGSTEAKAVPYQKFEAHPNDLYVEGLPENIPFRSPSWYGIPRLEKIIQVGNRIKFVIKRPELLTHSTTEVTQPRTNTPVKEDWNVRITKLRKQVEEIFNLKFAQALGLTEAVKVPYPVFESNPEFLYVEGLPEGIPFRSPTWFGIPRLERIVHGSNKIKFVVKKPELVISYLPPGMASKINTKALQSPKRPRSPGSNSKVPEIEVTVEGPNNNNPQTSAVRTPTQTNGSNVPFKPRGREFSFEAWNAKITDLKQKVENLFNEKCGEALGLKQAVKVPFALFESFPEDFYVEGLPEGVPFRRPSTFGIPRLEKILRNKAKIKFIIKKPEMFETAIKESTSSKSPPRKINSSPNVNTTASGVEDLNIIQVTIPDDDNERLSKVEKARQLREQVNDLFSRKFGEAIGMGFPVKVPYRKITINPGCVVVDGMPPGVSFKAPSYLEISSMRRILDSAEFIKFTVIRPFPGLVINNQLVDQSESKGPVIQESAEPSQLEVPATEEGKSASVSGMLCGVHLNPLHTRS

SEQ ID NO: 910531 - protein, 456 aa, Homo sapiens
YNSSSYNSSFYWRDRIKFGIKRPELLTHSTTEVTQPRTNTPVKEDWNVRITKLRKQVEEIFNLKFAQALGLTEAVKVPYPVFESNPEFLYVEGLPEGIPFRSPTWFGIPRLERIVHGSNKIKFVVKKPELVISYLPPGMASKINTKALQSPKRPRSPGSNSKVPEIEVTVEGPNNNNPQTSAVRTPTQTNGSNVPFKPRGREFSFEAWNAKITDLKQKVENLFNEKCGEALGLKQAVKVPFALFESFPEDFYVEGLPEGVPFRRPSTFGIPRLEKILRNKAKIKFIIKKPEMFETAIKESTSSKSPPRKINSSPNVNTTASGVEDLNIIQVTIPDDDNERLSKVEKARQLREQVNDLFSRKFGEAIGMGFPVKVPYRKITINPGCVVVDGMPPGVSFKAPSYLEISSMRRILDSAEFIKFTVIRPFPGLVINNQLVDQSDHLAQPRLFYQDKGLCI

SEQ ID NO: 910532 - protein, 530 aa, Homo sapiens [sequence omitted]

SEQ ID NO: 910533 - protein, 178 aa, Homo sapiens
MVDQLFCKKFAEALGSTEAKAVPYQKFEAHPNDLYVEGLPENIPFRSPSWYGIPRLEKIIQVGNRIKFVIKRPELLTHSTTEVTQPRTNTPVKEDWNVRITKLRKQVEEIFNLKFAQALGLTEAVKVPYPVFESNPEFLYVEGLPEGIPFRSPTWFGIPRLERIVHGSNKIKFVVKKP

SEQ ID NO: 910534 - protein, 212 aa, Homo sapiens
MEGVEEKKKEVPAVPETLKKKRRNFAELKIKRLRKKFAQKMLRKARRKLIYEKAKHYHKEYRQMYRTEIRMARMARKAGNFYVPAEPKLAFVIRIRGINGVSPKVRKVLQLLRLRQIFNGTFVKLNKLRFNMLRICEKPYIGLGGYPILKSRYMNLSNKTWSWANSIEANWFDSKRLIGQLLGTTGSLLERSGTNFSGDTPQGENRCATIFP

SEQ ID NO: 910535 - protein, 530 aa, Homo sapiens [sequence omitted]

SEQ ID NO: 910536 - protein, 530 aa, Homo sapiens [sequence omitted]

SEQ ID NO: 910537 - protein, 506 aa, Homo sapiens; identical to SEQ ID NO: 910527

SEQ ID NO: 910538 - protein, 530 aa, Homo sapiens [sequence omitted]

SEQ ID NO: 910539 - protein, 506 aa, Homo sapiens; identical to SEQ ID NO: 910527

SEQ ID NO: 910540 - protein, 476 aa, Homo sapiens
MVDQLFCKKFAEALGSTEAKAVPYQKFEAHPNDLYVEGLPENIPFRSPSWYGIPRLEKIIQVGNRIKFVIKRPELLTHSTTEVTQPRTNTPVKEDWNVRITKLRKQVEEIFNLKFAQALGLTEAVKVPYPVFESNPEFLYVEGLPEGIPFRSPTWFGIPRLERIVHGSNKIKFVVKKPELVISYLPPGMASKINTKALQSPKRPRSPGSNSKVPEIEVTVEGPNNNNPQTSAVRTPTQTNGSNVPFKPRGREFSFEAWNAKITDLKQKVENLFNEKCGEALGLKQAVKVPFALFESFPEDFYVEGLPEGVPFRRPSTFGIPRLEKILRNKAKIKFIIKKPEMFETAIKESTSSKSPPRKINSSPNVNTTASGVEDLNIIQVTIPDDDNERLSKVEKARQLREQVNDLFSRKFGEAIGMGFPVKVPYRKITINPGCVVVDGMPPGVSFKAPSYLEISSMRRILDSAEFIKFTVIRIS

SEQ ID NO: 910541 - protein, 837 aa, Homo sapiens
MNHLEGSAEVEVTDEAAGGEVNESVEADLEHPEVEEEQQQPPQQQHYVGRHQRGRALEDLRAQLGQEEEERGECLARSASTESGFHNHTDTAEGDVIAAARDGYDAERAQDPEDESAYAVQYRPEAEEYTEQAEAEHAEATHRRALPNHLHFHSLEHEEAMNAAYSGYVYTHRLFHRGEDEPYSEPYADYGGLQEHVYEEIGDAPELDARDGLRLYEQERDEAAAYRQEALGARLHHYDERSDGESDSPEKEAEFAPYPRMDSYEQEEDIDQIVAEVKQSMSSQSLDKAAEDMPEAEQDLERPPTPAGGRPDSPGLQAPAGQQRAVGPAGGGEAGQRYSKEKRDAISLAIKDIKEAIEEVKTRTIRSPYTPDEPKEPIWVMRQDISPTRDCDDQRPMDGDSPSPGSSSPLGAESSSTSLHPSDPVEAPTNKESRKSLASFPTYVEVPGPCDPEDLIDGIIFAANYLGSTQLLSDKTPSKNVRMMQAQEAVSRIKMAQKLAKSRKKAPEGESQPMTEVDLFISTQRIKVLNADTQETMMDHPLRTISYIADIGNIVVLMARRRMPRSNSQENVEASHPSQDGKRQYKMICHVFESEDAQLIAQSIGQAFSVAYQEFLRANGINPEDLSQKEYSDLLNTQDMYNDDLIHFSKSENCKDVFIEKQKGEILGVVIVESGWGSILPTVIIANMMHGGPAEKSGKLNIGDQIMSINGTSLVGLPLSTCQSIIKGLENQSRVKLNIVRCPPVTTVLIRRPDLRYQLGFSVQNGIICSLMRGGIAERGGVRVGHRIIEINGQSVVATPHEKIVHILSNAVGEIHMKTMPAAMYRLLTAQEQPVYI

SEQ ID NO: 910542 - protein, 826 aa, Homo sapiens
MNHLEGSAEVEVTDEAAGGEVNESVEADLEHPEVEEEQQQPPQQQHYVGRHQRGRALEDLRAQLGQEEEERGECLARSASTESGFHNHTDTAEGDVIAAARDGYDAERAQDPEDESAYAVQYRPEAEEYTEQAEAEHAEATHRRALPNHLHFHSLEHEEAMNAAYSGYVYTHRLFHRGEDEPYSEPYADYGGLQEHVYEEIGDAPELDARDGLRLYEQERDEAAAYRQEALGARLHHYDERSDGESDSPEKEAEFAPYPRMDSYEQEEDIDQIVAEVKQSMSSQSLDKAAEDMPEAEQDLERPPTPAGGRPDSPGLQAPAGQQRAVGPAGGGEAGQRYSKEKRDAISLAIKDIKEAIEEVKTRTIRSPYTPDEPKEPIWVMRQDISPTRDCDDQRPMDGDSPSPGSSSPLGAESSSTSLHPSDPVEAPTNKESRKSLASFPTYVEVPGPCDPEDLIDGIIFAANYLGSTQLLSDKTPSKNVRMMQAQEAVSRIKAPEGESQPMTEVDLFISTQRIKVLNADTQETMMDHPLRTISYIADIGNIVVLMARRRMPRSNSQENVEASHPSQDGKRQYKMICHVFESEDAQLIAQSIGQAFSVAYQEFLRANGINPEDLSQKEYSDLLNTQDMYNDDLIHFSKSENCKDVFIEKQKGEILGVVIVESGWGSILPTVIIANMMHGGPAEKSGKLNIGDQIMSINGTSLVGLPLSTCQSIIKGLENQSRVKLNIVRCPPVTTVLIRRPDLRYQLGFSVQNGIICSLMRGGIAERGGVRVGHRIIEINGQSVVATPHEKIVHILSNAVGEIHMKTMPAAMYRLLTAQEQPVYI

SEQ ID NO: 910543 - protein, 837 aa, Homo sapiens; identical to SEQ ID NO: 910541

SEQ ID NO: 910544 - protein, 108 aa, Homo sapiens
AFSDDANNMAAESGSDFQQRRRRRRDPEEPEKTELSERELAVAVAVSQENDEENEERWVGPLPVEATLAKKRKVLEFERVYLDNLPSASMYERSYMHRDVITHVVCTK

SEQ ID NO: 910545 - protein, 90 aa, Homo sapiens
AFSDDANNMAAESGSDFQQRRRRRRDPEEPEKTELSERELAVAVAVSQENDEENEERWVGPLPVEATLAKKRKGSCRHSTGTNWSAASAE

SEQ ID NO: 910546 - protein, 470 aa, Homo sapiens
MKVFDVVNFDMINMLKLGYFPGQCEWIYCPGDAISSVAASEKSTGKIFIYDGRGDNQPLHIFDKLHTSPLTQIRLNPVYKAVVSSDKSGMIEYWTGPPHEYKFPKNVNWEYKTDTDLYEFAKCKAYPTSVCFSPDGKKIATIGSDRKVRIFRFVTGKLMRVFDESLSMFTELQQMRQQLPDMEFGRRMAVERELEKVDAVRLINIVFDETGHFVLYGTMLGIKVINVETNRGYAKKHRAATTIEMKASENPVLQNIQADPTIVCTSFKKNRFYMFTKREPEDTKSADSDRDVFNEKPSKEEVMAATQAEGPKRVSDSAIIHTSMGDIHTKLFPVECPKTVENFCVHSRNGYYNGHTFHRIIKGFMIQTGDPTGTGMGGESIWGGEFEDEFHSTLRHDRPYTLSMANAGSNTNGSQFFITVVPTPWLDNKHTVFGRVTKGMEVVQRISNVKVNPKTDKPYEDVSIINITVK

SEQ ID NO: 910547 - protein, 634 aa, Homo sapiens
AFSDDANNMAAESGSDFQQRRRRRRDPEEPEKTELSERELAVAVAVSQENDEENEERWVGPLPVEATLAKKRKVLEFERVYLDNLPSASMYERSYMHRDVITHVVCTKTDFIITASHDGHVKFWKKIEEGIEFVKHFRSHLGVIESIAVSSEGALFCSVGDDKAMKVFDVVNFDMINMLKLGYFPGQCEWIYCPGDAISSVAASEKSTGKIFIYDGRGDNQPLHIFDKLHTSPLTQIRLNPVYKAVVSSDKSGMIEYWTGPPHEYKFPKNVNWEYKTDTDLYEFAKCKAYPTSVCFSPDGKKIATIGSDRKVRIFRFVTGKLMRVFDESLSMFTELQQMRQQLPDMEFGRRMAVERELEKVDAVRLINIVFDETGHFVLYGTMLGIKVINVETNRGYAKKHRAATTIEMKASENPVLQNIQADPTIVCTSFKKNRFYMFTKREPEDTKSADSDRDVFNEKPSKEEVMAATQAEGPKRVSDSAIIHTSMGDIHTKLFPVECPKTVENFCVHSRNGYYNGHTFHRIIKGFMIQTGDPTGTGMGGESIWGGEFEDEFHSTLRHDRPYTLSMANAGSNTNGSQFFITVVPTPWLDNKHTVFGRVTKGMEVVQRISNVKVNPKTDKPYEDVSIINITVK

SEQ ID NO: 910548 - protein, 346 aa, Homo sapiens
MCLAPLIYSPQQPHEVGISNSYLVLEFERVYLDNLPSASMYERSYMHRDVITHVVCTKTDFIITASHDGHVKFWKKIEEGIEFVKHFRSHLGVIESIAVSSEGALFCSVGDDKAMKVFDVVNFDMINMLKLGYFPGQCEWIYCPGDAISSVAASEKSTGKIFIYDGRGDNQPLHIFDKLHTSPLTQIRLNPVYKAVVSSDKSGMIEYWTGPPHEYKFPKNVNWEYKTDTDLYEFAKCKAYPTSVCFSPDGKKIATIGSDRKVRIFRFVTGKLMRVFDESLSMFTELQQMRQQLPDMEFGRRMAVERELEKVDAVRLINIVFDETGHFVLYGTMLGIKVINVETNRG

SEQ ID NO: 910549 - protein, 475 aa, Homo sapiens
AFSDDANNMAAESGSDFQQRRRRRRDPEEPEKTELSERELAVAVAVSQENDEENEERWVGPLPVEATLAKKRKVLEFERVYLDNLPSASMYERSYMHRDVITHVVCTKTDFIITASHDGHVKFWKKIEEGIEFVKHFRSHLGVIESIAVSSEGALFCSVGDDKAMKVFDVVNFDMINMLKLGYFPGQCEWIYCPGDAISSVAASEKSTGKIFIYDGRGDNQPLHIFDKLHTSPLTQIRLNPVYKAVVSSDKSGMIEYWTGPPHEYKFPKNVNWEYKTDTDLYEFAKCKAYPTSVCFSPDGKKIATIGSDRKVRIFRFVTGKLMRVFDESLSMFTELQQMRQQLPDMEFGRRMAVERELEKVDAVRLINIVFDETGHFVLYGTMLGIKVINVETNRCVRILGKQENIRVMQLALFQGIAKKHRAATTIEMKASENPVLQNIQADPTIVCTSFKKNRFYMVCVSTRRLDGNVPSSLV

SEQ ID NO: 910550 - protein, 332 aa, Homo sapiens
AFSDDANNMAAESGSDFQQRRRRRRDPEEPEKTELSERELAVAVAVSQENDEENEERWVGPLPVEATLAKKRKVLEFERVYLDNLPSASMYERSYMHRDVITHVVCTKTDFIITASHDGHVKFWKKIEEGIEFVKHFRSHLGVIESIAVSSEGALFCSVGDDKAMKVFDVVNFDMINMLKLGYFPGQCEWIYCPGDAISSVAASEKSTGKIFIYDGRGDNQPLHIFDKLHTSPLTQIRLNPVYKAVVSSDKSGMIEYWTGPPHEYKFPKNVNWEYKTDTDLYEFAKCKAYPTSVCFSPDGKKIATIGSDRKVRIFRFVTGKLMRVFDESLSS

SEQ ID NO: 910551 - protein, 335 aa, Homo sapiens
AFSDDANNMAAESGSDFQQRRRRRRDPEEPEKTELSERELAVAVAVSQENDEENEERWVGPLPVEATLAKKRKVLEFERVYLDNLPSASMYERSYMHRDVITHVVCTKTDFIITASHDGHVKFWKKIEEGIEFVKHFRSHLGVIESIAVSSEGALFCSVGDDKAMKVFDVVNFDMINMLKLGYFPGQCEWIYCPGDAISSVAASEKSTGKIFIYDGRGDNQPLHIFDKLHTSPLTQIRLNPVYKAVVSSDKSGMIEYWTGPPHEYKFPKNVNWEYKTDTDLYEFAKCKAYPTSVCFSPDGKKIATIGSDRKVRIFRFVTGKLMRVFDESLSVSVI

SEQ ID NO: 910552 - protein, 654 aa, Homo sapiens
AFSDDANNMAAESGSDFQQRRRRRRDPEEPEKTELSERELAVAVAVSQENDEENEERWVGPLPVEATLAKKRKVLEFERVYLDNLPSASMYERSYMHRDVITHVVCTKTDFIITASHDGHVKFWKKIEEGIEFVKHFRSHLGVIESIAVSSEGALFCSVGDDKAMKVFDVVNFDMINMLKLGYFPGQCEWIYCPGDAISSVAASEKSTGKIFIYDGRGDNQPLHIFDKLHTSPLTQIRLNPVYKAVVSSDKSGMIEYWTGPPHEYKFPKNVNWEYKTDTDLYEFAKCKAYPTSVCFSPDGKKIATIGSDRKVRIFRFVTGKLMRVFDESLSMFTELQQMRQQLPDMEFGRRMAVERELEKVDAVRLINIVFDETGHFVLYGTMLGIKVINVETNRCVRILGKQENIRVMQLALFQGIAKKHRAATTIEMKASENPVLQNIQADPTIVCTSFKKNRFYMFTKREPEDTKSADSDRDVFNEKPSKEEVMAATQAEGPKRVSDSAIIHTSMGDIHTKLFPVECPKTVENFCVHSRNGYYNGHTFHRIIKGFMIQTGDPTGTGMGGESIWGGEFEDEFHSTLRHDRPYTLSMANAGSNTNGSQFFITVVPTPWLDNKHTVFGRVTKGMEVVQRISNVKVNPKTDKPYEDVSIINITVK

SEQ ID NO: 910553 - protein, 109 aa, Homo sapiens
MHAAITSCVGRENEVSDFQQRRRRRRDPEEPEKTELSERELAVAVAVSQENDEENEERWVGPLPVEATLAKKRKVLEFERVYLDNLPSASMYERSYMHRDVITHVVCTK

SEQ ID NO: 910554 - protein, 634 aa, Homo sapiens; identical to SEQ ID NO: 910547

SEQ ID NO: 910555 - protein, 545 aa, Homo sapiens
MYERSYMHRDVITHVVCTKTDFIITASHDGHVKFWKKIEEGIEFVKHFRSHLGVIESIAVSSEGALFCSVGDDKAMKVFDVVNFDMINMLKLGYFPGQCEWIYCPGDAISSVAASEKSTGKIFIYDGRGDNQPLHIFDKLHTSPLTQIRLNPVYKAVVSSDKSGMIEYWTGPPHEYKFPKNVNWEYKTDTDLYEFAKCKAYPTSVCFSPDGKKIATIGSDRKVRIFRFVTGKLMRVFDESLSMFTELQQMRQQLPDMEFGRRMAVERELEKVDAVRLINIVFDETGHFVLYGTMLGIKVINVETNRGYAKKHRAATTIEMKASENPVLQNIQADPTIVCTSFKKNRFYMFTKREPEDTKSADSDRDVFNEKPSKEEVMAATQAEGPKRVSDSAIIHTSMGDIHTKLFPVECPKTVENFCVHSRNGYYNGHTFHRIIKGFMIQTGDPTGTGMGGESIWGGEFEDEFHSTLRHDRPYTLSMANAGSNTNGSQFFITVVPTPWLDNKHTVFGRVTKGMEVVQRISNVKVNPKTDKPYEDVSIINITVK

SEQ ID NO: 910556 - protein, 168 aa, Homo sapiens [sequence omitted]

SEQ ID NO: 910557 - protein, 395 aa, Homo sapiens
AFSDDANNMAAESGSDFQQRRRRRRDPEEPEKTELSERELAVAVAVSQENDEENEERWVGPLPVEATLAKKRKVLEFERVYLDNLPSASMYERSYMHRDVITHVVCTKTDFIITASHDGHVKFWKKIEEGIEFVKHFRSHLGVIESIAVSSEGALFCSVGDDKAMKVFDVVNFDMINMLKLGYFPGQCEWIYCPGDAISSVAASEKSTGKIFIYDGRGDNQPLHIFDKLHTSPLTQIRLNPVYKAVVSSDKSGMIEYWTGPPHEYKFPKNVNWEYKTDTDLYEFAKCKAYPTSVCFSPDGKKIATIGSDRKVRIFRFVTGKLMRVFDESLSMFTELQQMRQQLPDMEFGRRMAVERELEKVDAVRLINIVFDETGHFVLYGTMLGIKVINVETNR

SEQ ID NO: 910558 - protein, 146 aa, Homo sapiens
MGSFSHRTILFLFSSLMHGIKFSSILLFFPTGEGMSQAATICKSNFKYMYWTMLQQLTHHSVNGCNLRPGDLLASGTISGPEPENFGSMLELSWKGTKPIDLGNGQTRKFLLDGDEVIITGYCQGDGYRIGFGQCAGKVLPALLPS

SEQ ID NO: 910559 - protein, 294 aa, Homo sapiens
MSFIPVAEDSDFPIHNLPYGVFSTRGDPRPRIGVAIGDQILDLSIIKHLFTGPVLSKHQDVFNQPTLNSFMGLGQAAWKEARVFLQNLLSVSQARLRDDTELRKCAFISQASATMHLPATIGDYTDFYSSRQHATNVGIMFRDKENALMPNWLHLPVGYHGRASSVVVSGTPIRRPMGQMKPDDSKPPVYGACKLLDMELEMAFFVGPGNRLGEPIPISKAHEHIFGMVLMNDWSGRDLPTVGKYVPSPGHPLGRGLGDHLLLGVGPLGCSLALGVPSRSSGPVLSRLSRASSI

SEQ ID NO: 910560 - protein, 174 aa, Homo sapiens
MSFIPVAEDSDFPIHNLPYGVFSTRGDPRPRIGVAIGDQILDLSIIKHLFTGPVLSKHQDVFNQPTLNSFMGLGQAAWKEARVFLQNLLSVSQARLRDDTELRKCAFISQASATMHLPATIGECSLFTKIRTEQLRGPRGLARRLHRLLFLSAACYQRRNHVQGQGECVDAKLV

SEQ ID NO: 910561 - protein, 442 aa, Homo sapiens
GRDCGGPGAGGGQGPQPCRVLFSMSFIPVAEDSDFPIHNLPYGVFSTRGDPRPRIGVAIGDQILDLSIIKHLFTGPVLSKHQDVFNQPTLNSFMGLGQAAWKEARVFLQNLLSVSQARLRDDTELRKCAFISQASATMHLPATIGDYTDFYSSRQHATNVGIMFRDKENALMPNWLHLPVGYHGRASSVVVSGTPIRRPMGQMKPDDSKPPVYGACKLLDMELEMAFFVGPGNRLGEPIPISKAHEHIFGMVLMNDWSARDIQKWEYVPLGPFLGKSFGTTVSPWVVPMDALMPFAVPNPKQDPRPLPYLCHDEPYTFDINLSVNLKGEGMSQAATICKSNFKYMYWTMLQQLTHHSVNGCNLRPGDLLASGTISGPEPENFGSMLELSWKGTKPIDLGNGQTRKFLLDGDEVIITGYCQGDGYRIGFGQCAGKVLPALLPS

SEQ ID NO: 910562 - protein, 419 aa, Homo sapiens
MSFIPVAEDSDFPIHNLPYGVFSTRGDPRPRIGVAIGDQILDLSIIKHLFTGPVLSKHQDVFNQPTLNSFMGLGQAAWKEARVFLQNLLSVSQARLRDDTELRKCAFISQASATMHLPATIGDYTDFYSSRQHATNVGIMFRDKENALMPNWLHLPVGYHGRASSVVVSGTPIRRPMGQMKPDDSKPPVYGACKLLDMELEMAFFVGPGNRLGEPIPISKAHEHIFGMVLMNDWSARDIQKWEYVPLGPFLGKSFGTTVSPWVVPMDALMPFAVPNPKQDPRPLPYLCHDEPYTFDINLSVNLKGEGMSQAATICKSNFKYMYWTMLQQLTHHSVNGCNLRPGDLLASGTISGPEPENFGSMLELSWKGTKPIDLGNGQTRKFLLDGDEVIITGYCQGDGYRIGFGQCAGKVLPALLPS

SEQ ID NO: 910563 - protein, 462 aa, Homo sapiens
TDSDFPIHNLPYGVFSDQRRPKTEDRCGHWDQILDLSIIKHLSMSFIPVAEDSDFPIHNLPYGVFSTRGDPRPRIGVAIGDQILDLSIIKHLFTGPVLSKHQDVFNQPTLNSFMGLGQAAWKEARVFLQNLLSVSQARLRDDTELRKCAFISQASATMHLPATIGDYTDFYSSRQHATNVGIMFRDKENALMPNWLHLPVGYHGRASSVVVSGTPIRRPMGQMKPDDSKPPVYGACKLLDMELEMAFFVGPGNRLGEPIPISKAHEHIFGMVLMNDWSARDIQKWEYVPLGPFLGKSFGTTVSPWVVPMDALMPFAVPNPKQDPRPLPYLCHDEPYTFDINLSVNLKGEGMSQAATICKSNFKYMYWTMLQQLTHHSVNGCNLRPGDLLASGTISGPEPENFGSMLELSWKGTKPIDLGNGQTRKFLLDGDEVIITGYCQGDGYRIGFGQCAGKVLPALLPS

SEQ ID NO: 910564 - protein, 401 aa, Homo sapiens
RGRGCRQRRPRPRIGVAIGDQILDLSIIKHLFTGPVLSKHQDVFNQPTLNSFMGLGQAAWKEARVFLQNLLSVSQARLRDDTELRKCAFISQASATMHLPATIGDYTDFYSSRQHATNVGIMFRDKENALMPNWLHLPVGYHGRASSVVVSGTPIRRPMGQMKPDDSKPPVYGACKLLDMELEMAFFVGPGNRLGEPIPISKAHEHIFGMVLMNDWSARDIQKWEYVPLGPFLGKSFGTTVSPWVVPMDALMPFAVPNPKQDPRPLPYLCHDEPYTFDINLSVNLKGEGMSQAATICKSNFKYMYWTMLQQLTHHSVNGCNLRPGDLLASGTISGPEPENFGSMLELSWKGTKPIDLGNGQTRKFLLDGDEVIITGYCQGDGYRIGFGQCAGKVLPALLPS

SEQ ID NO: 910565 - protein, 440 aa, Homo sapiens
KLKEECEAVARAFVYFIRMAADTEFDITLGETYGCILNQNRAKNDRYVVAHRVPNTDTEDDQPLLLKCVLSSTMDHVNVNSFTLHVYQLHWSLSVAVCWKEARVFLQNLLSVSQARLRDDTELRKCAFISQASATMHLPATIGDYTDFYSSRQHATNVGIMFRDKENALMPNWLHLPVGYHGRASSVVVSGTPIRRPMGQMKPDDSKPPVYGACKLLDMELEMAFFVGPGNRLGEPIPISKAHEHIFGMVLMNDWSARDIQKWEYVPLGPFLGKSFGTTVSPWVVPMDALMPFAVPNPKQDPRPLPYLCHDEPYTFDINLSVNLKGEGMSQAATICKSNFKYMYWTMLQQLTHHSVNGCNLRPGDLLASGTISGPEPENFGSMLELSWKGTKPIDLGNGQTRKFLLDGDEVIITGYCQGDGYRIGFGQCAGKVLPALLPS

SEQ ID NO: 910566 - protein, 419 aa, Homo sapiens; identical to SEQ ID NO: 910562

SEQ ID NO: 910567 - protein, 360 aa, Homo sapiens
MSFIPVAEDSDFPIHNLPYGVFSTRGDPRPRIGVAIGDQILDLSIIKHLFTGPVLSKHQDVFNQPTLNSFMGLGQAAWKEARVFLQNLLSVSQARLRDDTELRKCAFISQASATMHLPATIGDYTDFYSSRQHATNVGIMFRDKENALMPNWLHLPVGYHGRASSVVVSGTPIRRPMGQMKPDDSKPPVYGACKLLDMELEMAFFVGPGNRLGEPIPISKAHEHIFGMVLMNDWSARDIQKWEYVPLGPFLGKSFGTTVSPWVVPMDALMPFAVPNPKQDPRPLPYLCHDEPYTFDINLSVNLKGEGMSQAATICKSNFKYMYWTMLQQLTHHSVNGCNLRPGDLLASGTISGPVSIWLH

SEQ ID NO: 910568 - protein, 385 aa, Homo sapiens
MSFIPVAEDSDFPIHNLPYGVFSTRGDPRPRIGVAIGDQILDLSIIKHLFTGPVLSKHQDVFNQPTLNSFMGLGQAAWKEARVFLQNLLSVSQARLRDDTELRKCAFISQASATMHLPATIGDYTDFYSSRQHATNVGIMFRDKENALMPNWLHLPVGYHGRASSVVVSGTPIRRPMGQMKPDDSKPPVYGACKLLDMELEMAFFVGPGNRLGEPIPISKAHEHIFGMVLMNDWSARDIQKWEYVPLGPFLGKSFGTTVSPWVVPMDALMPFAVPNPKQDPRPLPYLCHDEPYTFDINLSVNLKGEGMSQAATICKSNFKEPENFGSMLELSWKGTKPIDLGNGQTRKFLLDGDEVIITGYCQGDGYRIGFGQCAGKVLPALLPS

SEQ ID NO: 910569 - protein, 154 aa, Homo sapiens [sequence omitted]

SEQ ID NO: 910570 - protein, 237 aa, Homo sapiens
MSFIPVAEDSDFPIHNLPYGVFSTRGDPRPRIGVAIGDQILDLSIIKHLFTGPVLSKHQDVFNQPTLNSFMGLGQAAWKEARVFLQNLLSVSQARLRDDTELRKCAFISQASATMHLPATIGDYTDFYSSRQHATNVGIMFRDKENALMPNWLHLPVGYHGRASSVVVSGTPIRRPMGQMKPDDSRLRYGLGALALRRNGLCGPEHVWAPPFRPGLCGLYDGARAKGGLGPGSGAPA

SEQ ID NO: 910571 - protein, 419 aa, Homo sapiens; identical to SEQ ID NO: 910562

SEQ ID NO: 910572 - protein, 419 aa, Homo sapiens; identical to SEQ ID NO: 910562

SEQ ID NO: 910573 - protein, 405 aa, Homo sapiens
GETVEDLELAGVRPRPRIGVAIGDQILDLSIIKHLFTGPVLSKHQDVFNQPTLNSFMGLGQAAWKEARVFLQNLLSVSQARLRDDTELRKCAFISQASATMHLPATIGDYTDFYSSRQHATNVGIMFRDKENALMPNWLHLPVGYHGRASSVVVSGTPIRRPMGQMKPDDSKPPVYGACKLLDMELEMAFFVGPGNRLGEPIPISKAHEHIFGMVLMNDWSARDIQKWEYVPLGPFLGKSFGTTVSPWVVPMDALMPFAVPNPKQDPRPLPYLCHDEPYTFDINLSVNLKGEGMSQAATICKSNFKYMYWTMLQQLTHHSVNGCNLRPGDLLASGTISGPEPENFGSMLELSWKGTKPIDLGNGQTRKFLLDGDEVIITGYCQGDGYRIGFGQCAGKVLPALLPS

SEQ ID NO: 910574 - protein, 408 aa, Homo sapiens
MSFIPVAEDSDFPIHNLPYGVFSTRGDQILDLSIIKHLFTGPVLSKHQDVFNQPTLNSFMGLGQAAWKEARVFLQNLLSVSQARLRDDTELRKCAFISQASATMHLPATIGDYTDFYSSRQHATNVGIMFRDKENALMPNWLHLPVGYHGRASSVVVSGTPIRRPMGQMKPDDSKPPVYGACKLLDMELEMAFFVGPGNRLGEPIPISKAHEHIFGMVLMNDWSARDIQKWEYVPLGPFLGKSFGTTVSPWVVPMDALMPFAVPNPKQDPRPLPYLCHDEPYTFDINLSVNLKGEGMSQAATICKSNFKYMYWTMLQQLTHHSVNGCNLRPGDLLASGTISGPEPENFGSMLELSWKGTKPIDLGNGQTRKFLLDGDEVIITGYCQGDGYRIGFGQCAGKVLPALLPS

SEQ ID NO: 910575 - protein, 419 aa, Homo sapiens
MSFIPVAEDSDFPIHNLPYGVFSTRGDPRPRIGVAIGDQILDLSIIKHLFTGPVLSKHQDVFNQPTLNSFMGLGQAAWKEARVFLQNLLSVSQARLRDDTELRKCAFISQASATMHLPATIGDYTDFYSSRQHATNVGIMFRDKENALMPNWLHLPVGYHGRASSVVVSGTPIRRPMGQMKPDDSKPPVYGACKLLDMELEMAFFVGPGNRLGEPIPISKAHEHIFGMVLMNDWSARDIQKWEYVPLGPFLGKSFGTTVSPWVVPMDALMPFAVPNPKQDPRPLPYLCHDEPYTFDINLSVNLKGEGMSQAATICKSNFKYMYWTMLQQLTHHSVNGCNLRPGDLLASGTISGPEPENFGSMLELSWKGTKPIDLGNGQTRKFLLDGDEVIITGYCQGDGYRIGFGQCAGASSTPFPVT

SEQ ID NO: 910576 - protein, 248 aa, Homo sapiens
WLSRGSLIGSQDDSKPPVYGACKLLDMELEMAFFVGPGNRLGEPIPISKAHEHIFGMVLMNDWSARDIQKWEYVPLGPFLGKSFGTTVSPWVVPMDALMPFAVPNPKQDPRPLPYLCHDEPYTFDINLSVNLKGEGMSQAATICKSNFKYMYWTMLQQLTHHSVNGCNLRPGDLLASGTISGPEPENFGSMLELSWKGTKPIDLGNGQTRKFLLDGDEVIITGYCQGDGYRIGFGQCAGKVLPALLPS

SEQ ID NO: 910577 - protein, 432 aa, Homo sapiens
MSFIPVAEDSDFPIHNLPYGVFSTRGDPRPRIGVAIGDQILDLSIIKHLFTGPVLSKHQDVFNQPTLNSFMGLGQAAWKEARVFLQNLLSVSQARLRDDTELRKCAFISQASATMHLPATIGDYTDFYSSRQHATNVGIMFRDKENALMPNWLHLPVGYHGRASSVVVSGTPIRRPMGQMKPDDSKPPVYGACKLLDMELEMAFFVGPGNRLGEPIPISKAHEHIFGMVLMNDWSARDIQKWEYVPLGPFLGKSFGTTVSPWVVPMDALMPFAVPNPKQVSTFSAGSSQTQPCCLRGCLPTEWTCQACRPSGGKLCAHGMPTAECLGVPGHDYFQAARASFSLVVSLALAQFLEKTQNFVTLRILQDPGDLASWQEESLQVPTLHNLPGGHQILFCANGATWTPTHRMQLGAQQQGVPAASGSRHRLVYHWV

SEQ ID NO: 910578 - protein, 798 aa, Homo sapiens
GHSADSSRQSGTRHTESSSRGQAASSHEQARSSAGERHGSHHQLQSADSSRHSGIGHGQASSAVRDSGHRGYSGSQASDSEGHSEDSDTQSVSAQGKAGPHQQSHKESARGQSGESSGRSGSFLYQVSTHEQSESTHGQSAPSTGGRQGSHYDQAQDSSRHSASQEGQDTIRGHPGPSRGGRQGSHQEQSVDRSGHSGSHHSHTTSQGRSDASRGQSGSRSASRKTYDKEQSGDGSRHSGSHHHEASTQADSSRHSQSGQGQSAGPRTSRNQGSSVSQDSDSQGHSEDSERWSGSASRNHRGSAQEQSRDGSRHPRSHHEDRAGHGHSAESSRQSGTHHAENSSGGQAASSHEQARSSAGERHGSHHQQSADSSRHSGIGHGQASSAVRDSGHRGSSGSQASDSEGHSEDSDTQSVSAHGQAGPHQQSHQESTRGRSAGRSGRSGSFLYQVSTHEQSESAHGRAGPSTGGRQGSRHEQARDSSRHSASQEGQDTIRGHPGSRRGGRQGSYHEQSVDRSGHSGSHHSHTTSQGRSDASHGQSGSRSASRETRNEEQSGDGSRHSGSRHHEASTQADSSRHSQSGQGESAGSRRSRRQGSSVSQDSDSEAYPEDSERRSESASRNHHGSSREQSRDGSRHPGSSHRDTASHVQSSPVQSDSSTAKEHGHFSSLSQDSAYHSGIQSRGSPHSSSSYHYQSEGTERQKGQSGLVWRHGSYGSADYDYGESGFRHSQHGSVSYNSNPVVFKERSDICKASAFGKDHPRYYATYINKDPGLCGHSSDISKQLGFSQSQRYYYYE

SEQ ID NO: 910579 - protein, 347 aa, Homo sapiens
MESPASSQPASMPQSKGKSKRKKDLRISCMSKPPAPNPTPPRNLDSRTFITIGDRNFEVEADDLVTISELGRGAYGVVEKVRHAQSGTIMAVKRIRATVNSQEQKRLLMDLDINMRTVDCFYTVTFYGALFREGDVWICMELMDTSLDKFYRKVLDKNMTIPEDILGEIAVSIVRALEHLHSKLSVIHRDVKPSNVLINKEGHVKMCDFGISGYLVDSVAKTMDAGCKPYMAPERINPELNQKGYNVKSDVWSLGITMIEMAILRFPYESWGTPFQQLKQVVEEPSPQLPADRFSPEFVDFTAQCLRKNPAERMSYLELMEHPFFTLHKTKKTDIAAFVKEILGEDS

SEQ ID NO: 910580 - protein, 430 aa, Homo sapiens
AGNGLADLEPGPRGDLWSTAYDPGARPVDAEASPYTTQACEERGPHPSSPYVQVPLTERLVISMVTIYGPQQVPICAVNPVLSTYADVILLRPAALCGAGKSKRKKDLRISCMSKPPAPNPTPPRNLDSRTFITIGDRNFEVEADDLVTISELGRGAYGVVEKVRHAQSGTIMAVKRIRATVNSQEQKRLLMDLDINMRTVDCFYTVTFYGALFREGDVWICMELMDTSLDKFYRKVLDKNMTIPEDILGEIAVSIVRALEHLHSKLSVIHRDVKPSNVLINKEGHVKMCDFGISGYLVDSVAKTMDAGCKPYMAPERINPELNQKGYNVKSDVWSLGITMIEMAILRFPYESWGTPFQQLKQVVEEPSPQLPADRFSPEFVDFTAQCLRKNPAERMSYLELMEHPFFTLHKTKKTDIAAFVKEILGEDS

SEQ ID NO: 910581 - protein, 413 aa, Homo sapiens
RPGQRRLPAAGGCRGQSIYHPGLRGAWSPPIQPICASALDREAGHIHGDHLWATTGPHLRSEPCAEHLADVILLRPAALCGAGKSKRKKDLRISCMSKPPAPNPTPPRNLDSRTFITIGDRNFEVEADDLVTISELGRGAYGVVEKVRHAQSGTIMAVKRIRATVNSQEQKRLLMDLDINMRTVDCFYTVTFYGALFREGDVWICMELMDTSLDKFYRKVLDKNMTIPEDILGEIAVSIVRALEHLHSKLSVIHRDVKPSNVLINKEGHVKMCDFGISGYLVDSVAKTMDAGCKPYMAPERINPELNQKGYNVKSDVWSLGITMIEMAILRFPYESWGTPFQQLKQVVEEPSPQLPADRFSPEFVDFTAQCLRKNPAERMSYLELMEHPFFTLHKTKKTDIAAFVKEILGEDS

SEQ ID NO: 910582 - protein, 108 aa, Homo sapiens
WRIRHEDVMSDVWSLGITMIEMAILRFPYESWGTPFQQLKQVVEEPSPQLPADRFSPEFVDFTAQCLRKNPAERMSYLELMEHPFFTLHKTKKTDIAAFVKEILGEDS

SEQ ID NO: 910583 - protein, 347 aa, Homo sapiens; identical to SEQ ID NO: 910579

SEQ ID NO: 910584 - protein, 347 aa, Homo sapiens; identical to SEQ ID NO: 910579

SEQ ID NO: 910585 - protein, 265 aa, Homo sapiens
MESPASSQPASMPQSKGKSKRKKDLRISCMSKPPAPNPTPPRNLDSRTFITIGDRNFEVEADDLVTISELGRGAYGVVEKVRHAQSGTIMAVKRIRATVNSQEQKRLLMDLDINMRTVDCFYTVTFYGALFREGDVWICMELMDTSLDKFYRKVLDKNMTIPEDILGEIAVSIVRALEHLHSKLSVIHRDVKPSNVLINKEGHVKMCDFGISGYLVDSVAKTMDAGCKPYMAPERINPELNQKGYNVKSDVWSLGITMPGGDGVS

SEQ ID NO: 910586 - protein, 347 aa, Homo sapiens; identical to SEQ ID NO: 910579

SEQ ID NO: 910587 - protein, 124 aa, Homo sapiens
MALVPGWVGAPNPRSWVQSVVVSGAGASDPLSPLQIEMAILRFPYESWGTPFQQLKQVVEEPSPQLPADRFSPEFVDFTAQCLRKNPAERMSYLELMEHPFFTLHKTKKTDIAAFVKEILGEDS

SEQ ID NO: 910588 - protein, 347 aa, Homo sapiens; identical to SEQ ID NO: 910579

SEQ ID NO: 910589 - protein, 388 aa, Homo sapiens
MESPASSQPASMPQSKGKSKRKKDLRISCMSKPPAPNPTPPRNLDSRTFITIGDRNFEVEADDLVTISELGRGAYGVVEKVRHAQSGTIMAVKRIRATVNSQEQKRLLMDLDINMRTVDCFYTVTFYGALFREGDVWICMELMDTSLDKFYRKVLDKNMTIPEDILGEIAVSIVRALEHLHSKLSVIHRDVKPSNVLINKEGHVKMCDFGISGYLVDSVAKTMDAGCKPYMAPERINPELNQKGYNVKSDVWSLGITMIEMAILRFPYESWGTPFQQLKQVVEEPSPQLPADRFSPEFVDFTAQCLRKNPAERMSYLELMLIASPPPPRVPAGRALPSAQAGVQWEGPKISAQRSAGGAFQLTLPEDWLDRGYGFALVLFLKKENIFF

SEQ ID NO: 910590 - protein, 114 aa, Homo sapiens
MTCKMSQLERNIETIINTFHQYSVKLGHPDTLNQGEFKELVRKDLQNFLKKENKNEKVIEHIMEDLDTNADKQLSFEEFIMLMARLTWASHEKMHEGDEGPGHHHKPGLGEGTP

SEQ ID NO: 910591 - protein, 108 aa, Homo sapiens
VSSSSFVNPNCGDAALRPATAPASPQFGLTREDGSMGYSNQGEDLSSWSPAPRRSECPVIQGRCSQLHRTTGSRNCSIEHLLFVGPCSGQRDVVVNGEPTIPVEGDTQ

SEQ ID NO: 910592 - protein, 114 aa, Homo sapiens; identical to SEQ ID NO: 910590

SEQ ID NO: 910593 - protein, 114 aa, Homo sapiens; identical to SEQ ID NO: 910590

SEQ ID NO: 910594 - protein, 144 aa, Homo sapiens
MSLLRGSSSCCGALGHPPLGIVLLLTHLHLHGRRFIINRLRFHELKVSADEDCLLNPMEVVPEQGEFKELVRKDLQNFLKKENKNEKVIEHIMEDLDTNADKQLSFEEFIMLMARLTWASHEKMHEGDEGPGHHHKPGLGEGTP

SEQ ID NO: 910595 - protein, 182 aa, Homo sapiens
MTCKMSQLERNIETIINTFHQYSVKLGHPDTLNQGEFKELVRKDLQNFLKKENKNEKVIEHIMEDLDTNADKQLSFEEFIMLMVTQLLYNFLNISSVPLVSEHLEPVIGVEQRTDPSCIVRRTMFVKPHFSRALRHTLVPVCVAAFVLSACGTQKATSQSTSMKVTRGTISQSISGSGQIEA

SEQ ID NO: 910596 - protein, 146 aa, Homo sapiens [sequence omitted]

SEQ ID NO: 910597 - protein, 93 aa, Homo sapiens
GRLLLLLLLEFKLLTMYGVMVATATATNQEARPPCLYPTRAPGPVMSNCLGCGARGWGQIKSLPPKKKKKKKKKGGGEKKSPGGPSLAAPGFL

SEQ ID NO: 910598 - protein, 114 aa, Homo sapiens; identical to SEQ ID NO: 910590

SEQ ID NO: 910599 - protein, 119 aa, Homo sapiens
REECYRQAIGNGERRIQRTIINTFHQYSVKLGHPDTLNQGEFKELVRKDLQNFLKKENKNEKVIEHIMEDLDTNADKQLSFEEFIMLMARLTWASHEKMHEGDEGPGHHHKPGLGEGTP

SEQ ID NO: 910600 - protein, 104 aa, Homo sapiens
MTCKMSQLERNIETIINTFHQYSVKLGHPDTLNQGEFKELKENKNEKVIEHIMEDLDTNADKQLSFEEFIMLMARLTWASHEKMHEGDEGPGHHHKPGLGEGTP

SEQ ID NO: 910601 - protein, 618 aa, Homo sapiens
PAPLWTPALGALRRPPSERACSRRRPEHPQLRRRGETETDRATGPRGRSISEENMLANSASVRILIKGGKVVNDDCTHEADVYIENGIIQQVGRELMIPGGAKVIDATGKLVIPGGIDTSTHFHQTFMNATCVDDFYHGTKAALVGGTTMIIGHVLPDKETSLVDAYEKCRGLADPKVCCDYALHVGITWWAPKVKAEMETLVREKGVNSFQMFMTYKDLYMLRDSELYQVLHACKDIGAIARVHAENGELVAEGAKEALDLGITGPEGIEISRPEELEAEATHRVITIANRTHCPIYLVNVSSISAGDVIAAAKMQGKVVLAETTTAHATLTGLHYYHQDWSHAAAYVTVPPLRLDTNTSTYLMSLLANDTLNIVASDHRPFTTKQKAMGKEDFTKIPHGVSGVQDRMSVIWERGVVGGKMDENRFVAVTSSNAAKLLNLYPRKGRIIPGADADVVVWDPEATKTISASTQVQGGDFNLYENMRCHGVPLVTISRGRVVYENGVFMCAEGTGKFCPLRSFPDTVYKKLVQREKTLKVRGVDRTPYLGDVAVVVHPGKKEMGTPLADTPTRPVTRHGGMRDLHESSFSLSGSQIDDHVPKRASARILAPPGGRSSGIW

SEQ ID NO: 910602 - protein, 564 aa, Homo sapiens
MLANSASVRILIKGGKVVNDDCTHEADVYIENGIIQQVGRELMIPGGAKVIDATGKLVIPGGIDTSTHFHQTFMNATCVDDFYHGTKAALVGGTTMIIGHVLPDKETSLVDAYEKCRGLADPKVCCDYALHVGITWWAPKVKAEMETLVREKGVNSFQMFMTYKDLYMLRDSELYQVLHACKDIGAIARVHAENGELVAEGAKEALDLGITGPEGIEISRPEELEAEATHRVITIANRTHCPIYLVNVSSISAGDVIAAAKMQGKVVLAETTTAHATLTGLHYYHQDWSHAAAYVTVPPLRLDTNTSTYLMSLLANDTLNIVASDHRPFTTKQKAMGKEDFTKIPHGVSGVQDRMSVIWERGVVGGKMDENRFVAVTSSNAAKLLNLYPRKGRIIPGADADVVVWDPEATKTISASTQVQGGDFNLYENMRCHGVPLVTISRGRVVYENGVFMCAEGTGKFCPLRSFPDTVYKKLVQREKTLKVRGVDRTPYLGDVAVVVHPGKKEMGTPLADTPTRPVTRHGGMRDLHESSFSLSGSQIDDHVPKRASARILAPPGGRSSGIW

SEQ ID NO: 910603 - protein, 618 aa, Homo sapiens; identical to SEQ ID NO: 910601

SEQ ID NO: 910604 - protein, 373 aa, Homo sapiens
PPPLWTPALGALRRPPSERACSRRRPEHPQLRRRGETETDRATGPRGRSISEENMLANSASVRILIKGGKVVNDDCTHEADVYIENGIIQQVGRELMIPGGAKVIDATGKLVIPGGIDTSTHFHQTFMNATCVDDFYHGTKAALVGGTTMIIGHVLPDKETSLVDAYEKCRGLADPKVCCDYALHVGITWWAPKVKAEMETLVREKGVNSFQMFMTYKDLYMLRDSELYQVLHACKDIGAIARVHAENGELVAEGAKEALDLGITGPEGIEISRPEELEAEATHRVITIANRTHCPIYLVNVSSISAGDVIAAAKMQVLGVHSRSLSSRCRDEGFSDTDPEATEPQGNPNPLQLLRRRHSLGSDGASSTPAPR

SEQ ID NO: 910605 - protein, 168 aa, Homo sapiens
PPPLWTPALGALRRPPSERACSRRRPEHPQLRRRGETETDRATGPRGRSISEENMLANSASVRILIKGGKVVNDDCTHEADVYIENGIIQQVGRELMIPGGAKVIDATGKLVIPGGIDTSTHFHQTFMNATCVDDFYHGTKVMLLFAKGGFLFGFFILLLGLLQTRLM

SEQ ID NO: 910606 - protein, 618 aa, Homo sapiens; identical to SEQ ID NO: 910601

SEQ ID NO: 910607 - protein, 564 aa, Homo sapiens; identical to SEQ ID NO: 910602

SEQ ID NO: 910608 - protein, 118 aa, Homo sapiens
MCDKEFMWALKNGDLDEVKDYVAKGEDVNRTLEGGRKPLHYAADCGQLEILEFLLLKGADINAPDKHHITPLLSAVYEGHVSCVKLLLSKGADKTVKGPDGLTAFEATDNQAIKALLQ

SEQ ID NO: 910609 - protein, 118 aa, Homo sapiens; identical to SEQ ID NO: 910608

SEQ ID NO: 910610 - protein, 118 aa, Homo sapiens; identical to SEQ ID NO: 910608

SEQ ID NO: 910611 - protein, 118 aa, Homo sapiens; identical to SEQ ID NO: 910608

SEQ ID NO: 910612 - protein, 118 aa, Homo sapiens; identical to SEQ ID NO: 910608

SEQ ID NO: 910613 - protein, 118 aa, Homo sapiens; identical to SEQ ID NO: 910608

SEQ ID NO: 910614 - protein, 118 aa, Homo sapiens; identical to SEQ ID NO: 910608

SEQ ID NO: 910615 - protein, 118 aa, Homo sapiens; identical to SEQ ID NO: 910608

SEQ ID NO: 910616 - protein, 118 aa, Homo sapiens; identical to SEQ ID NO: 910608

SEQ ID NO: 910617 - protein, 118 aa, Homo sapiens; identical to SEQ ID NO: 910608

SEQ ID NO: 910618 - protein, 166 aa, Homo sapiens
GRRWAFICGPAGREPDPSDLPRRQRFTQRLPAARSWVQLCVHASPEPGGQGVCPGRSERMVIRVFIASSSGFVAIKKKQQDVVRFLEANKIEFEEVDITMSEEQRQWMYKNVPPEKKPTQGNPLPPQIFNGDRYCGDYDSFFESKESNTVFSFLGLKPRLASKAEP

SEQ ID NO: 910619 - protein, 166 aa, Homo sapiens; identical to SEQ ID NO: 910618

SEQ ID NO: 910620 - protein, 184 aa, Homo sapiens
GRRWAFICGPAGREPDPSDLPRRQRFTQRLPAARSWVQLCVHASPEPGGQGVCPGRSERMVIRVFIASSSGFVAIKKKQQDVVRFLEANKIEFEEVDITMSEEQRQWMYKNVPPEKKPTQGNPLPPQIFNGDRYCGDYDSFFESKESNTVFSFLGLKPRLASKVGKSFLILVLEFISFEFFLEM

SEQ ID NO: 910621 - protein, 166 aa, Homo sapiens; identical to SEQ ID NO: 910618

SEQ ID NO: 910622 - protein, 166 aa, Homo sapiens; identical to SEQ ID NO: 910618

SEQ ID NO: 910623 - protein, 166 aa, Homo sapiens; identical to SEQ ID NO: 910618

SEQ ID NO: 910624 - protein, 177 aa, Homo sapiens
IRKGAQLHISCTIKVTHLPQEFPEIIFRKDKRFVAPPDMANKAVYSVMAMVEHSGNYTCKVESSRISKVSSIVVNITELFSKPELESSFTHLDQGERLNLSCSIPGAPPANFTIQKEDTIVSQTQDFLALWFCCIICDVLLFVSFCFFFKEKTKTKWDYVCRCVSVPKSYFLKSLNF

SEQ ID NO: 910625 - protein, 1100 aa, Homo sapiens
MFTLSQTSRAWFIDRARQAREERLVQKERERAAVVIQAHVRSFLCRSRLQRDIRREIDDFFKADDPESTKRSALCIFKIARKLLFLFRIKEDNERFEKLCRSILSSMDAENEPKVWYVSLACSKDLTLLWIQQIKNILWYCCDFLKQLKPEILQDSRLITLYLTMLVTFTDTSTWKILRGKGESLRPAMNHICANIMGHLNQHGFYSVLQILLTRGLARPRPCLSKGTLTAAFSLALRPVIAAQFSDNLIRPFLIHIMSVPALVTHLSTVTPERLTVLESHDMLRKFIIFLRDQDRCRDVCESLEGCHTLCLMGNLLHLGSLSPRVLEEETDGFVSLLTQTLCYCRKYVSQKKSNLTHWHPVLGWFSQSVDYGLNESMHLITKQLQFLWGVPLIRIFFCDILSKKLLESQEPAHAQPASPQNVLPVKSLLKRAFQKSASVRNILRPVGGKRVDSAEVQKVCNICVLYQTSLTTLTQIRLQILTGLTYLDDLLPKLWAFICELGPHGGLKLFLECLNNDTEESKQLLAMLMLFCDCSRHLITILDDIEVYEEQISFKLEELVTISSFLNSFVFKMIWDGIVENAKGETLELFQSVHGWLMVLYERDCRRRFTPEDHWLRKDLKPSVLFQELDRDRKRAQLILQYIPHVIPHKNRVLLFRTMVTKEKEKLGLVETSSASPHVTHITIRRSRMLESLFECPWPLVINAESCWKAVCAEQWMFLTFFKDGYEQLRQLSQHAMKGVIRVKFVNDLGVDEAGIDQDGVFKEFLEEIIKRVFDPALNLFKTTSGDERLYPSPTSYIHENYLQLFEFVGKMLGKAVYEGIVVDVPFASFFLSQLLGHHHSVFYSSVDELPSLDSEFYKNLTSIKRYDGDITDLGLTLSYDEDVMGQLVCHELIPGGKTIPVTNENKISYIHLMAHFRMHTQIKNQTAALISGFRSIIKPEWIRMFSTPELQRLISGDNAEIDLEDLKKHTVYYGGFHGSHRVIIWLWDILASDFTPDERAMFLKFVTSCSRPPLLGFAYLKPPFSIRCVEVSDDQDTGDTLGSVLRGFFTIRKREPGGRLPTSSTCFNLLKLPNYSKKSVLREKLRYAISMNTGFELS

SEQ ID NO: 910626 - protein, 1100 aa, Homo sapiens; identical to SEQ ID NO: 910625

SEQ ID NO: 910627 - protein, 1100 aa, Homo sapiens; identical to SEQ ID NO: 910625

SEQ ID NO: 910628 - protein, 1068 aa, Homo sapiens
MFTLSQTSRAWFIDRARQAREERLVQKERERAAVVIQAHVRSFLCRSRLQRDIRREIDDFFKADDPESTKRSALCIFKIARKLLFLFRIKEDNERFEKLCRSILSSMDAENEPKVWYVSLACSKDLTLLWIQQIKNILWYCCDFLKQLKPEILQDSRLITLYLTMLVTFTDTSTWKILRGKGESLRPAMNHICANIMGHLNQHGFYSVLQILLTRGLARPRPCLSKGTLTAAFSLALRPVIAAQFSDNLIRPFLIHIMSVPALVTHLSTVTPERLTVLESHDMLRKFIIFLRDQDRCRDVCESLEGCHTLCLMGNLLHLGSLSPRVLEEETDGFVSLLTQTLCYCRKYVSQKKSNLTHWHPVLGWFSQSVDYGLNESMHLITKQLQFLWGVPLIRIFFCDILSKKLLESQEPAHAQPASPQNVLPVKSLLKRAFQKSASVRNILRPVGGKRVDSAEVQKVCNICVLYQTSLTTLTQIRLQILTGLTYLDDLLPKLWAFICELGPHGGLKLFLECLNNDTEESKQLLAMLMLFCDCSRHLITILDDIEVYEEQISFKLEELVTISSFLNSFVFKMIWDGIVENAKGETLELFQSVHGWLMVLYERDCRRRFTPEDHWLRKDLKPSVLFQELDRDRKRAQLILQYIPHVIPHKNRVLLFRTMVTKEKEKLGLVETSSASPHVTHITIRRSRMLEDGYEQLRQLSQHAMKGVIRVKFVNDLGVDEAGIDQDGVFKEFLEEIIKRVFDPALNLFKTTSGDERLYPSPTSYIHENYLQLFEFVGKMLGKAVYEGIVVDVPFASFFLSQLLGHHHSVFYSSVDELPSLDSEFYKNLTSIKRYDGDITDLGLTLSYDEDVMGQLVCHELIPGGKTIPVTNENKISYIHLMAHFRMHTQIKNQTAALISGFRSIIKPEWIRMFSTPELQRLISGDNAEIDLEDLKKHTVYYGGFHGSHRVIIWLWDILASDFTPDERAMFLKFVTSCSRPPLLGFAYLKPPFSIRCVEVSDDQDTGDTLGSVLRGFFTIRKREPGGRLPTSSTCFNLLKLPNYSKKSVLREKLRYAISMNTGFELS

SEQ ID NO: 910629 - protein, 850 aa, Homo sapiens
MNIKLISSSDQLKHSFQILLTRGLARPRPCLSKGTLTAAFSLALRPVIAAQFSDNLIRPFLIHIMSVPALVTHLSTVTPERLTVLESHDMLRKFIIFLRDQDRCRDVCESLEGCHTLCLMGNLLHLGSLSPRVLEEETDGFVSLLTQTLCYCRKYVSQKKSNLTHWHPVLGWFSQSVDYGLNESMHLITKQLQFLWGVPLIRIFFCDILSKKLLESQEPAHAQPASPQNVLPVKSLLKRAFQKSASVRNILRPVGGKRVDSAEVQKVCNICVLYQTSLTTLTQIRLQILTGLTYLDDLLPKLWAFICELGPHGGLKLFLECLNNDTEESKQLLAMLMLFCDCSRHLITILDDIEVYEEQISFKLEELVTISSFLNSFVFKMIWDGIVENAKGETLELFQSVHGWLMVLYERDCRRRFTPEDHWLRKDLKPSVLFQELDRDRKRAQLILQYIPHVIPHKNRVLLFRTMVTKEKEKLGLVETSSASPHVTHITIRRSRMLEDGYEQLRQLSQHAMKGVIRVKFVNDLGVDEAGIDQDGVFKEFLEEIIKRVFDPALNLFKTTSGDERLYPSPTSYIHENYLQLFEFVGKMLGKAVYEGIVVDVPFASFFLSQLLGHHHSVFYSSVDELPSLDSEFYKNLTSIKRYDGDITDLGLTLSYDEDVMGQLVCHELIPGGKTIPVTNENKISYIHLMAHFRMHTQIKNQTAALISGFRSIIKPEWIRMFSTPELQRLISGDNAEIDLEDLKKHTVYYGGFHGSHRVIIWLWDILASDFTPDERAMFLKFVTSCSRPPLLGFAYLKPPFSIRCVEVSDDQAVHVQARCFISSLAKGEGKPSGLRSSVCLKPGPLWVLK

SEQ ID NO: 910630 - protein, 829 aa, Homo sapiens
MNIKLISSSDQLKHSFQILLTRGLARPRPCLSKGTLTAAFSLALRPVIAAQFSDNLIRPFLIHIMSVPALVTHLSTVTPERLTVLESHDMLRKFIIFLRDQDRCRDVCESLEGCHTLCLMGNLLHLGSLSPRVLEEETDGFVSLLTQTLCYCRKYVSQKKSNLTHWHPVLGWFSQSVDYGLNESMHLITKQLQFLWGVPLIRIFFCDILSKKLLESQEPAHAQPASPQNVLPVKSLLKRAFQKSASVRNILRPVGGKRVDSAEVQKVCNICVLYQTSLTTLTQIRLQILTGLTYLDDLLPKLWAFICELGPHGGLKLFLECLNNDTEESKQLLAMLMLFCDCSRHLITILDDIEVYEEQISFKLEELVTISSFLNSFVFKMIWDGIVENAKGETLELFQSVHGWLMVLYERDCRRRFTPEDHWLRKDLKPSVLFQELDRDRKRAQLILQYIPHVIPHKNRVLLFRTMVTKEKEKLGLVETSSASPHVTHITIRRSRMLEDGYEQLRQLSQHAMKGVIRVKFVNDLGVDEAGIDQDGVFKEFLEEIIKRVFDPALNLFKTTSGDERLYPSPTSYIHENYLQLFEFVGKMLGKAVYERYDGDITDLGLTLSYDEDVMGQLVCHELIPGGKTIPVTNENKISYIHLMAHFRMHTQIKNQTAALISGFRSIIKPEWIRMFSTPELQRLISGDNAEIDLEDLKKHTVYYGGFHGSHRVIIWLWDILASDFTPDERAMFLKFVTSCSRPPLLGFAYLKPPFSIRCVEVSDDQDTGDTLGSVLRGFFTIRKREPGGRLPTSSTCFNLLKLPNYSKKSVLREKLRYAISMNTGFELS

SEQ ID NO: 910631 - protein, 875 aa, Homo sapiens
MNIKLISSSDQLKHSFQILLTRGLARPRPCLSKGTLTAAFSLALRPVIAAQFSDNLIRPFLIHIMSVPALVTHLSTVTPERLTVLESHDMLRKFIIFLRDQDRCRDVCESLEGCHTLCLMGNLLHLGSLSPRVLEEETDGFVSLLTQTLCYCRKYVSQKKSNLTHWHPVLGWFSQSVDYGLNESMHLITKQLQFLWGVPLIRIFFCDILSKKLLESQEPAHAQPASPQNVLPVKSLLKRAFQKSASVRNILRPVGGKRVDSAEVQKVCNICVLYQTSLTTLTQIRLQILTGLTYLDDLLPKLWAFICELGPHGGLKLFLECLNNDTEESKQLLAMLMLFCDCSRHLITILDDIEVYEEQISFKLEELVTISSFLNSFVFKMIWDGIVENAKGETLELFQSVHGWLMVLYERDCRRRFTPEDHWLRKDLKPSVLFQELDRDRKRAQLILQYIPHVIPHKNRVLLFRTMVTKEKEKLGLVETSSASPHVTHITIRRSRMLEDGYEQLRQLSQHAMKGVIRVKFVNDLGVDEAGIDQDGVFKEFLEEIIKRVFDPALNLFKTTSGDERLYPSPTSYIHENYLQLFEFVGKMLGKAVYEGIVVDVPFASFFLSQLLGHHHSVFYSSVDELPSLDSEFYKNLTSIKRYDGDITDLGLTLSYDEDVMGQLVCHELIPGGKTIPVTNENKISYIHLMAHFRMHTQIKNQTAALISGFRSIIKPEWIRMFSTPELQRLISGDNAEIDLEDLKKHTVYYGGFHGSHRVIIWLWDILASDFTPDERAMFLKFVTSCSRPPLLGFAYLKPPFSIRCVEVSDDQDTGDTLGSVLRGFFTIRKREPGGRLPTSSTCFNLLKLPNYSKKSVLREKLRYAISMNTGFELS

SEQ ID NO: 910632 - protein, 731 aa, Homo sapiens
GGKRVDSAEVQKVCNICVLYQTSLTTLTQIRLQILTGLTYLDDLLPKLWAQLWRPLIRIFFCDILSKKLLESQEPAHAQPASPQNVLPVKSLLKRAFQKSASVRNILRPVGGKRVDSAEVQKVCNICVLYQTSLTTLTQIRLQILTGLTYLDDLLPKLWAFICELGPHGGLKLFLECLNNDTEESKQLLAMLMLFCDCSRHLITILDDIEVYEEQISFKLEELVTISSFLNSFVFKMIWDGIVENAKGETLELFQSVHGWLMVLYERDCRRRFTPEDHWLRKDLKPSVLFQELDRDRKRAQLILQYIPHVIPHKNRVLLFRTMVTKEKEKLGLVETSSASPHVTHITIRRSRMLEDGYEQLRQLSQHAMKGVIRVKFVNDLGVDEAGIDQDGVFKEFLEEIIKRVFDPALNLFKTTSGDERLYPSPTSYIHENYLQLFEFVGKMLGKAVYEGIVVDVPFASFFLSQLLGHHHSVFYSSVDELPSLDSEFYKNLTSIKRYDGDITDLGLTLSYDEDVMGQLVCHELIPGGKTIPVTNENKISYIHLMAHFRMHTQIKNQTAALISGFRSIIKPEWIRMFSTPELQRLISGDNAEIDLEDLKKHTVYYGGFHGSHRVIIWLWDILASDFTPDERAMFLKFVTSCSRPPLLGFAYLKPPFSIRCVEVSDDQDTGDTLGSVLRGFFTIRKREPGGRLPTSSTCFNLLKLPNYSKKSVLREKLRYAISMNTGFELS

SEQ ID NO: 910633 - protein, 691 aa, Homo sapiens
GGKRVDSAEVQKVCNICVLYQTSLTTLTQIRLQILTGLTYLDDLLPKLWAQLWRPLIRIFFCDILSKKLLESQEPAHAQPASPQNVLPVKSLLKRAFQKSASVRNILRPVGGKRVDSAEVQKVCNICVLYQTSLTTLTQIRLQILTGLTYLDDLLPKLWAFICELGPHGGLKLFLECLNNDTEESKQLLAMLMLFCDCSRTSSQNAKGETLELFQSVHGWLMVLYERDCRRRFTPEDHWLRKDLKPSVLFQELDRDRKRAQLILQYIPHVIPHKNRVLLFRTMVTKEKEKLGLVETSSASPHVTHITIRRSRMLEDGYEQLRQLSQHAMKGVIRVKFVNDLGVDEAGIDQDGVFKEFLEEIIKRVFDPALNLFKTTSGDERLYPSPTSYIHENYLQLFEFVGKMLGKAVYEGIVVDVPFASFFLSQLLGHHHSVFYSSVDELPSLDSEFYKNLTSIKRYDGDITDLGLTLSYDEDVMGQLVCHELIPGGKTIPVTNENKISYIHLMAHFRMHTQIKNQTAALISGFRSIIKPEWIRMFSTPELQRLISGDNAEIDLEDLKKHTVYYGGFHGSHRVIIWLWDILASDFTPDERAMFLKFVTSCSRPPLLGFAYLKPPFSIRCVEVSDDQDTGDTLGSVLRGFFTIRKREPGGRLPTSSTCFNLLKLPNYSKKSVLREKLRYAISMNTGFELS

SEQ ID NO: 910634 - protein, 288 aa, Homo sapiens
MLGKAVYEGIVVDVPFASFFLSQLLGHHHSVFYSSVDELPSLDSEFYKNLTSIKRYDGDITDLGLTLSYDEDVMGQLVCHELIPGGKTIPVTNENKISYIHLMAHFRMHTQIKNQTAALISGFRSIIKPEWIRMFSTPELQRLISGDNAEIDLEDLKKHTVYYGGFHGSHRVIIWLWDILASDFTPDERAMFLKFVTSCSRPPLLGFAYLKPPFSIRCVEVSDDQDTGDTLGSVLRGFFTIRKREPGGRLPTSSTCFNLLKLPNYSKKSVLREKLRYAISMNTGFELS

SEQ ID NO: 910635 - protein, 1100 aa, Homo sapiens; identical to SEQ ID NO: 910625

SEQ ID NO: 910636 - protein, 604 aa, Homo sapiens
MNIKLISSSDQLKHSFQILLTRGLARPRPCLSKGTLTAAFSLALRPVIAAQFSDNLIRPFLIHIMSVPALVTHLSTVTPERLTVLESHDMLRKFIIFLRDQDRCRDVCESLEGCHTLCLMGNLLHLGSLSPRVLEEETDGFVSLLTQTLCYCRKYVSQKKSNLTHWHPVLGWFSQSVDYGLNESMHLITKQLQFLWGVPLIRIFFCDILSKKLLESQEPAHAQPASPQNVLPVKSLLKRAFQKSASVRNILRPVGGKRVDSAEVQKVCNICVLYQTSLTTLTQIRLQILTGLTYLDDLLPKLWAFICELGPHGGLKLFLECLNNDTEESKQLLAMLMLFCDCSRHLITILDDIEVYEEQISFKLEELVTISSFLNSFVFKMIWDGIVENAKGETLELFQSVHGWLMVLYERDCRRRFTPEDHWLRKDLKPSVLFQELDRDRKRAQLILQYIPHVIPHKNRVLLFRTMVTKEKEKLGLVETSSASPHVTHITIRRSRMLEDGYEQLRQLSQHAMKGVIRVKFVNDLGVDEAGIDQDGVFKEFLEEIIKRVFDPALNLFKTTSGDERLYPSPTSYIHENYLQLFEFVGKMLGKAVYEVGTLRNREM

SEQ ID NO: 910637 - protein, 244 aa, Homo sapiens
MFTLSQTSRAWFIDRARQAREERLVQKERERAAVVIQAHVRSFLCRSRLQRDIRREIDDFFKADDPESTKRSALCIFKIARKLLFLFRIKEDNERFEKLCRSILSSMDAENEPKVWYVSLACSKDLTLLWIQQIKNILWYCCDFLKQLKPEILQDSRLITLYLTMLVTFTDTSTWKILRGKGESLRPAMNHICANIMGHLNQHGFYSVLQCCDGLFPDLVSYAPHNNPVRWSVGRSWYDWQLSR

SEQ ID NO: 910638 - protein, 296 aa, Homo sapiens
MFTLSQTSRAWFIDRARQAREERLVQKERERAAVVIQAHVRSFLCRSRLQRDIRREIDDFFKADDPESTKRSALCIFKIARKLLFLFRIKEDNERFEKLCRSILSSMDAENEPKVWYVSLACSKDLTLLWIQQIKNILWYCCDFLKQLKPEILQDSRLITLYLTMLVTFTDTSTWKILRGKGESLRPAMNHICANIMGHLNQHGFYSVLQRSVTPAPQCATSPLSNTCTWIFTFAFSIPGVLLRNTFHRKSLMPAVLFFLPLPCLTCGSGKGRTVVLGSLECSTFLAARVIQSFDI

SEQ ID NO: 910639 - protein, 1068 aa, Homo sapiens; identical to SEQ ID NO: 910628

SEQ ID NO: 910640 - protein, 1068 aa, Homo sapiens; identical to SEQ ID NO: 910628

SEQ ID NO: 910641 - protein, 875 aa, Homo sapiens; identical to SEQ ID NO: 910631

SEQ ID NO: 910642 - protein, 875 aa, Homo sapiens; identical to SEQ ID NO: 910631

SEQ ID NO: 910643 - protein, 1100 aa, Homo sapiens; identical to SEQ ID NO: 910625

SEQ ID NO: 910644 - protein, 745 aa, Homo sapiens
MNIKLISSSDQLKHSFQILLTRGLARPRPCLSKGTLTAAFSLALRPVIAAQFSDNLIRPFLIHIMSVPALVTHLSTVTPERLTVLESHDMLRKFIIFLRDQDRCRDVCESLEGCHTLCLMGNLLHLGSLSPRVLEEETDGFVSLLTQTLCYCRKYVSQKKSNLTHWHPVLGWFSQSVDYGLNESMHLITKQLQFLWGVPLIRIFFCDILSKKLLESQEPAHAQPASPQNVLPVKSLLKRAFQKSASVRNILRPVGGKRVDSAEVQKVCNICVLYQTSLTTLTQIRLQILTGLTYLDDLLPKLWAFICELGPHGGLKLFLECLNNDTEESKQLLAMLMLFCDCSRHLITILDDIEVYEEQISFKLEELVTISSFLNSFVFKMIWDGIVENAKGETLELFQSVHGWLMVLYERDCRRRFTPEDHWLRKDLKPSVLFQELDRDRKRAQLILQYIPHVIPHKNRVLLFRTMVTKEKEKLGLVETSSASPHVTHITIRRSRMLEDGYEQLRQLSQHAMKGVIRVKFVNDLGVDEAGIDQDGVFKEFLEEIIKRVFDPALNLFKTTSGDERLYPSPTSYIHENYLQLFEFVGKMLGKAVYEGIVVDVPFASFFLSQLLGHHHSVFYSSVDELPSLDSEFYKNLTSIKRYDGDITDLGLTLSYDEDVMGQLVCHELIPGGKTIPVTNENKISYIHLMAHFRMHTQIKNQTAALISGFRSIIKPEWIRMFSTPELQRLISGDNAEIDLEDLNS

SEQ ID NO: 910645 - protein, 397 aa, Homo sapiens
MPRAARKAVCAEQWMFLTFFKDGYEQLRQLSQHAMKGVIRVKFVNDLGVDEAGIDQDGVFKEFLEEIIKRVFDPALNLFKTTSGDERLYPSPTSYIHENYLQLFEFVGKMLGKAVYEGIVVDVPFASFFLSQLLGHHHSVFYSSVDELPSLDSEFYKNLTSIKRYDGDITDLGLTLSYDEDVMGQLVCHELIPGGKTIPVTNENKISYIHLMAHFRMHTQIKNQTAALISGFRSIIKPEWIRMFSTPELQRLISGDNAEIDLEDLKKHTVYYGGFHGSHRVIIWLWDILASDFTPDERAMFLKFVTSCSRPPLLGFAYLKPPFSIRCVEVSDDQDTGDTLGSVLRGFFTIRKREPGGRLPTSSTCFNLLKLPNYSKKSVLREKLRYAISMNTGFELS

SEQ ID NO: 910646 - protein, 157 aa, Homo sapiens
YLSKAGSWTPQSQVRRAPQFSRQENQPAPERLPTDSALSRQPLSLSFLREGYLEWGWVRAVFSGVWPHQGSRSEAAWEKVREWAQEAGRRRLECYSYPSRLCTSRLAASFPHWPKEKESLQGYGALCVSSLAHCGCSNESPTPHKNPVAASGCSCLS

SEQ ID NO: 910647 - protein, 296 aa, Homo sapiens; identical to SEQ ID NO: 910638

SEQ ID NO: 910648 - protein, 270 aa, Homo sapiens
  misc_feature (211)..(211): Xaa can be any naturally occurring amino acid
  misc_feature (217)..(218): Xaa can be any naturally occurring amino acid
  misc_feature (220)..(221): Xaa can be any naturally occurring amino acid
  misc_feature (230)..(230): Xaa can be any naturally occurring amino acid
  misc_feature (233)..(233): Xaa can be any naturally occurring amino acid
  misc_feature (239)..(239): Xaa can be any naturally occurring amino acid
  misc_feature (252)..(252): Xaa can be any naturally occurring amino acid
MFTLSQTSRAWFIDRARQAREERLVQKERERAAVVIQAHVRSFLCRSRLQRDIRREIDDFFKADDPESTKRSALCIFKIARKLLFLFRIKEDNERFEKLCRSILSSMDAENEPKVWYVSLACSKDLTLLWIQQIKNILWYCCDFLKQLKPEILQDSRLITLYLTMLVTFTDTSTWKILRGKGESLRPAMNHICANIMGHLNQHGFYSVLQXPATPPXXSXXLLPRLSRVXNNXPSTTPXPPPRLPPASQTLXATPHAPPAYDEPPPPHHN

SEQ ID NO: 910649 - protein, 191 aa, Homo sapiens
MFTLSQTSRAWFIDRARQAREERLVQKERERAAVVIQAHVRSFLCRSRLQRDIRREIDDFFKADDPESTKRSALCIFKIARKLLFLFRIKEDNERFEKLCRSILSSMDAENEPKVWYVSLACSKDLTLLWIQQIKNILWYCCDFLKQLKPEILQDSRLITLYLTMLVTFTDTSTWKILRGKGLWDLLQNVL

SEQ ID NO: 910650 - protein, 539 aa, Homo sapiens
MVAELAGQQDPGLGAFSCQEARRAWLDRHGNLDEAVEECVRTRRRKVQELQSLGFGPEEGSLQALFQHGGDVSRALTELQRQRLEPFRQRLWDSGPEPTPSWDGPDKQSLVRRLLAVYALPSWGRAELALSLLQETPRNYELGDVVEAVRHSQDRAFLRRLLAQECAVCGWALPHNRMQALTSCECTICPDCFRQHFTIALKEKHITDMVCPACGRPDLTDDTQLLSYFSTLDIQLRESLEPDAYALFHKKLTEGVLMRDPKFLWCAQCSFGFIYEREQLEATCPQCHQTFCVRCKRQWEEQHRGRSCEDFQNWKRMNDPEYQAQGLAMYLQENGIDCPKCKFSYALARGGCMHFHCTQCRHQFCSGCYNAFYAKNKCPEPNCRVKKSLHGHHPRDCLFYLRDWTALRLQKLLQDNNVMFNTEPPAGARAVPGGGCRVIEQKEVPNGLRDEACGKETPAGYAGLCQAHYKEYLVSLINAHSLDPATLYEVEELETATERYLHVRPQPLAGEDPPAYQARLLQKLTEEVPLGQSIPRRRK

SEQ ID NO: 910651 - protein, 1048 aa, Homo sapiens
MPGEEEERAFLVAREELASALRRDSGQAFSLEQLRPLLASSLPLAARYLQLDAARLVRCNAHGEPRNYLNTLSTALNILEKYGRNLLSPQRPRYWRGVKFNNPVFRSTVDAVQGGRDVLRLYGYTEEQPDGLSFPEGQEEPDEHQVATVTLEVLLLRTELSLLLQNTHPRQQALEQLLEDKVEDDMLQLSEFDPLLREIAPGPSPHPLSQALCPACDHLFHGHPSRAHHLRQTLPGVLQGTHLSPSLPASAQPRPQSTSLLALGDSSLSSPNPASAHLPWHCAACAMLNEPWAVLCVACDRPRGCKGLGLGTEGPQGTGGLEPDLARGRWACQSCTFENEAAAVLCSICERPRLAQPPSLVVDSRDAGICLQPLQQGDALLASAQSQVWYCIHCTFCNSSPGWVCVMCNRTSSPIPAQHAPRPYASSLEKGPPKPGPPRRLSAPLPSSCGDPEKQRQDKMREEGLQLVSMIREGEAAGACPEEIFSALQYSGTEVPLQWLRSELPYVLEMVAELAGQQDPGLGAFSCQEARRAWLDRHGNLDEAVEECVRTRRRKVQELQSLGFGPEEGSLQALFQHGGDVSRALTELQRQRLEPFRQRLWDSGPEPTPSWDGPDKQSLVRRLLAVYALPSWGRAELALSLLQETPRNYELGDVVEAVRHSQDRAFLRRLLAQECAVCGWALPHNRMQALTSCECTICPDCFRQHFTIALKEKHITDMVCPACGRPDLTDDTQLLSYFSTLDIQLRESLEPDAYALFHKKLTEGVLMRDPKFLWCAQCSFGFIYEREQLEATCPQCHQTFCVRCKRQWEEQHRGRSCEDFQNWKRMNDPEYQAQGLAMYLQENGIDCPKCKFSYALARGGCMHFHCTQCRHQFCSGCYNAFYAKNKCPEPNCRVKKSLHGHHPRDCLFYLRDWTALRLQKLLQDNNVMFNTEPPAGARAVPGGGCRVIEQKEVPNGLRDEACGKETPAGYAGLCQAHYKEYLVSLINAHSLDPATLYEVEELETATERYLHVRPQPLAGEDPPAYQARLLQKLTEEVPLGQSIPRRRK

SEQ ID NO: 910652 - protein, 762 aa, Homo sapiens [sequence omitted]

SEQ ID NO: 910653 - protein, 962 aa, Homo sapiens
MPGEEEERAFLVAREELASALRRDSGQAFSLEQLRPLLASSLPLAARYLQLDAARLVRCNAHGEPRNYLNTLSTALNILEKYGRNLLSPQRPRYWRGVKFNNPVFRSTVDAVQGGRDVLRLYGYTEEQPDGLSFPEGQEEPDEHQVATVTLEVLLLRTELSLLLQNTHPRQQALEQLLEDKVEDDMLQLSEFDPLLREIAPGPLTTPSVPGSTPGPCFLCGSAPGTLHCPSCKQALCPACDHLFHGHPSRAHHLRQTLPGVLQGTHLSPSLPASAQPRPQSTSLLALGDSSLSSPNPASAHLPWHCAACAMLNEPWAVLCVACDRPRGCKGLGLGTEGPQGTGGLEPDLARGRWACQSCTFENEAAAVLCSICERPRLAQPPSLVVDSRDAGICLQPLQQGDALLASAQSQVWYCIHCTFCNSSPGWVCVMCNRTSSPIPAQHAPRPYASSLEKGPPKPGPPRRLSAPLPSSCGDPEKQRQDKMREEGLQLVSMIREGEAAGACPEEIFSALQYSGTEVPLQWLRSELPYVLEMVAELAGQQDPGLGAFSCQEARRAWLDRHGNLDEAVEECVRTRRRKVQELQSLGFGPEEGSLQALFQHGGDVSRALTELQRQRLEPFRQRLWDSGPEPTPSWDGPDKQSLVRRLLAVYALPSWGRAELALSLLQETPRNYELGDVVEAVRHSQDRAFLRRLLAQECAVCGWALPHNRMQALTSCECTICPDCFRQHFTIALKEKHITDMVCPACGRPDLTDDTQLLSYFSTLDIQLRESLEPDAYALFHKKLTEGVLMRDPKFLWCAQCSFGFIYEREQLEATCPQCHQTFCVRCKRQWEEQHRGRSCEDFQNWKRMNDPEYQAQGLAMYLQENGIDCPKCKFSYALARGGCMHFHCTQCRHQFCSGCYNAFYAKNKCPEPNCRVKKSLHGHHPRDCLFYLRDWTALRLQKLLQSLQLGPGQSLEAAAE

SEQ ID NO: 910654 - protein, 362 aa, Homo sapiens [sequence omitted]

SEQ ID NO: 910655 - protein, 974 aa, Homo sapiens
MPGEEEERAFLVAREELASALRRDSGQAFSLEQLRPLLASSLPLAARYLQLDAARLVRCNAHGEPRNYLNTLSTALNILEKYGRNLLSPQRPRYWRGVKFNNPVFRSTVDAVQGGRDVLRLYGYTEEQPDGLSFPEGQEEPDEHQVATVTLEVLLLRTELSLLLQNTHPRQQALEQLLEDKVEDDMLQLSEFDPLLREIAPGPLTTPSVPGSTPGPCFLCGSAPGTLHCPSCKQALCPACDHLFHGHPSRAHHLRQTLPGVLQGTHLSPSLPASAQPRPQSTSLLALGDSSLSSPNPASAHLPWHCAACAMLNEPWAVLCVACDRPRGCKGLGLGTEGPQGTGGLEPDLARGRWACQSCTFENEAAAVLCSICERPRLAQPPSLVVDSRDAGICLQPLQQGDALLASAQSQVWYCIHCTFCNSSPGWVCVMCNRTSSPIPAQHAPRPYASSLEKGPPKPGPPRRLSAPLPSSCGDPEKQRQDKMREEGLQLVSMIREGEAAGACPEEIFSALQYSGTEVPLQWLRSELPYVLEMVAELAGQQDPGLGAFSCQEARRAWLDRHGNLDEAVEECVRTRRRKVQELQSLGFGPEEGSLQALFQHGGDVSRALTELQRQRLEPFRQRLWDSGPEPTPSWDGPDKQSLVRRLLAVYALPSWGRAELALSLLQETPRNYELGDVVEAVRHSQDRAFLRRLLAQECAVCGWALPHNRMQALTSCECTICPDCFRQHFTIALKEKHITDMVCPACGRPDLTDDTQLLSYFSTLDIQLRESLEPDAYALFHKKLTEGVLMRDPKFLWCAQCSFGFIYEREQLEATCPQCHQTFCVRCKRQWEEQHRGRSCEDFQNWKRMNDPEYQAQGLAMYLQENGIDCPKCKFSYALARGGCMHFHCTQCRHQFCSGCYNAFYAKNKCPEPNCRVKKSLHGHHPRDCLFYLRDWTALRLQKLLQDNNVMFNTEPPAGARAVPGGHTTKSIL

SEQ ID NO: 910656 - protein, 302 aa, Homo sapiens
NLRGLKRVRRPPRVGFNRQKLMPDPYLWCAQCSFGFIYEREQLEATCPQCHQTFCVRCKRQWEEQHRGRSCEDFQNWKRMNDPEYQAQGLAMYLQENGIDCPKCKFSYALARGGCMHFHCTQCRHQFCSGCYNAFYAKNKCPEPNCRVKKSLHGHHPRDCLFYLRDWTALRLQKLLQDNNVMFNTEPPAGARAVPGGGCRVIEQKEVPNGLRDEACGKETPAGYAGLCQAHYKEYLVSLINAHSLDPATLYEVEELETATERYLHVRPQPLAGEDPPAYQARLLQKLTEEVPLGQSIPRRRK

SEQ ID NO: 910657 - protein, 1034 aa, Homo sapiens
MPGEEEERAFLVAREELASALRRDSGQAFSLEQLRPLLASSLPLAARYLQLDAARLVRCNAHGEPRNYLNTLSTALNILEKYGRNLLSPQRPRYWRGVKFNNPVFRSTVDAVQGGRDVLRLYGYTEEQPDGLSFPEGQEEPDEHQVATVTLEVLLLRTELSLLLQNTHPRQQALEQLLEDKVEDDMLQLSEFDPLLREIAPGPLTTPSVPGSTPGPCFLCGSAPGTLHCPSCKQALCPACDHLFHGHPSRAHHLRQTLPGVLQGTHLSPSLPASAQPRPQSTSLLALGDSSLSSPNPASAHLPWHCAACAMLNEPWAVLCVACDRPRGCKGLGLGTEGPQGTGGLEPDLARGRWACQSCTFENEAAAVLCSICERPRLAQPPSLVVDSRDAGICLQPLQQGDALLASAQSQVWYCIHCTFCNSSPGWVCVMCNRTSSPIPAQHAPRPYASSLEKGPPKPGPPRRLSAPLPSSCGDPEKQRQDKMREEGLQLVSMIREGEAAGACPEEIFSALQYSGTEVPLQWLRSELPYVLEMVAELAGQQDPGLGAFSCQEARRAWLDRHGNLDEAVEECVRTRRRKVQELQSLGFGPEEGSLQALFQHGGDVSRALTELQRQRLEPFRQRLWDSGPEPTPSWDGPDKQSLVRRLLAVYALPSWGRAELALSLLQETPRNYELGDVVEAVRHSQDRAFLRRLLAQECAVCGWALPHNRMQALTSCECTICPDCFRQHFTIALKEKHITDMVCPACGRPDLTDDTQLLSYFSTLDIQLRESLEPDAYALFHKKLTEGVLMRDPKFLWCAQCSFGFIYEREQLEATCPQCHQTFCVRCKRQWEEQHRGRSCEDFQNWKRMNDPEYQAQGLAMYLQENGIDCPKCKFSYALARGGCMHFHCTQCRHQFCSGCYNAFYAKNDNNVMFNTEPPAGARAVPGGGCRVIEQKEVPNGLRDEACGKETPAGYAGLCQAHYKEYLVSLINAHSLDPATLYEVEELETATERYLHVRPQPLAGEDPPAYQARLLQKLTEEVPLGQSIPRRRK

SEQ ID NO: 910658 - protein, 116 aa, Homo sapiens
SRQCGHRWVVNLVRPGVSESSYVRHTQLILANTTNILLPFLPRAHYKEYLVSLINAHSLDPATLYEVEELETATERYLHVRPQPLAGEDPPAYQARLLQKLTEEVPLGQSIPRRRK

SEQ ID NO: 910659 - protein, 131 aa, Homo sapiens
GLGTEGPQGTGGLEPDLARGRWACQSCTFENEAAAVLCSICERPRLAQPPSLVVDSRDAGICLQPLQVTGLPSSLSCVTSGILFPIPCFPSVPPNSLYFCCELQPASQRDNSLCLPSRGMLCWPLPRVKSG

SEQ ID NO: 910660 - protein, 1072 aa, Homo sapiens
MPGEEEERAFLVAREELASALRRDSGQAFSLEQLRPLLASSLPLAARYLQLDAARLVRCNAHGEPRNYLNTLSTALNILEKYGRNLLSPQRPRYWRGVKFNNPVFRSTVDAVQGGRDVLRLYGYTEEQPDGLSFPEGQEEPDEHQVATVTLEVLLLRTELSLLLQNTHPRQQALEQLLEDKVEDDMLQLSEFDPLLREIAPGPLTTPSVPGSTPGPCFLCGSAPGTLHCPSCKQALCPACDHLFHGHPSRAHHLRQTLPGVLQGTHLSPSLPASAQPRPQSTSLLALGDSSLSSPNPASAHLPWHCAACAMLNEPWAVLCVACDRPRGCKGLGLGTEGPQGTGGLEPDLARGRWACQSCTFENEAAAVLCSICERPRLAQPPSLVVDSRDAGICLQPLQQGDALLASAQSQVWYCIHCTFCNSSPGWVCVMCNRTSSPIPAQHAPRPYASSLEKGPPKPGPPRRLSAPLPSSCGDPEKQRQDKMREEGLQLVSMIREGEAAGACPEEIFSALQYSGTEVPLQWLRSELPYVLEMVAELAGQQDPGLGAFSCQEARRAWLDRHGNLDEAVEECVRTRRRKVQELQSLGFGPEEGSLQALFQHGGDVSRALTELQRQRLEPFRQRLWDSGPEPTPSWDGPDKQSLVRRLLAVYALPSWGRAELALSLLQETPRNYELGDVVEAVRHSQDRAFLRRLLAQECAVCGWALPHNRMQALTSCECTICPDCFRQHFTIALKEKHITDMVCPACGRPDLTDDTQLLSYFSTLDIQLRESLEPDAYALFHKKLTEGVLMRDPKFLWCAQCSFGFIYEREQLEATCPQCHQTFCVRCKRQWEEQHRGRSCEDFQNWKRMNDPEYQAQGLAMYLQENGIDCPKCKFSYALARGGCMHFHCTQCRHQFCSGCYNAFYAKNKCPEPNCRVKKSLHGHHPRDCLFYLRDWTALRLQKLLQDNNVMFNTEPPAGARAVPGGGCRVIEQKEVPNGLRDEACGKETPAGYAGLCQAHYKEYLVSLINAHSLDPATLYEVEELETATERYLHVRPQPLAGEDPPAYQARLLQKLTEEVPLGQSIPRRRK

SEQ ID NO: 910661 - protein, 353 aa, Homo sapiens
MQALTSCECTICPDCFRQHFTIALKEKHITDMVCPACGRPDLTDDTQLLSYFSTLDIQLRESLEPDAYALFHKKLTEGVLMRDPKFLWCAQCSFGFIYEREQLEATCPQCHQTFCVRCKRQCEDFQNWKRMNDPEYQAQGLAMYLQENGIDCPKCKFSYALARGGCMHFHCTQCRHQFCSGCYNAFYAKNKCPEPNCRVKKSLHGHHPRDCLFYLRDWTALRLQKLLQDNNVMFNTEPPAGARAVPGGGCRVIEQKEVPNGLRDEACGKETPAGYAGLCQAHYKEYLVSLINAHSLDPATLYEVEELETATERYLHVRPQPLAGEDPPAYQARLLQKLTEEVPLGQSIPRRRK

SEQ ID NO: 910662 - protein, 518 aa, Homo sapiens
MAWIVMAALIVLLCHGVCEDQSKEAVQELQSLGFGPEEGSLQALFQHGGDVSRALTELQRQRLEPFRQRLWDSGPEPTPSWDGPDKQSLVRRLLAVYALPSWGRAELALSLLQETPRNYELGDVVEAVRHSQDRAFLRRLLAQECAVCGWALPHNRMQALTSCECTICPDCFRQHFTIALKEKHITDMVCPACGRPDLTDDTQLLSYFSTLDIQLRESLEPDAYALFHKKLTEGVLMRDPKFLWCAQCSFGFIYEREQLEATCPQCHQTFCVRCKRQWEEQHRGRSCEDFQNWKRMNDPEYQAQGLAMYLQENGIDCPKCKFSYALARGGCMHFHCTQCRHQFCSGCYNAFYAKNKCPEPNCRVKKSLHGHHPRDCLFYLRDWTALRLQKLLQDNNVMFNTEPPAGARAVPGGGCRVIEQKEVPNGLRDEACGKETPAGYAGLCQAHYKEYLVSLINAHSLDPATLYEVEELETATERYLHVRPQPLAGEDPPAYQARLLQKLTEEVPLGQSIPRRRK

SEQ ID NO: 910663 - protein, 376 aa, Homo sapiens
MPGEEEERAFLVAREELASALRRDSGQAFSLEQLRPLLASSLPLAARYPACGRPDLTDDTQLLSYFSTLDIQLRESLEPDAYALFHKKLTEGVLMRDPKFLWCAQCSFGFIYEREQLEATCPQCHQTFCVRCKRQWEEQHRGRSCEDFQNWKRMNDPEYQAQGLAMYLQENGIDCPKCKFSYALARGGCMHFHCTQCRHQFCSGCYNAFYAKNKCPEPNCRVKKSLHGHHPRDCLFYLRDWTALRLQKLLQDNNVMFNTEPPAGARAVPGGGCRVIEQKEVPNGLRDEACGKETPAGYAGLCQAHYKEYLVSLINAHSLDPATLYEVEELETATERYLHVRPQPLAGEDPPAYQARLLQKLTEEVPLGQSIPRRRK

SEQ ID NO: 910664 - protein, 181 aa, Homo sapiens
LQDLTIHQRCYNAFYAKNKCPEPNCRVKKSLHGHHPRDCLFYLRDWTALRLQKLLQDNNVMFNTEPPAGARAVPGGGCRVIEQKEVPNGLRDEACGKETPAGYAGLCQAHYKEYLVSLINAHSLDPATLYEVEELETATERYLHVRPQPLAGEDPPAYQARLLQKLTEEVPLGQSIPRRRK

SEQ ID NO: 910665 - protein, 98 aa, Homo sapiens
LSLGSRLRDEACGKETPAGYAGLCQAHYKEYLVSLINAHSLDPATLYEVEELETATERYLHVRPQPLAGEDPPAYQARLLQKLTEEVPLGQSIPRRRK

SEQ ID NO: 910666 - protein, 736 aa, Homo sapiens
MPGEEEERAFLVAREELASALRRDSGQAFSLEQLRPLLASSLPLAARYLQLDAARLVRCNAHGEPRNYLNTLSTALNILEKYGRNLLSPQRPRYWRGVKFNNPVFRSTVDAVQGGRDVLRLYGYTEEQPDGLSFPEGQEEPDEHQVATVTLEVLLLRTELSLLLQNTHPRQQALEQLLEDKVEDDMLQLSEFDPLLREIAPGPLTTPSVPGSTPGPCFLCGSAPGTLHCPSCKQALCPACDHLFHGHPSRAHHLRQTLPGVLQGTHLSPSLPASAQPRPQSTSLLALGDSSLSSPNPASAHLPWHCAACAMLNEPWAVLCVACDRPRGCKGLGLGTEGPQGTGGLEPDLARGRWACQSCTFENEAAAVLCSICERPRLAQPPSLVVDSRDAGICLQPLQQGDALLASAQSQVWYCIHCTFCNSSPGWVCVMCNRTSSPIPAQHAPRPYASSLEKGPPKPGPPRRLSAPLPSSCGDPEKQRQDKMREEGLQLVSMIREGEAAGACPEEIFSALQYSGTEVPLQWLRSELPYVLEMVAELAGQQDPGLGAFSCQEARRAWLDRHGNLDEAVEECVRTRRRKVQELQSLGFGPEEGSLQALFQHGGDVSRALTELQRQRLEPFRQRLWDSGPEPTPSWDGPDKQSLVRRLLAVYALPSWGRAELALSLLQETPRNYELGDVVEAVRHSQDRAFLRRLLAQECAVCGWALPHNRVSPSPRYLVQELLYSFGPPSYPSLHL

SEQ ID NO: 910667 - protein, 157 aa, Homo sapiens [sequence omitted]

SEQ ID NO: 910668 - protein, 157 aa, Homo sapiens [sequence omitted]

SEQ ID NO: 910669 - protein, 157 aa, Homo sapiens [sequence omitted]

SEQ ID NO: 910670 - protein, 157 aa, Homo sapiens [sequence omitted]

SEQ ID NO: 910671 - protein, 157 aa, Homo sapiens [sequence omitted]

SEQ ID NO: 910672 - protein, 137 aa, Homo sapiens
MQKLLKCSRLVLALALILVLESSVQGYPTQRARYQWVRCNPDSNSANCLEEKGPIKTRIQDLNRIFPLSEDYSGSGFGSGSGSGSGSGSGFLTEMEQDYQLVDESDAFHDNLRSLDRNLPSDSQDLGQHGLEEDFML

SEQ ID NO: 910673 - protein, 157 aa, Homo sapiens [sequence omitted]

SEQ ID NO: 910674 - protein, 139 aa, Homo sapiens
MHAPLLVLALALILVLESSVQGYPTQRARYQWVRCNPDSNSANCLEEKGPMFELLPGESNKIPRLRTDLFPKTRIQDLNRIFPLSEDYSGSGFGSGSGSGSGSGSGFLTSTHLPKNPPLHTTHLSATRLSNDTILPSSP

SEQ ID NO: 910675 - protein, 157 aa, Homo sapiens [sequence omitted]

SEQ ID NO: 910676 - protein, 157 aa, Homo sapiens [sequence omitted]

SEQ ID NO: 910677 - protein, 181 aa, Homo sapiens
RAIRWSRGTSYSSCRRHVRALAHILLQYCSGFTGHSTNTTTAGIPDAVADMPQSKIDNSRGDTLTWNQYKEPSAIRQTTCTSAELPTTRIRRLRTDLFPKTRIQDLNRIFPLSEDYSGSGFGSGSGSGSGSGSGFLTEMEQDYQLVDESDAFHDNLRSLDRNLPSDSQDLGQHGLEEDFML

SEQ ID NO: 910678 - protein, 157 aa, Homo sapiens [sequence omitted]

SEQ ID NO: 910679 - protein, 72 aa, Homo sapiens
PAFRELKRVPRSFISGLCMRSIVPCHSPLSSGQVEDWPEGLHMQTPVPAFRELKRVPRSFISGPGPQIHARE

SEQ ID NO: 910680 - protein, 456 aa, Homo sapiens
MTTTFLQTSSSTFGGGSTRGGSLLAGGGGFGGGSLSGGGGSRSISASSARFVSSGSGGGYGGGMRVCGFGGGAGSVFGGGFGGGVGGGFGGGFGGGDGGLLSGNEKITMQNLNDRLASYLDKVRALEEANADLEVKIHDWYQKQTPASPECDYSQYFKTIEELRDKIMATTIDNSRVILEIDNARLAADDFRLKYENELALRQGVEADINGLRRVLDELTLARTDLEMQIEGLNEELAYLKKNHEEEMKEFSSQLAGQVNVEMDAAPGVDLTRVLAEMREQYEAMAEKNRRDVEAWFFSKTEELNKEVASNTEMIQTSKTEITDLRRTMQELEIELQSQLSMKAGLENSLAETECRYATQLQQIQGLIGGLEAQLSELRCEMEAQNQEYKMLLDIKTRLEQEIATYRSLLEGQDAKMAGIGIREASSGGGGSSSNFHINVEESVDGQVVSSHKREI

SEQ ID NO: 910681 - protein, 289 aa, Homo sapiens [sequence omitted]

SEQ ID NO: 910682 - protein, 432 aa, Homo sapiens
MTTTFLQTSSSTFGGGSTRGGSLLAGGGGFGGGSLSGGGGSRSISASSARFVSSGSGGGYGGGMRVCGFGGGAGSVFGGGFGGGVGGGFGGGFGGGDGGLLSGNEKITMQNLNDRLASYLDKVRALEEANADLEVKIHDWYQKQTPASPECDYSQYFKTIEELRDKIMATTIDNSRVILEIDNARLAADDFRLKYENELALRQGVEADINGLRRVLDELTLARTDLEMQIEGLNEELAYLKKNHEEEMKEFSSQLAGQVNVEMDAAPGVDLTRVLAEMREQYEAMAEKNRRDVEAWFFSKTEELNKEVASNTEMIQTSKTEITDLRRTMQELEIELQSQLSMKAGLENSLAETECRYATQLQQIQGLIGGLEAQLSELRCEMEAQNQEYKMLLDIKTRLEQEIATYRSLLEGQDAKMAGIGIREGVMRAACG

SEQ ID NO: 910683 - protein, 456 aa, Homo sapiens; identical to SEQ ID NO: 910680

SEQ ID NO: 910684 - protein, 359 aa, Homo sapiens
MSCPQWGWWSVSERAIVRAGCTPLPHSPGQPIPTGNTASLVFRALEIRKAAPQVSQGGWMGQNKKWTLKIMATTIDNSRVILEIDNARLAADDFRLKYENELALRQGVEADINGLRRVLDELTLARTDLEMQIEGLNEELAYLKKNHEEEMKEFSSQLAGQVNVEMDAAPGVDLTRVLAEMREQYEAMAEKNRRDVEAWFFSKTEELNKEVASNTEMIQTSKTEITDLRRTMQELEIELQSQLSMKAGLENSLAETECRYATQLQQIQGLIGGLEAQLSELRCEMEAQNQEYKMLLDIKTRLEQEIATYRSLLEGQDAKMAGIGIREASSGGGGSSSNFHINVEESVDGQVVSSHKREI

SEQ ID NO: 910685 - protein, 432 aa, Homo sapiens; identical to SEQ ID NO: 910682

SEQ ID NO: 910686 - protein, 495 aa, Homo sapiens
MTTTFLQTSSSTFGGGSTRGGSLLAGGGGFGGGSLSGGGGSRSISASSARFVSSGSGGGYGGGMRVCGFGGGAGSVFGGGFGGGVGGGFGGGFGGGDGGLLSGNEKITMQNLNDRLASYLDKVRALEEANADLEVKIHDWYQKQTPASPECDYSQYFKTIEELRDKIMATTIDNSRVILEIDNARLAADDFRLKCAPPSLSSSCIAHFTWPSPGSDSGSQDPSHFLLWPPSLRYENELALRQGVEADINGLRRVLDELTLARTDLEMQIEGLNEELAYLKKNHEEEMKEFSSQLAGQVNVEMDAAPGVDLTRVLAEMREQYEAMAEKNRRDVEAWFFSKTEELNKEVASNTEMIQTSKTEITDLRRTMQELEIELQSQLSMKAGLENSLAETECRYATQLQQIQGLIGGLEAQLSELRCEMEAQNQEYKMLLDIKTRLEQEIATYRSLLEGQDAKMAGIGIREASSGGGGSSSNFHINVEESVDGQVVSSHKREI

SEQ ID NO: 910687 - protein, 270 aa, Homo sapiens
MTTTFLQTSSSTFGGGSTRGGSLLAGGGGFGGGSLSGGGGSRSISASSARFVSSGSGGGYGGGMRVCGFGGGAGSVFGGGFGGGVGGGFGGGFGGGDGGLLSGNEKITMQNLNDRLASYLDKVRALEEANADLEVKIHDWYQKQTPASPECDYSQYFKTIEELRDKIMATTIDNSRVILEIDNARLAADDFRLKYENELALRQGVEADINGLRRVLDELTLARTDLEMQIEGLNEELAYLKKNHEESHQAKWRTGQRACTCKLQSLPSES

SEQ ID NO: 910688 - protein, 281 aa, Homo sapiens
MTTTFLQTSSSTFGGGSTRGGSLLAGGGGFGGGSLSGGGGSRSISASSARFVSSGSGGGYGGGMRVCGFGGGAGSVFGGGFGGGVGGGFGGGFGGGDGGLLSGNEKITMQNLNDRLASYLDKVRALEEANADLEVKIHDWYQKQTPASPECDYSQYFKTIEELRDKIMATTIDNSRVILEIDNARLAADDFRLKYENELALRQGVEADINGLRRVLDELTLARTDLEMQIWPEGLHMQTPVPAFRELKRVPRSFISGLCMRSIPPLPLPTFFGARRCSCIV

SEQ ID NO: 910689 - protein, 66 aa, Homo sapiens
MATTIDNSRVILEIDNARLAADDFRLKCAPPSLSSSCIAHFTWPSPGSDSGSQDPSHFLLWPPSPQ

SEQ ID NO: 910690 - protein, 456 aa, Homo sapiens; identical to SEQ ID NO: 910680

SEQ ID NO: 910691 - protein, 289 aa, Homo sapiens [sequence omitted]

SEQ ID NO: 910692 - protein, 383 aa, Homo sapiens
MGANLALLSSDMPLLEKAGASWNLPQPYQRRFAPNIPETSKGSAPCSWQVRALEEANADLEVKIHDWYQKQTPASPECDYSQYFKTIEELRDKIMATTIDNSRVILEIDNARLAADDFRLKYENELALRQGVEADINGLRRVLDELTLARTDLEMQIEGLNEELAYLKKNHEEEMKEFSSQLAGQVNVEMDAAPGVDLTRVLAEMREQYEAMAEKNRRDVEAWFFSKTEELNKEVASNTEMIQTSKTEITDLRRTMQELEIELQSQLSMKAGLENSLAETECRYATQLQQIQGLIGGLEAQLSELRCEMEAQNQEYKMLLDIKTRLEQEIATYRSLLEGQDAKMAGIGIREASSGGGGSSSNFHINVEESVDGQVVSSHKREI

SEQ ID NO: 910693 - protein, 456 aa, Homo sapiens; identical to SEQ ID NO: 910680

SEQ ID NO: 910694 - protein, 299 aa, Homo sapiens
MKARADLATIMATTIDNSRVILEIDNARLAADDFRLKYENELALRQGVEADINGLRRVLDELTLARTDLEMQIEGLNEELAYLKKNHEEEMKEFSSQLAGQVNVEMDAAPGVDLTRVLAEMREQYEAMAEKNRRDVEAWFFSKTEELNKEVASNTEMIQTSKTEITDLRRTMQELEIELQSQLSMKAGLENSLAETECRYATQLQQIQGLIGGLEAQLSELRCEMEAQNQEYKMLLDIKTRLEQEIATYRSLLEGQDAKMAGIGIREASSGGGGSSSNFHINVEESVDGQVVSSHKREI

SEQ ID NO: 910695 - protein, 432 aa, Homo sapiens; identical to SEQ ID NO: 910682

SEQ ID NO: 910696 - protein, 291 aa, Homo sapiens [sequence omitted]

SEQ ID NO: 910697 - protein, 111 aa, Homo sapiens
MTTTFLQTSSSTFGGGSTRGGSLLAGGGGFGGGSLSGGGGSRSISASSARFVSSGSGGGYGGGMRVCGFGGGAGSVFGGASSGGGGSSSNFHINVEESVDGQVVSSHKREI

SEQ ID NO: 910698 - protein, 485 aa, Homo sapiens
MAAVWQQVLAVDARYNAYRTPTFPQFRTQYIRRRSQLLRENAKAGHPPALRRQYLRLRGQLLGQRYGPLSEPGSARAYSNSIVRSSRTTLDRMEDFEDDPRALGARGHRRSVSRGSYQLQAQMNRAVYEDRPPGSVVPTSAAEASRAMAGDTSLSENYAFAGMYHVFDQHVDEAVPRVRFANDDRHRLACCSLDGSISLCQLVPAPPTVLRVLRGHTRGVSDFAWSLSNDILVSTSLDATMRIWASEDGRCIREIPDPDSAELLCCTFQPVNNNLTVVGNAKHNVHVMNISTGKKVKGGSSKLTGRVLALSFDAPGRLLWAGDDRGSVFSFLFDMATGKLTKAKRLVVHEGSPVTSISARSWVSREARDPSLLINACLNKLLLYRVVDNEGTLQLKRSFPIEQSSHPVRSIFCPLMSFRQGACVVTGSEDMCVHFFDVERAAKAAVNKLQGHSAPVLDVSFNCDESLLASSDASGMVIVWRREQK

SEQ ID NO: 910699 - protein, 555 aa, Homo sapiens
  misc_feature (5)..(7): Xaa can be any naturally occurring amino acid
  misc_feature (13)..(13): Xaa can be any naturally occurring amino acid
GATNXXXLETETXFGFGKPTLQPSCLEPEKGRRDRRNRRQWSQGRSGGPQEPEAAPEAAAGGHARGGGRGMAAVWQQVLAVDARYNAYRTPTFPQFRTQYIRRRSQLLRENAKAGHPPALRRQYLRLRGQLLGQRYGPLSEPGSARAYSNSIVRSSRTTLDRMEDFEDDPRALGARGHRRSVSRGSYQLQAQMNRAVYEDRPPGSVVPTSAAEASRAMAGDTSLSENYAFAGMYHVFDQHVDEAVPRVRFANDDRHRLACCSLDGSISLCQLVPAPPTVLRVLRGHTRGVSDFAWSLSNDILVSTSLDATMRIWASEDGRCIREIPDPDSAELLCCTFQPVNNNLTVVGNAKHNVHVMNISTGKKVKGGSSKLTGRVLALSFDAPGRLLWAGDDRGSVFSFLFDMATGKLTKAKRLVVHEGSPVTSISARSWVSREARDPSLLINACLNKLLLYRVVDNEGTLQLKRSFPIEQSSHPVRSIFCPLMSFRQGACVVTGSEDMCVHFFDVERAAKAAVNKLQGHSAPVLDVSFNCDESLLASSDASGMVIVWRREQK

SEQ ID NO: 910700 - protein, 543 aa, Homo sapiens
GSAVLSDSRQPSCLEPEKGRRDRRNRRQWSQGRSGGPQEPEAAPEAAAGGHARGGGRGMAAVWQQVLAVDARYNAYRTPTFPQFRTQYIRRRSQLLRENAKAGHPPALRRQYLRLRGQLLGQRYGPLSEPGSARAYSNSIVRSSRTTLDRMEDFEDDPRALGARGHRRSVSRGSYQLQAQMNRAVYEDRPPGSVVPTSAAEASRAMAGDTSLSENYAFAGMYHVFDQHVDEAVPRVRFANDDRHRLACCSLDGSISLCQLVPAPPTVLRVLRGHTRGVSDFAWSLSNDILVSTSLDATMRIWASEDGRCIREIPDPDSAELLCCTFQPVNNNLTVVGNAKHNVHVMNISTGKKVKGGSSKLTGRVLALSFDAPGRLLWAGDDRGSVFSFLFDMATGKLTKAKRLVVHEGSPVTSISARSWVSREARDPSLLINACLNKLLLYRVVDNEGTLQLKRSFPIEQSSHPVRSIFCPLMSFRQGACVVTGSEDMCVHFFDVERAAKAAVNKLQGHSAPVLDVSFNCDESLLASSDASGMVIVWRREQK

SEQ ID NO: 910701 - protein, 569 aa, Homo sapiens
  misc_feature (6)..(7): Xaa can be any naturally occurring amino acid
  misc_feature (13)..(13): Xaa can be any naturally occurring amino acid
  misc_feature (18)..(18): Xaa can be any naturally occurring amino acid
RRNKFXXPGDGNXLRLRXTHACSHLAWSLRKGGETEGTGDSGLRAAPGGLKNRRQPRRWSPIPGYALGSEKAAAGGHARGGGRGMAAVWQQVLAVDARYNAYRTPTFPQFRTQYIRRRSQLLRENAKAGHPPALRRQYLRLRGQLLGQRYGPLSEPGSARAYSNSIVRSSRTTLDRMEDFEDDPRALGARGHRRSVSRGSYQLQAQMNRAVYEDRPPGSVVPTSAAEASRAMAGDTSLSENYAFAGMYHVFDQHVDEAVPRVRFANDDRHRLACCSLDGSISLCQLVPAPPTVLRVLRGHTRGVSDFAWSLSNDILVSTSLDATMRIWASEDGRCIREIPDPDSAELLCCTFQPVNNNLTVVGNAKHNVHVMNISTGKKVKGGSSKLTGRVLALSFDAPGRLLWAGDDRGSVFSFLFDMATGKLTKAKRLVVHEGSPVTSISARSWVSREARDPSLLINACLNKLLLYRVVDNEGTLQLKRSFPIEQSSHPVRSIFCPLMSFRQGACVVTGSEDMCVHFFDVERAAKAAVNKLQGHSAPVLDVSFNCDESLLASSDASGMVIVWRREQK

SEQ ID NO: 910702 - protein, 393 aa, Homo sapiens
MEDFEDDPRALGARGHRRSVSRGSYQLQAQMNRAVYEDRPPGSVVPTSAAEASRAMAGDTSLSENYAFAGMYHVFDQHVDEAVPRVRFANDDRHRLACCSLDGSISLCQLVPAPPTVLRVLRGHTRGVSDFAWSLSNDILVSTSLDATMRIWASEDGRCIREIPDPDSAELLCCTFQPVNNNLTVVGNAKHNVHVMNISTGKKVKGGSSKLTGRVLALSFDAPGRLLWAGDDRGSVFSFLFDMATGKLTKAKRLVVHEGSPVTSISARSWVSREARDPSLLINACLNKLLLYRVVDNEGTLQLKRSFPIEQSSHPVRSIFCPLMSFRQGACVVTGSEDMCVHFFDVERAAKAAVNKLQGHSAPVLDVSFNCDESLLASSDASGMVIVWRREQK

SEQ ID NO: 910703 - protein, 393 aa, Homo sapiens; identical to SEQ ID NO: 910702

SEQ ID NO: 910704 - protein, 551 aa, Homo sapiens
GSAVLSDSRQPSCLEPEKGRRDRRNRRQWSQGRSGGPQEPEAAPEAAAGGHARGGGRGMAAVWQQVLAVDARYNAYRTPTFPQFRTQYIRRRSQLLRENAKAGHPPALRRQYLRLRGQLLGQRYGPLSEPGSARAYSNSIVRSSRTTLDRMEDFEDDPRALGARGHRRSVSRGSYQLQAQMNRAVYEDRPPGSVVPTSAAEASRAMAGDTSLSENYAFAGMYHVFDQHVDEAVPRVRFANDDRHRLACCSLDGSISLCQLVPAPPTVLRVLRGHTRGVSDFAWSLSNDILVSTSLDATMRIWASEDGRCIREIPDPDSAELLCCTFQPVNNNLTVVRLQDTHTVGNAKHNVHVMNISTGKKVKGGSSKLTGRVLALSFDAPGRLLWAGDDRGSVFSFLFDMATGKLTKAKRLVVHEGSPVTSISARSWVSREARDPSLLINACLNKLLLYRVVDNEGTLQLKRSFPIEQSSHPVRSIFCPLMSFRQGACVVTGSEDMCVHFFDVERAAKAAVNKLQGHSAPVLDVSFNCDESLLASSDASGMVIVWRREQK

SEQ ID NO: 910705 - protein, 393 aa, Homo sapiens; identical to SEQ ID NO: 910702

SEQ ID NO: 910706 - protein, 481 aa, Homo sapiens
  misc_feature (414)..(414): Xaa can be any naturally occurring amino acid
  misc_feature (416)..(416): Xaa can be any naturally occurring amino acid
  misc_feature (419)..(419): Xaa can be any naturally occurring amino acid
  misc_feature (421)..(421): Xaa can be any naturally occurring amino acid
  misc_feature (423)..(423): Xaa can be any naturally occurring amino acid
  misc_feature (425)..(427): Xaa can be any naturally occurring amino acid
  misc_feature (432)..(432): Xaa can be any naturally occurring amino acid
  misc_feature (435)..(435): Xaa can be any naturally occurring amino acid
  misc_feature (438)..(438): Xaa can be any naturally occurring amino acid
  misc_feature (440)..(440): Xaa can be any naturally occurring amino acid
  misc_feature (451)..(451): Xaa can be any naturally occurring amino acid
  misc_feature (456)..(456): Xaa can be any naturally occurring amino acid
  misc_feature (459)..(459): Xaa can be any naturally occurring amino acid
  misc_feature (462)..(462): Xaa can be any naturally occurring amino acid
  misc_feature (477)..(477): Xaa can be any naturally occurring amino acid
GSAVLSDSRQPSCLEPEKGRRDRRNRRQWSQGRSGGPQEPEAAPEAAAGGHARGGGRGMAAVWQQVLAVDARYNAYRTPTFPQFRTQYIRRRSQLLRENAKAGHPPALRRQYLRLRGQLLGQRYGPLSEPGSARAYSNSIVRSSRTTLDRMEDFEDDPRALGARGHRRSVSRGSYQLQAQMNRAVYEDRPPGSVVPTSAAEASRAMAGDTSLSENYAFAGMYHVFDQHVDEAVPRVRFANDDRHRLACCSLDGSISLCQLVPAPPTVLRVLRGHTRGVSDFAWSLSNDILVSTSLDATMRIWASEDGRCIREIPDPDSAELLCCTFQPVNNNLTVVGNAKHNVHVMNISTGKKVKGGSSKLTGRVLALSFDAPGRLLWAGDDRGSVFSFLFDMATGKLTKAKRLVVHEGSPRGXGXRRXGXGXAXXXGSRAXGEXGGXQXGGGLDRGGDNXGARQXKRXGRXRGEGEQAGAEEGGGXRQGR

SEQ ID NO: 910707 - protein, 433 aa, Homo sapiens
GSAVLSDSRQPSCLEPEKGRRDRRNRRQWSQGRSGGPQEPEAAPEAAAGGHARGGGRGMAAVWQQVLAVDARYNAYRTPTFPQFRTQYIRRRSQLLRENAKAGHPPALRRQYLRLRGQLLGQRYGPLSEPGSARAYSNSIVRSSRTTLDRMEDFEDDPRALGARGHRRSVSRGSYQLQAQMNRAVYEDRPPGSVVPTSAAEASRAMAGDTSLSENYAFAGMYHVFDQHVDEAVPRVRFANDDRHRLACCSLDGSISLCQLVPAPPTVLRVLRGHTRGVSDFAWSLSNDILVSTSLDATMRIWASEDGRCIREIPDPDSAELLCCTFQPVNNNLTVVGNAKHNVHVMNISTGKKVKGGSSKLTGRVLALSFDAPGRLLWAGDDRGSVFSFLFDMATGHACPSQPPARASADALRPSPQPASCPASHPRHPPAHS

SEQ ID NO: 910708 - protein, 404 aa, Homo sapiens
GSAVLSDSRQPSCLEPEKGRRDRRNRRQWSQGRSGGPQEPEAAPEAAAGGHARGGGRGMAAVWQQVLAVDARYNAYRTPTFPQFRTQYIRRRSQLLRENAKAGHPPALRRQYLRLRGQLLGQRYGPLSEPGSARAYSNSIVRSSRTTLDRMEDFEDDPRALGARGHRRSVSRGSYQLQAQMNRAVYEDRPPGSVVPTSAAEASRAMAGDTSLSENYAFAGMYHVFDQHVDEAVPRVRFANDDRHRLACCSLDGSISLCQLVPAPPTVLRVLRGHTRGVSDFAWSLSNDILVSTSLDATMRIWASEDGRCIREIPDPDSAELLCCTFQPVNNNLTVVRTPGHPHMTGSEDMCVHFFDVERAAKAAVNKLQGHSAPVLDVSFNCDESLLASSDASGMVIVWRREQK

SEQ ID NO: 910709 - protein, 217 aa, Homo sapiens
MMVCAFSPQVGNAKHNVHVMNISTGKKVKGGSSKLTGRVLALSFDAPGRLLWAGDDRGSVFSFLFDMATGKLTKAKRLVVHEGSPVTSISARSWVSREARDPSLLINACLNKLLLYRVVDNEGTLQLKRSFPIEQSSHPVRSIFCPLMSFRQGACVVTGSEDMCVHFFDVERAAKAAVNKLQGHSAPVLDVSFNCDESLLASSDASGMVIVWRREQK

SEQ ID NO: 910710 - protein, 58 aa, Homo sapiens
MEDFEDDPRALGARGHRRSVSRGSYQLQAQMNRAVYEDSTLQHVPTSAAAARKDPARS

SEQ ID NO: 910711 - protein, 85 aa, Homo sapiens
PRLVVEIVCCEAEGVGGGMWGGPGLAGTSQPPAPNGVNVVDCFAAVNKLQGHSAPVLDVSFNCDESLLASSDASGMVIVWRREQK

SEQ ID NO: 910712 - protein, 543 aa, Homo sapiens; identical to SEQ ID NO: 910700

SEQ ID NO: 910713 - protein, 393 aa, Homo sapiens; identical to SEQ ID NO: 910702

SEQ ID NO: 910714 - protein, 393 aa, Homo sapiens; identical to SEQ ID NO: 910702

SEQ ID NO: 910715 - protein, 580 aa, Homo sapiens
LSTKEPVVRQFSPHLLRFWWGLRLSTPHLWAIELLSCSMKLAPQQQGVLPPGVWSSRPFHFGVARHKGHEPESVDVLAFVVHAAAGGHARGGGRGMAAVWQQVLAVDARYNAYRTPTFPQFRTQYIRRRSQLLRENAKAGHPPALRRQYLRLRGQLLGQRYGPLSEPGSARAYSNSIVRSSRTTLDRMEDFEDDPRALGARGHRRSVSRGSYQLQAQMNRAVYEDRPPGSVVPTSAAEASRAMAGDTSLSENYAFAGMYHVFDQHVDEAVPRVRFANDDRHRLACCSLDGSISLCQLVPAPPTVLRVLRGHTRGVSDFAWSLSNDILVSTSLDATMRIWASEDGRCIREIPDPDSAELLCCTFQPVNNNLTVVGNAKHNVHVMNISTGKKVKGGSSKLTGRVLALSFDAPGRLLWAGDDRGSVFSFLFDMATGKLTKAKRLVVHEGSPVTSISARSWVSREARDPSLLINACLNKLLLYRVVDNEGTLQLKRSFPIEQSSHPVRSIFCPLMSFRQGACVVTGSEDMCVHFFDVERAAKAAVNKLQGHSAPVLDVSFNCDESLLASSDASGMVIVWRREQK

SEQ ID NO: 910716 - protein, 543 aa, Homo sapiens; identical to SEQ ID NO: 910700

SEQ ID NO: 910717 - protein, 609 aa, Homo sapiens
GSAVLSDSRQPSCLEPEKGRRDRRNRRQWSQGRSGGPQEPEAAPEAAAGGHARGGGRGMAAVWQQVLAVDARYNAYRTPTFPQFRTQYIRRRSQLLRENAKAGHPPALRRQYLRLRGQLLGQRYGPLSEPGSARAYSNSIVRSSRTTLDRMEDFEDDPRALGARGHRRSVSRGSYQLQAQMNRAVYEDRPPGSVVPTSAAEASRAMAGDTSLSENYAFAGMYHVFDQHVDEAVPRVRFANDDRHRLACCSLDGSISLCQLVPAPPTVLRVLRGHTRGVSDFAWSLSNDILVSTSLDATMRIWASEDGRCIREIPDPDSAELLCCTFQPVNNNLTVVGNAKHNVHVMNISTGKKVKGGSSKLTGRVLALSFDAPGRLLWAGDDRGSVFSFLFDMATGKLTKAKRLVVHEGSPVTSISARSWVSREARDPSLLINACLNKLLLYRVVDNEGTLQLKRSFPIEQSSHPVRSIFCPLMSFRQGACVVTGPCRTCAFTSLLWSGGKAAVNSCGPSALAGVAHWRELWPLSTGVSLAGDGTNIVRFAALCFIPTFITPVAKALARVQPRGATTSEATAPMFMHTEFTRRPGIHSYTCGVPLHPSLPLCSADRHAE

SEQ ID NO: 910718 - protein, 443 aa, Homo sapiens
GSAVLSDSRQPSCLEPEKGRRDRRNRRQWSQGRSGGPQEPEAAPEAAAGGHARGGGRGMAAVWQQVLAVDARYNAYRTPTFPQFRTQYIRRRSQLLRENAKAGHPPALRRQYLRLRGQLLGQRYGPLSEPGSARAYSNSIVRSSRTTLDRMEDFEDDPRALGARGHRRSVSRGSYQLQAQMNRAVYEDRPPGSVVPTSAAEASRAMAGDTSLSENYAFAGMYHVFDQHVDEAVPRVRFANDDRHRLACCSLDGSISLCQLVPAPPTVLRVLRGHTRGVSDFAWSLSNDILVSTSLDATMRIWASEDGRCIREIPDPDSAELLCCTFQPVNNNLTVVGNAKHNVHVMNISTGKKVKGGSSKLTGRVLALSFDAPGRLLWAGDDLTGSEDMCVHFFDVERAAKAAVNKLQGHSAPVLDVSFNCDESLLASSDASGMVIVWRREQK

SEQ ID NO: 910719 - protein, 362 aa, Homo sapiens
GSAVLSDSRQPSCLEPEKGRRDRRNRRQWSQGRSGGPQEPEAAPEAAAGGHARGGGRGMAAVWQQVLAVDARYNAYRTPTFPQFRTQYIRRRSQLLRENAKAGHPPALRRQYLRLRGQLLGQRYGPLSEPGSARAYSNSIVRSSRTTLDRMEDFEDDPRALGARGHRRSVSRGSYQLQAQMNRAVYEDRPPGSVVPTSAAEASRAMAGDTSLSENYAFAGMYHVFDQHVDEAVPRVRFANDDRHRLACCSLDGSISLCQLVPAPPTVLRVLRGHTRGVSDFAWSLSNDILVSTSLDATMRIWASEDGRCIREIPDPDSAELLCCTFQPVNNNLTVVGNAKHNVHVMNISLHPTPLTPASCCK

SEQ ID NO: 910720 - protein, 156 aa, Homo sapiens
  misc_feature (6)..(7): Xaa can be any naturally occurring amino acid
  misc_feature (13)..(13): Xaa can be any naturally occurring amino acid
  misc_feature (18)..(18): Xaa can be any naturally occurring amino acid
RRNKFXXPGDGNXLRLRXTHACSHLAWSLRKGGETEGTGDSGLRAAPGGLKNRRQPRRWSPIPGYALGSEKGRRRAAGTRWVENVKQGMLGGGGALLWRLGRGGVCSESLCVTRALPRKGRAGVMTMVTPGWEFVTSPARRDSMSMAMVAWWKGRN

SEQ ID NO: 910721 - protein, 180 aa, Homo sapiens
  misc_feature (114)..(118): Xaa can be any naturally occurring amino acid
  misc_feature (120)..(123): Xaa can be any naturally occurring amino acid
  misc_feature (125)..(131): Xaa can be any naturally occurring amino acid
  misc_feature (133)..(135): Xaa can be any naturally occurring amino acid
  misc_feature (137)..(137): Xaa can be any naturally occurring amino acid
  misc_feature (139)..(143): Xaa can be any naturally occurring amino acid
  misc_feature (145)..(148): Xaa can be any naturally occurring amino acid
  misc_feature (160)..(161): Xaa can be any naturally occurring amino acid
  misc_feature (173)..(173): Xaa can be any naturally occurring amino acid
GSAVLSDSRQPSCLEPEKGRRDRRNRRQWSQGRSGGPQEPEAAPEAAAGGHARGGGRGMAAVWQQVLAVDARYNAYRTPTFPQFRTQYIRRRSQLLRENAKAGHPPALRRQYLXXXXXHXXXXHXXXXXXXIXXXYXNXXXXXIXXXXIPHLLLILLTSXXFFRFHLLTFNIXSNHRSFS

SEQ ID NO: 910722 - protein, 322 aa, Homo sapiens
RASSRPGNSRLPRVPHSPSVSPRKTRPLRGQRPGSASCAPTSSTSPLEKSYCSVPEGLCHKRVGDIPREFQHPFGLSQSEMAAVKASTSKATRPWYSHPVYARYWQHYHQAMAWMQSHHNAYRKAVESCFNLPWYLPSALLPQSSYDNEAAYPQSFYDHHVAWQDYPCSSSHFRRSGQHPRYSSRIQASTKEDQALSKEEEMETESDAEVECDLSNMEITEELRQYFAETERHREERRRQQQLDAERLDSYVNADHDLYCNTRRSVEAPTERPGERRQAEMKRLYGDSAAKIQAMEAAVQLSFDKHCDRKQPKYWPVIPLKF

SEQ ID NO: 910723 - protein, 242 aa, Homo sapiens
MAAVKASTSKATRPWYSHPVYARYWQHYHQAMAWMQSHHNAYRKAVESCFNLPWYLPSALLPQSSYDNEAAYPQSFYDHHVAWQDYPCSSSHFRRSGQHPRYSSRIQASTKEDQALSKEEEMETESDAEVECDLSNMEITEELRQYFAETERHREERRRQQQLDAERLDSYVNADHDLYCNTRRSVEAPTERPGERRQAEMKRLYGDSAAKIQAMEAAVQLSFDKHCDRKQPKYWPVIPLKF

SEQ ID NO: 910724 - protein, 202 aa, Homo sapiens
MAWMQSHHNAYRKAVESCFNLPWYLPSALLPQSSYDNEAAYPQSFYDHHVAWQDYPCSSSHFRRSGQHPRYSSRIQASTKEDQALSKEEEMETESDAEVECDLSNMEITEELRQYFAETERHREERHIHRCTKPISEMIRVNGCRKVERNMKMHFCCKSKNGGCPVTSGLHLSWGKGCATKREDQSEMAPVLLACTCVLGGC

SEQ ID NO: 910725 - protein, 242 aa, Homo sapiens; identical to SEQ ID NO: 910723

SEQ ID NO: 910726 - protein, 242 aa, Homo sapiens; identical to SEQ ID NO: 910723

SEQ ID NO: 910727 - protein, 229 aa, Homo sapiens
MASARGGTGSVGLAAAPVRGRRENKQGGAGPGMKLGRAVLGLLLLAPSVVQAVEPISLGLALAGVLTGYIYPRLYCLFAECCGQKRSLSREALQKDLDDNLFGQHLAKKIILNAVFGFINNPKPKKPLTLSLHGWTGTGKNFVSKIIAENIYEGGLNSDYVHLFVATLHFPHASNITLYKARMEVWNPFLDVIGFGVSLLWDEIWEFYVEMSEPGKRFMSQFPLERCRS

SEQ ID NO: 910728 - protein, 297 aa, Homo sapiens
MRPGSSAMTTDVPDLSGDLRSQAAALQKDLDDNLFGQHLAKKIILNAVFGFINNPKPKKPLTLSLHGWTGTGKNFVSKIIAENIYEGGLNSDYVHLFVATLHFPHASNITLYKDQLQLWIRGNVSACARSIFIFDEMDKMHAGLIDAIKPFLDYYDLVDGVSYQKAMFIFLSNAGAERITDVALDFWRSGKQREDIKLKDIEHALSVSVFNNKNSGFWHSSLIDRNLIDYFVPFLPLEYKHLKMCIRVEMQSRGYEIDEDIVSRVAEEMTFFPKEERVFSDKGCKTVFTKLDYYYDD

SEQ ID NO: 910729 - protein, 275 aa, Homo sapiens
FGFINTAFKMIFFARCCPKKIILNAVFGFINNPKPKKPLTLSLHGWTGTGKNFVSKIIAENIYEGGLNSDYVHLFVATLHFPHASNITLYKDQLQLWIRGNVSACARSIFIFDEMDKMHAGLIDAIKPFLDYYDLVDGVSYQKAMFIFLSNAGAERITDVALDFWRSGKQREDIKLKDIEHALSVSVFNNKNSGFWHSSLIDRNLIDYFVPFLPLEYKHLKMCIRVEMQSRGYEIDEDIVSRVAEEMTFFPKEERVFSDKGCKTVFTKLDYYYDD

SEQ ID NO: 910730 - protein, 213 aa, Homo sapiens
AGVKGVRMKTVWGGKWDFRHASKHRACYKDQLQLWIRGNVSACARSIFIFDEMDKMHAGLIDAIKPFLDYYDLVDGVSYQKAMFIFLSNAGAERITDVALDFWRSGKQREDIKLKDIEHALSVSVFNNKNSGFWHSSLIDRNLIDYFVPFLPLEYKHLKMCIRVEMQSRGYEIDEDIVSRVAEEMTFFPKEERVFSDKGCKTVFTKLDYYYDD

SEQ ID NO: 910731 - protein, 125 aa, Homo sapiens
MKSINPVNEEELGLGTEPQNYMADQKGISSVEDTHGLVGDAVCAVSSGAGRKCPGSGVPGAQEEWTGQCRASPHSGEKTRPRPGGAHMLCRVWALWQRQQASLLLVQLLKLQGESKSSQIQRRGW

SEQ ID NO: 910732 - protein, 283 aa, Homo sapiens
MASARGGTGSVGLAAAPVRGRRENKQGGAGPGMKLGRAVLGLLLLAPSVVQAVEPISLGLALAGVLTGYIYPRLYCLFAECCGQKRSLSREALQKDLDDNLFGQHLAKKIILNAVFGFINNPKPKKPLTLSLHGWTGTGKNFVSKIIAENIYEGGLNSDYVHLFVATLHFPHASNITLYKDQLQLWIRGNVSACARSIFIFDEMDKMHAGLIDAIKPFLDYYDLVDGVSYQKAMFIFLSNAGAERITDVALDFWRSGKQREDIKLKDIEHALSVSVFNNKNSE

SEQ ID NO: 910733 - protein, 364 aa, Homo sapiens
MASARGGTGSVGLAAAPVRGRRENKQGGAGPGMKLGRAVLGLLLLAPSVVQAVEPISLGLALAGVLTGYIYPRLYCLFAECCGQKRSLSREALQKDLDDNLFGQHLAKKIILNAVFGFINNPKPKKPLTLSLHGWTGTGKNFVSKIIAENIYEGGLNSDYVHLFVATLHFPHASNITLYKDQLQLWIRGNVSACARSIFIFDEMDKMHAGLIDAIKPFLDYYDLVDGVSYQKAMFIFLSNAGAERITDVALDFWRSGKQREDIKLKDIEHALSVSVFNNKNSGFWHSSLIDRNLIDYFVPFLPLEYKHLKMCIRVEMQSRGYEIDEDIVSRVAEEMTFFPKEERVFSDKGCKTVFTKLDYYYDD

SEQ ID NO: 910734 - protein, 364 aa, Homo sapiens; identical to SEQ ID NO: 910733

SEQ ID NO: 910735 - protein, 283 aa, Homo sapiens; identical to SEQ ID NO: 910732

SEQ ID NO: 910736 - protein, 122 aa, Homo sapiens
MKSINPVNEEELGLGTEPQNYMADQKGISSVEDTHGLVGDAVCAVSSGAGRKCPGSGVPGAQEEWTGQCRASPHSGEKTRPRPGLHGEPSVGCTSALSRLVLVPTCSAGSGHCGSGSRLPCC

SEQ ID NO: 910737 - protein, 73 aa, Homo sapiens
GRVRSSRSPEGVERVRSEPAVIQGRKHVPGPRGAHMLCRVWALWQRQQASLLLVQLLKLQGESKSSQIQRRGW

SEQ ID NO: 910738 - protein, 2224 aa, Homo sapiens
MFPGCPRLWVLVVLGTSWVGWGSQGTEAAQLRQFYVAAQGISWSYRPEPTNSSLNLSVTSFKKIVYREYEPYFKKEKPQSTISGLLGPTLYAEVGDIIKVHFKNKADKPLSIHPQGIRYSKLSEGASYLDHTFPAEKMDDAVAPGREYTYEWSISEDSGPTHDDPPCLTHIYYSHENLIEDFNSGLIGPLLICKKGTLTEGGTQKTFDKQIVLLFAVFDESKSWSQSSSLMYTVNGYVNGTMPDITVCAHDHISWHLLGMSSGPELFSIHFNGQVLEQNHHKVSAITLVSATSTTANMTVGPEGKWIISSLTPKHLQAGMQAYIDIKNCPKKTRNLKKITREQRRHMKRWEYFIAAEEVIWDYAPVIPANMDKKYRSQHLDNFSNQIGKHYKKVMYTQYEDESFTKHTVNPNMKEDGILGPIIRAQVRDTLKIVFKNMASRPYSIYPHGVTFSPYEDEVNSSFTSGRNNTMIRAVQPGETYTYKWNILEFDEPTENDAQCLTRPYYSDVDIMRDIASGLIGLLLICKSRSLDRRGIQRAADIEQQAVFAVFDENKSWYLEDNINKFCENPDEVKRDDPKFYESNIMSTINGYVPESITTLGFCFDDTVQWHFCSVGTQNEILTIHFTGHSFIYGKRHEDTLTLFPMRGESVTVTMDNVGTWMLTSMNSSPRSKKLRLKFRDVKCIPDDDEDSYEIFEPPESTVMATRKMHDRLEPEDEESDADYDYQNRLAAALGIRSFRNSSLNQEEEEFNLTALALENGTEFVSSNTDIIVGSNYSSPSNISKFTVNNLAEPQKAPSHQQATTAGSPLRHLIGKNSVLNSSTAEHSSPYSEDPIEDPLQPDVTGIRLLSLGAGEFKSQEHAKHKGPKVERDQAAKHRFSWMKLLAHKVGRHLSQDTGSPSGMRPWEDLPSQDTGSPSRMRPWKDPPSDLLLLKQSNSSKILVGRWHLASEKGSYEIIQDTDEDTAVNNWLISPQNASRAWGESTPLANKPGKQSGHPKFPRVRHKSLQVRQDGGKSRLKKSQFLIKTRKKKKEKHTHHAPLSPRTFHPLRSEAYNTFSERRLKHSLVLHKSNETSLPTDLNQTLPSMDFGWIASLPDHNQNSSNDTGQASCPPGLYQTVPPEEHYQTFPIQDPDQMHSTSDPSHRSSSPELSEMLEYDRSHKSFPTDISQMSPSSEHEVWQTVISPDLSQVTLSPELSQTNLSPDLSHTTLSPELIQRNLSPALGQMPISPDLSHTTLSPDLSHTTLSLDLSQTNLSPELSQTNLSPALGQMPLSPDLSHTTLSLDFSQTNLSPELSHMTLSPELSQTNLSPALGQMPISPDLSHTTLSLDFSQTNLSPELSQTNLSPALGQMPLSPDPSHTTLSLDLSQTNLSPELSQTNLSPDLSEMPLFADLSQIPLTPDLDQMTLSPDLGETDLSPNFGQMSLSPDLSQVTLSPDISDTTLLPDLSQISPPPDLDQIFYPSESSQSLLLQEFNESFPYPDLGQMPSPSSPTLNDTFLSKEFNPLVIVGLSKDGTDYIEIIPKEEVQSSEDDYAEIDYVPYDDPYKTDVRTNINSSRDPDNIAAWYLRSNNGNRRNYYIAAEEISWDYSEFVQRETDIEDSDDIPEDTTYKKVVFRKYLDSTFTKRDPRGEYEEHLGILGPIIRAEVDDVIQVRFKNLASRPYSLHAHGLSYEKSSEGKTYEDDSPEWFKEDNAVQPNSSYTYVWHATERSGPESPGSACRAWAYYSAVNPEKDIHSGLIGPLLICQKGILHKDSNMPVDMREFVLLFMTFDEKKSWYYEKKSRSSWRLTSSEMKKSHEFHAINGMIYSLPGLKMYEQEWVRLHLLNIGGSQDIHVVHFHGQTLLENGNKQHQLGVWPLLPGSFKTLEMKASKPGWWLLNTEVGENQRAGMQTPFLIMDRDCRMPMGLSTGIISDSQIKASEFLGYWEPRLARLNNGGSYNAWSVEKLAAEFASKPWIQVDMQKEVIITGIQTQGAKHYLKSCYTTEFYVAYSSNQINWQIFKGNSTRNVMYFNGNSDASTIKENQFDPPIVARYIRISPTRAYNRPTLRLELQGCEVNGCSTPLGMENGKIENKQITASSFKKSWWGDYWEPFRARLNAQGRVNAWQAKANNNKQWLEIDLLKIKKITAIITQGCKSLSSEMYVKSYTIHYSEQGVEWKPYRLKSSMVDKIFEGNTNTKGHVKNFFNPPIISRFIRVIPKTWNQSIALRLELFGCDIY

SEQ ID NO: 910739 - protein, 2207 aa, Homo sapiens
MFPGCPRLWVLVVLGTSWVGWGSQGTEAAQLRQFYVAAQGISWSYRPEPTNSSLNLSVTSFKKIVYREYEPYFKKEKPQSTISGLLGPTLYAEVGDIIKVHFKNKADKPLSIHPQGIRYSKLSEGASYLDHTFPAEKMDDAVAPGREYTYEWSISEDSGPTHDDPPCLTHIYYSHENLIEDFNSGLIGPLLICKKGTLTEGGTQKTFDKQIVLLFAVFDESKSWSQSSSLMYTVNGYVNGTMPDITVCAHDHISWHLLGMSSGPELFSIHFNGQVLEQNHHKVSAITLVSATSTTANMTVGPEGKWIISSLTPKHLQAGMQAYIDIKNCPKKTRNLKKITREQRRHMKRWEYFIAAEEVIWDYAPVIPANMDKKYRSQHLDNFSNQIGKHYKKVMYTQYEDESFTKHTVNPNMKEDGILGPIIRAQVRDTLKIVFKNMASRPYSIYPHGVTFSPYEDEVNSSFTSGRNNTMIRAVQPGETYTYKWNILEFDEPTENDAQCLTRPYYSDVDIMRDIASGLIGLLLICKSRSLDRRGIQRAADIEQQAVFAVFDENKSWYLEDNINKFCENPDEVKRDDPKFYESNIMSTINGYVPESITTLGFCFDDTVQWHFCSVGTQNEILTIHFTGHSFIYGKRHEDTLTLFPMRGESVTVTMDNVGTWMLTSMNSSPRSKKLRLKFRDVKCIPDDDEDSYEIFEPPESTVMATRKMHDRLEPEDEESDADYDYQNRLAAALGIRSFRNSSLNQEEEEFNLTALALENGTEFVSSNTDIIVGSNYSSPSNISKFTVNNLAEPQKAPSHQQATTAGSPLRHLIGKNSVLNSSTAEHSSPYSEDPIEDPLQPDVTGIRLLSLGAGEFKSQEHAKHKGPKVERDQAAKHRFSWMKLLAHKVGRHLSQDTGSPSGMRPWEDLPSQDTGSPSRMRPWKDPPSDLLLLKQSNSSKILVGRWHLASEKGSYEIIQDTDEDTAVNNWLISPQNASRAWGESTPLANKPGKQSGHPKFPRVRHKSLQVRQDGGKSRLKKSQFLIKTRKKKKEKHTHHAPLSPRTFHPLRSEAYNTFSERRLKHSLVLHKSNETSLPTDLNQTLPSMDFGWIASLPDHNQNSSNDTGQASCPPGLYQTVPPEEHYQTFPIQDPDQMHSTSDPSHRSSSPELSEMLEYDRSHKSFPTDISQMSPSSEHEVWQTVISPDLSQVTLSPELSQTNLSPDLSHTTLSPELIQRNLSPALGQMPISPDLSHTTLSPDLSHTTLSLDLSQTNLSPELSQTNLSPALGQMPLSPDLSHTTLSLDFSQTNLSPELSHMTLSPELSQTNLSPALGQMPISPDLSHTTLSLDFSQTNLSPELSQTNLSPALGQMPLSPDPSHTTLSLDLSQTNLSPELSQTNLSPDLSEMPLFADLSQIPLTPDLDQMTLSPDLGETDLSPNFGQMSLSPDLSQVTLSPDISDTTLLPDLSQISPPPDLDQIFYPSESSQSLLLQEFNESFPYPDLGQMPSPSSPTLNDTFLSKEFNPLVIVGLSKDGTDYIEIIPKEEVQSSEDDYAEIDYVPYDDPYKTDVRTNINSSRDPDNIAAWYLRSNNGNRRNYYIAAEEISWDYSEFVQRETDIEDSDDIPEDTTYKKGSMKSISEFLVLLSELKWMMLSKFVLENLASRPYSLHAHGLSYEKSSEGKTYEDDSPEWFKEDNAVQPNSSYTYVWHATERSGPESPGSACRAWAYYSAVNPEKDIHSGLIGPLLICQKGILHKDSNMPVDMREFVLLFMTFDEKKSWYYEKKSRSSWRLTSSEMKKSHEFHAINGMIYSLPGLKMYEQEWVRLHLLNIGGSQDIHVVHFHGQTLLENGNKQHQLGVWPLLPGSFKTLEMKASKPGWWLLNTEVGENQRAGMQTPFLIMDRDCRMPMGLSTGIISDSQIKASEFLGYWEPRLARLNNGGSYNAWSVEKLAAEFASKPWIQVDMQKEVIITGIQTQGAKHYLKSCYTTEFYVAYSSNQINWQIFKGNSTRNVMYFNGNSDASTIKENQFDPPIVARYIRISPTRAYNRPTLRLELQGCEVNGCSTPLGMENGKIENKQITASSFKKSWWGDYWEPFRARLNAQGRVNAWQAKANNNKQWLEIDLLKIKKITAIITQGCKSLSSEMYVKSYTIHYSEQGVEWKPYRLKSSMVDKIFEGNTNTKGHVKNFFNPPIISRFIRVIPKTWNQSIALRLELFGCDIY

SEQ ID NO: 910740 - protein, 2193 aa, Homo sapiens
MFPGCPRLWVLVVLGTSWVGWGSQGTEAAQLRQFYVAAQGISWSYRPEPTNSSLNLSVTSFKKIVYREYEPYFKKEKPQSTISGLLGPTLYAEVGDIIKVHFKNKADKPLSIHPQGIRYSKLSEGASYLDHTFPAEKMDDAVAPGREYTYEWSISEDSGPTHDDPPCLTHIYYSHENLIEDFNSGLIGPLLICKKGTLTEGGTQKTFDKQIVLLFAVFDESKSWSQSSSLMYTVNGYVNGTMPDITVCAHDHISWHLLGMSSGPELFSIHFNGQVLEQNHHKVSAITLVSATSTTANMTVGPEGKWIISSLTPKHLQAGMQAYIDIKNCPKKTRNLKKITREQRRHMKRWEYFIAAEEVIWDYAPVIPANMDKKYRSQHLDNFSNQIGKHYKKVMYTQYEDESFTKHTVNPNMKEDGILGPIIRAQVRDTLKIVFKNMASRPYSIYPHGVTFSPYEDEVNSSFTSGRNNTMIRAVQPGETYTYKWNILEFDEPTENDAQCLTRPYYSDVDIMRDIASGLIGLLLICKSRSLDRRGIQRAADIEQQAVFAVFDENKSWYLEDNINKFCENPDEVKRDDPKFYESNIMSTINGYVPESITTLGFCFDDTVQWHFCSVGTQNEILTIHFTGHSFIYGKRHEDTLTLFPMRGESVTVTMDNVGTWMLTSMNSSPRSKKLRLKFRDVKCIPDDDEDSYEIFEPPESTVMATRKMHDRLEPEDEESDADYDYQNRLAAALGIRSFRNSSLNQEEEEFNLTALALENGTEFVSSNTDIIVGSNYSSPSNISKFTVNNLAEPQKAPSHQQATTAGSPLRHLIGKNSVLNSSTAEHSSPYSEDPIEDPLQPDVTGIRLLSLGAGEFKSQEHAKHKGPKVERDQAAKHRFSWMKLLAHKVGRHLSQDTGSPSGMRPWEDLPSQDTGSPSRMRPWKDPPSDLLLLKQSNSSKILVGRWHLASEKGSYEIIQDTDEDTAVNNWLISPQNASRAWGESTPLANKPGKQSGHPKFPRVRHKSLQVRQDGGKSRLKKSQFLIKTRKKKKEKHTHHAPLSPRTFHPLRSEAYNTFSERRLKHSLVLHKSNETSLPTDLNQTLPSMDFGWIASLPDHNQNSSNDTGQASCPPGLYQTVPPEEHYQTFPIQDPDQMHSTSDPSHRSSSPELSEMLEYDRSHKSFPTDISQMSPSSEHEVWQTVISPDLSQVTLSPELSQTNLSPDLSHTTLSPELIQRNLSPALGQMPISPDLSHTTLSPDLSHTTLSLDLSQTNLSPELSQTNLSPALGQMPLSPDLSHTTLSLDFSQTNLSPELSHMTLSPELSQTNLSPALGQMPISPDLSHTTLSLDFSQTNLSPELSQTNLSPALGQMPLSPDPSHTTLSLDLSQTNLSPELSQTNLSPDLSEMPLFADLSQIPLTPDLDQMTLSPDLGETDLSPNFGQMSLSPDLSQVTLSPDISDTTLLPDLSQISPPPDLDQIFYPSESSQSLLLQEFNESFPYPDLGQMPSPSSPTLNDTFLSKEFNPLVIVGLSKDGTDYIEIIPKEEVQSSEDDYAEIDYVPYDDPYTWYLRSNNGNRRNYYIAAEEISWDYSEFVQRETDIEDSDDIPEDTTYKKVVFRKYLDSTFTKRDPRGEYEEHLGILGPIIRAEVDDVIQVRFKNLASRPYSLHAHGLSYEKSSEGKTYEDDSPEWFKEDNAVQPNSSYTYVWHATERSGPESPGSACRAWAYYSAVNPEKDIHSGLIGPLLICQKGILHKDSNMPVDMREFVLLFMTFDEKKSWYYEKKSRSSWRLTSSEMKKSHEFHAINGMIYSLPGLKMYEQEWVRLHLLNIGGSQDIHVVHFHGQTLLENGNKQHQLGVWPLLPGSFKTLEMKASKPGWWLLNTEVGENQRAGMQTPFLIMDRDCRMPMGLSTGIISDSQIKASEFLGYWEPRLARLNNGGSYNAWSVEVDMQKEVIITGIQTQGAKHYLKSCYTTEFYVAYSSNQINWQIFKGNSTRNVMYFNGNSDASTIKENQFDPPIVARYIRISPTRAYNRPTLRLELQGCEVNGCSTPLGMENGKIENKQITASSFKKSWWGDYWEPFRARLNAQGRVNAWQAKANNNKQWLEIDLLKIKKITAIITQGCKSLSSEMYVKSYTIHYSEQGVEWKPYRLKSSMVDKIFEGNTNTKGHVKNFFNPPIISRFIRVIPKTWNQSIALRLELFGCDIY

SEQ ID NO: 910741 - protein, 2189 aa, Homo sapiens
MFPGCPRLWVLVVLGTSWVGWGSQGTEAAQLRQFYVAAQGISWSYRPEPTNSSLNLSVTSFKKIVYREYEPYFKKEKPQSTISGLLGPTLYAEVGDIIKVHFKNKADKPLSIHPQGIRYSKLSEGASYLDHTFPAEKMDDAVAPGREYTYEWSISEDSGPTHDDPPCLTHIYYSHENLIEDFNSGLIGPLLICKKGTLTEGGTQKTFDKQIVLLFAVFDESKSWSQSSSLMYTVNGYVNGTMPDITVCAHDHISWHLLGMSSGPELFSIHFNGQVLEQNHHKVSAITLVSATSTTANMTVGPEGKWIISSLTPKHLQAGMQAYIDIKNCPKKTRNLKKITREQRRHMKRWEYFIAAEEVIWDYAPVIPANMDKKYRSQHLDNFSNQIGKHYKKVMYTQYEDESFTKHTVNPNMKEDGILGPIIRAQVRDTLKIVFKNMASRPYSIYPHGVTFSPYEDEVNSSFTSGRNNTMIRAVQPGETYTYKWNILEFDEPTENDAQCLTRPYYSDVDIMRDIASGLIGLLLICKSRSLDRRGIQRAADIEQQAVFAVFDENKSWYLEDNINKFCENPDEVKRDDPKFYESNIMSTINGYVPESITTLGFCFDDTVQWHFCSVGTQNEILTIHFTGHSFIYGKRHEDTLTLFPMRGESVTVTMDNVGTWMLTSMNSSPRSKKLRLKFRDVKCIPDDDEDSYEIFEPPESTVMATRKMHDRLEPEDEESDADYDYQNRLAAALGIRSFRNSSLNQEEEEFNLTALALENGTEFVSSNTDIIVGSNYSSPSNISKFTVNNLAEPQKAPSHQQATTAGSPLRHLIGKNSVLNSSTAEHSSPYSEDPIEDPLQPDVTGIRLLSLGAGEFKSQEHAKHKGPKVERDQAAKHRFSWMKLLAHKVGRHLSQDTGSPSGMRPWKDPPSDLLLLKQSNSSKILVGRWHLASEKGSYEIIQDTDEDTAVNNWLISPQNASRAWGESTPLANKPGKQSGHPKFPRVRHKSLQVRQDGGKSRLKKSQFLIKTRKKKKEKHTHHAPLSPRTFHPLRSEAYNTFSERRLKHSLVLHKSNETSLPTDLNQTLPSMDFGWIASLPDHNQNSSNDTGQASCPPGLYQTVPPEEHYQTFPIQDPDQMHSTSDPSHRSSSPELSEMLEYDRSHKSFPTDISQMSPSSEHEVWQTVISPDLSQVTLSPELSQTNLSPDLSHTTLSPELIQRNLSPALGQMPISPDLSHTTLSPDLSHTTLSLDLSQTNLSPELSQTNLSPALGQMPLSPDLSHTTLSLDFSQTNLSPELSHMTLSPELSQTNLSPALGQMPISPDLSHTTLSLDFSQTNLSPELSQTNLSPALGQMPLSPDPSHTTLSLDLSQTNLSPELSQTNLSPDLSEMPLFADLSQIPLTPDLDQMTLSPDLGETDLSPNFGQMSLSPDLSQVTLSPDISDTTLLPDLSQISPPPDLDQIFYPSESSQSLLLQEFNESFPYPDLGQMPSPSSPTLNDTFLSKEFNPLVIVGLSKDGTDYIEIIPKEEVQSSEDDYAEIDYVPYDDPYTWYLRSNNGNRRNYYIAAEEISWDYSEFVQRETDIEDSDDIPEDTTYKKVVFRKYLDSTFTKRDPRGEYEEHLGILGPIIRAEVDDVIQVRFKNLASRPYSLHAHGLSYEKSSEGKTYEDDSPEWFKEDNAVQPNSSYTYVWHATERSGPESPGSACRAWAYYSAVNPEKDIHSGLIGPLLICQKGILHKDSNMPVDMREFVLLFMTFDEKKSWYYEKKSRSSWRLTSSEMKKSHEFHAINGMIYSLPGLKMYEQEWVRLHLLNIGGSQDIHVVHFHGQTLLENGNKQHQLGVWPLLPGSFKTLEMKASKPGWWLLNTEVGENQRAGMQTPFLIMDRDCRMPMGLSTGIISDSQIKASEFLGYWEPRLARLNNGGSYNAWSVEKLAAEFASKPWIQVDMQKEVIITGIQTQGAKHYLKSCYTTEFYVAYSSNQINWQIFKGNSTRNVMYFNGNSDASTIKENQFDPPIVARYIRISPTRAYNRPTLRLELQGCEVNGCSTPLGMENGKIENKQITASSFKKSWWGDYWEPFRARLNAQGRVNAWQAKANNNKQWLEIDLLKIKKITAIITQGCKSLSSEMYVKSYTIHYSEQGVEWKPYRLKSSMVDKIFEGNTNTKGHVKNFFNPPIISRFIRVIPKTWNQSIALRLELFGCDIY

SEQ ID NO: 910742 - protein, 1046 aa, Homo sapiens
MFPGCPRLWVLVVLGTSWVGWGSQGTEAAQLRQFYVAAQGISWSYRPEPTNSSLNLSVTSFKKIVYREYEPYFKKEKPQSTISGLLGPTLYAEVGDIIKVHFKNKADKPLSIHPQGIRYSKLSEGASYLDHTFPAEKMDDAVAPGREYTYEWSISEDSGPTHDDPPCLTHIYYSHENLIEDFNQSNKPFPSPRSDALSPDPSHTTLSLDLSQTNLSPELSQTNLSPDLSEMPLFADLSQIPLTPDLDQMTLSPDLGETDLSPNFGQMSLSPDLSQVTLSPDISDTTLLPDLSQISPPPDLDQIFYPSESSQSLLLQEFNESFPYPDLGQMPSPSSPTLNDTFLSKEFNPLVIVGLSKDGTDYIEIIPKEEVQSSEDDYAEIDYVPYDDPYTWYLRSNNGNRRNYYIAAEEISWDYSEFVQRETDIEDSDDIPEDTTYKKVVFRKYLDSTFTKRDPRGEYEEHLGILGPIIRAEVDDVIQVRFKNLASRPYSLHAHGLSYEKSSEGKTYEDDSPEWFKEDNAVQPNSSYTYVWHATERSGPESPGSACRAWAYYSAVNPEKDIHSGLIGPLLICQKGILHKDSNMPVDMREFVLLFMTFDEKKSWYYEKKSRSSWRLTSSEMKKSHEFHAINGMIYSLPGLKMYEQEWVRLHLLNIGGSQDIHVVHFHGQTLLENGNKQHQLGVWPLLPGSFKTLEMKASKPGWWLLNTEVGENQRAGMQTPFLIMDRDCRMPMGLSTGIISDSQIKASEFLGYWEPRLARLNNGGSYNAWSVEKLAAEFASKPWIQVDMQKEVIITGIQTQGAKHYLKSCYTTEFYVAYSSNQINWQIFKGNSTRNVMYFNGNSDASTIKENQFDPPIVARYIRISPTRAYNRPTLRLELQGCEVNGCSTPLGMENGKIENKQITASSFKKSWWGDYWEPFRARLNAQGRVNAWQAKANNNKQWLEIDLLKIKKITAIITQGCKSLSSEMYVKSYTIHYSEQGVEWKPYRLKSSMVDKIFEGNTNTKGHVKNFFNPPIISRFIRVIPKTWNQSIALRLELFGCDIY

SEQ ID NO: 910743 - protein, 2206 aa, Homo sapiens
MFPGCPRLWVLVVLGTSWVGWGSQGTEAAQLRQFYVAAQGISWSYRPEPTNSSLNLSVTSFKKIVYREYEPYFKKEKPQSTISGLLGPTLYAEVGDIIKVHFKNKADKPLSIHPQGIRYSKLSEGASYLDHTFPAEKMDDAVAPGREYTYEWSISEDSGPTHDDPPCLTHIYYSHENLIEDFNSGLIGPLLICKKGTLTEGGTQKTFDKQIVLLFAVFDESKSWSQSSSLMYTVNGYVNGTMPDITVCAHDHISWHLLGMSSGPELFSIHFNGQVLEQNHHKVSAITLVSATSTTANMTVGPEGKWIISSLTPKHLQAGMQAYIDIKNCPKKTRNLKKITREQRRHMKRWEYFIAAEEVIWDYAPVIPANMDKKYRSQHLDNFSNQIGKHYKKVMYTQYEDESFTKHTVNPNMKEDGILGPIIRAQVRDTLKIVFKNMASRPYSIYPHGVTFSPYEDEVNSSFTSGRNNTMIRAVQPGETYTYKWNILEFDEPTENDAQCLTRPYYSDVDIMRDIASGLIGLLLICKSRSLDRRGIQRAADIEQQAVFAVFDENKSWYLEDNINKFCENPDEVKRDDPKFYESNIMSTINGYVPESITTLGFCFDDTVQWHFCSVGTQNEILTIHFTGHSFIYGKRHEDTLTLFPMRGESVTVTMDNVGTWMLTSMNSSPRSKKLRLKFRDVKCIPDDDEDSYEIFEPPESTVMATRKMHDRLEPEDEESDADYDYQNRLAAALGIRSFRNSSLNQEEEEFNLTALALENGTEFVSSNTDIIVGSNYSSPSNISKFTVNNLAEPQKAPSHQQATTAGSPLRHLIGKNSVLNSSTAEHSSPYSEDPIEDPLQPDVTGIRLLSLGAGEFKSQEHAKHKGPKVERDQAAKHRFSWMKLLAHKVGRHLSQDTGSPSGMRPWEDLPSQDTGSPSRMRPWKDPPSDLLLLKQSNSSKILVGRWHLASEKGSYEIIQDTDEDTAVNNWLISPQNASRAWGESTPLANKPGKQSGHPKFPRVRHKSLQVRQDGGKSRLKKSQFLIKTRKKKKEKHTHHAPLSPRTFHPLRSEAYNTFSERRLKHSLVLHKSNETSLPTDLNQTLPSMDFGWIASLPDHNQNSSNDTGQASCPPGLYQTVPPEEHYQTFPIQDPDQMHSTSDPSHRSSSPELSEMLEYDRSHKSFPTDISQMSPSSEHEVWQTVISPDLSQVTLSPELSQTNLSPDLSHTTLSPELIQRNLSPALGQMPISPDLSHTTLSPDLSHTTLSLDLSQTNLSPELSQTNLSPALGQMPLSPDLSHTTLSLDFSQTNLSPELSHMTLSPELSQTNLSPALGQMPISPDLSHTTLSLDFSQTNLSPELSQTNLSPALGQMPLSPDPSHTTLSLDLSQTNLSPELSQTNLSPDLSEMPLFADLSQIPLTPDLDQMTLSPDLGETDLSPNFGQMSLSPDLSQVTLSPDISDTTLLPDLSQISPPPDLDQIFYPSESSQSLLLQEFNESFPYPDLGQMPSPSSPTLNDTFLSKEFNPLVIVGLSKDGTDYIEIIPKEEVQSSEDDYAEIDYVPYDDPYTWYLRSNNGNRRNYYIAAEEISWDYSEFVQRETDIEDSDDIPEDTTYKKVVFRKYLDSTFTKRDPRGEYEEHLGILGPIIRAEVDDVIQVRFKNLASRPYSLHAHGLSYEKSSEGKTYEDDSPEWFKEDNAVQPNSSYTYVWHATERSGPESPGSACRAWAYYSAVNPEKDIHSGLIGPLLICQKGILHKDSNMPVDMREFVLLFMTFDEKKSWYYEKKSRSSWRLTSSEMKKSHEFHAINGMIYSLPGLKMYEQEWVRLHLLNIGGSQDIHVVHFHGQTLLENGNKQHQLGVWPLLPGSFKTLEMKASKPGWWLLNTEVGENQRAGMQTPFLIMDRDCRMPMGLSTGIISDSQIKASEFLGYWEPRLARLNNGGSYNAWSVEKLAAEFASKPWIQVDMQKEVIITGIQTQGAKHYLKSCYTTEFYVAYSSNQINWQIFKGNSTRNVMYFNGNSDASTIKENQFDPPIVARYIRISPTRAYNRPTLRLELQGCEVNGCSTPLGMENGKIENKQITASSFKKSWWGDYWEPFRARLNAQGRVNAWQAKANNNKQWLEIDLLKIKKITAIITQGCKSLSSEMYVKSYTIHYSEQGVEWKPYRLKSSMVDKIFEGNTNTKGHVKNFFNPPIISRFIRVIPKTWNQSIALRLELFGCDIY

SEQ ID NO: 910744 - protein, 2206 aa, Homo sapiens; identical to SEQ ID NO: 910743

SEQ ID NO: 910745 - protein, 2153 aa, Homo sapiens
MFPGCPRLWVLVVLGTSWVGWGSQGTEAAQLRQFYVAAQGISWSYRPEPTNSSLNLSVTSFKKIVYREYEPYFKKEKPQSTISGLLGPTLYAEVGDIIKVHFKNKADKPLSIHPQGIRYSKLSEGASYLDHTFPAEKMDDAVAPGREYTYEWSISEDSGPTHDDPPCLTHIYYSHENLIEDFNSGLIGPLLICKKGTLTEGGTQKTFDKQIVLLFAVFDESKSWSQSSSLMYTVNGYVNGTMPDITVCAHDHISWHLLGMSSGPELFSIHFNGQVLEQNHHKVSAITLVSATSTTANMTVGPEGKWIISSLTPKHLQAGMQAYIDIKNCPKKTRNLKKITREQRRHMKRWEYFIAAEEVIWDYAPVIPANMDKKYRSQHLDNFSNQIGKHYKKVMYTQYEDESFTKHTVNPNMKEDGILGPIIRAQVRDTLKIVFKNMASRPYSIYPHGVTFSPYEDEVNSSFTSGRNNTMIRAVQPGETYTYKWNILEFDEPTENDAQCLTRPYYSDVDIMRDIASGLIGLLLICKSRSLDRRGIQRAADIEQQAVFAVFDENKSWYLEDNINKFCENPDEVKRDDPKFYESNIMSTINGYVPESITTLGFCFDDTVQWHFCSVGTQNEILTIHFTGHSFIYGKRHEDTLTLFPMRGESVTVTMDNVGTWMLTSMNSSPRSKKLRLKFRDVKCIPDDDEDSYEIFEPPESTVMATRKMHDRLEPEDEESDADYDYQNRLAAALGIRSFRNSSLNQEEEEFNLTALALENGTEFVSSNTDIIVGSNYSSPSNISKFTVNNLAEPQKAPSHQQATTAGSPLRHLIGKNSVLNSSTAEHSSPYSEDPIEDPLQPDVTGIRLLSLGAGEFKSQEHAKHKGPKVERDQAAKHRFSWMKLLAHKVGRHLSQDTGSPSGMRPWEDLPSQDTGSPSRMRPWKDPPSDLLLLKQSNSSKILVGRWHLASEKGSYEIIQDTDEDTAVNNWLISPQNASRAWGESTPLANKPGKQSGHPKFPRVRHKSLQVRQDGGKSRLKKSQFLIKTRKKKKEKHTHHAPLSPRTFHPLRSEAYNTFSERRLKHSLVLHKSNETSLPTDLNQTLPSMDFGWIASLPDHNQNSSNDTGQASCPPGLYQTVPPEEHYQTFPIQDPDQMHSTSDPSHRSSSPELSEMLEYDRSHKSFPTDISQMSPSSEHEVWQTVISPDLSQVTLSPELSQTNLSPDLSHTTLSPELIQRNLSPALGQMPISPDLSHTTLSPDLSHTTLSLDLSQTNLSPELSQTNLSPALGQMPLSPDLSHTTLSLDFSQTNLSPELSHMTLSPELSQTNLSPALGQMPISPDLSHTTLSLDFSQTNLSPELSQTNLSPALGQMPLSPDPSHTTLSLDLSQTNLSPELSQTNLSPDLSEMPLFADLSQIPLTPDLDQMTLSPDLGETDLSPNFGQMSLSPDLSQVTLSPDISDTTLLPDLSQISPPPDLDQIFYPSESSQSLLLQEFNESFPYPDLGQMPSPSSPTLNDTFLSKEFNPLVIVGLSKDGTDYIEIIPKEEVQSSEDDYAEIDYVPYDDPYTWYLRSNNGNRRNYYIAAEEISWDYSEFVQRETDIEDSDDIPEDTTYKKVVFRKYLDSTFTKRDPRGEYEEHLGILGPIIRAEVDDVIQVRFKNLASRPYSLHAHGLSYEKSSEGKTYEDDSPEWFKEDNAVQPNSSYTYVWHATERSGPESPGSACRAWAYYSAVNPEKDIHSGLIGPLLICQKGILHKDSNMPVDMREFVLLFMTFDEKKSWYYEKKSRSSWRLTSSEMKKSHEFHAINGMIYSLPGLKMYEQEWVRLHLLNIGGSQDIHVVHFHGQTLLENGNKQHQLGVWPLLPGSFKTLEMKASKPGWWLLNTEVGENQRAGMQTPFLIMDRDCRMPMGLSTGIISDSQIKASEFLGYWEPRLARLNNGGSYNAWSVEKLAAEFASKPWIQVDMQKEVIITGIQTQGAKHYLKSCYTTEFYVAYSSNQINWQIFKGNSTRNVMYFNGNSDASTIKENQFDPPIVARYIRISPTRAYNRPTLRLELQGCEVNGCSTPLGMENGKIENKQITASSFKKSWWGDYWEPFRARLNAQGRVNAWQAKANNNKQWLEIDLLKIKKITAIITQGCKSLSSEMYVKSYTIHYSEQFLKEILIPKDM

SEQ ID NO: 910746 - protein, 832 aa, Homo sapiens
PALGKISHSSETIPIALIVHFPNLQIPLTPDLDQMTLSPDLGETDLSPNFGQMSLSPDLSQVTLSPDISDTTLLPDLSQISPPPDLDQIFYPSESSQSLLLQEFNESFPYPDLGQMPSPSSPTLNDTFLSKEFNPLVIVGLSKDGTDYIEIIPKEEVQSSEDDYAEIDYVPYDDPYTWYLRSNNGNRRNYYIAAEEISWDYSEFVQRETDIEDSDDIPEDTTYKKVVFRKYLDSTFTKRDPRGEYEEHLGILGPIIRAEVDDVIQVRFKNLASRPYSLHAHGLSYEKSSEGKTYEDDSPEWFKEDNAVQPNSSYTYVWHATERSGPESPGSACRAWAYYSAVNPEKDIHSGLIGPLLICQKGILHKDSNMPVDMREFVLLFMTFDEKKSWYYEKKSRSSWRLTSSEMKKSHEFHAINGMIYSLPGLKMYEQEWVRLHLLNIGGSQDIHVVHFHGQTLLENGNKQHQLGVWPLLPGSFKTLEMKASKPGWWLLNTEVGENQRAGMQTPFLIMDRDCRMPMGLSTGIISDSQIKASEFLGYWEPRLARLNNGGSYNAWSVEKLAAEFASKPWIQVDMQKEVIITGIQTQGAKHYLKSCYTTEFYVAYSSNQINWQIFKGNSTRNVMYFNGNSDASTIKENQFDPPIVARYIRISPTRAYNRPTLRLELQGCEVNGCSTPLGMENGKIENKQITASSFKKSWWGDYWEPFRARLNAQGRVNAWQAKANNNKQWLEIDLLKIKKITAIITQGCKSLSSEMYVKSYTIHYSEQGVEWKPYRLKSSMVDKIFEGNTNTKGHVKNFFNPPIISRFIRVIPKTWNQSIALRLELFGCDIY

SEQ ID NO: 910747 - protein, 180 aa, Homo sapiens; identical to SEQ ID NO: 831501

SEQ ID NO: 910748 - protein, 190 aa, Homo sapiens
QLDKRASGQSFTSDVPVLVDGYWGAAVCKKQEQMSDSTDSSFIFSLEADMEVKQLDKRASGQSFEVILKSPSDLSPESPMLSSPPKKKDTSLEELQKRLEAAEERRKTQEAQVLKQLAERREHEREVLHKALEENNNFSRQAEEKLNYKMELSKEIREAHLAALRERLREKELHAAEVRRNKEQREEMSG

SEQ ID NO: 910749 - protein, 180 aa, Homo sapiens; identical to SEQ ID NO: 831501

SEQ ID NO: 910750 - protein, 145 aa, Homo sapiens
MAGALGAARTAGPAREAGTGAGAADRDPLALPRPQAGWQARVPRAAPGGPGAHRGLGRWRRQTQEAQVLKQLAERREHEREVLHKALEENNNFSRQAEEKLNYKMELSKEIREAHLAALRERLREKELHAAEVRRNKEQREEMSG

SEQ ID NO: 910751 - protein, 1259 aa, Homo sapiens
MDASEEPLPPVIYTMENKPIVTCAGDQNLFTSVYPTLSQQLPREPMEWRRSYGRAPKMIHLESNFVQFKEELLPKEGNKALLTFPFLHIYWTECCDTEVYKATVKDDLTKWQNVLKAHSSVDWLIVIVENDAKKKNKTNILPRTSIVDKIRNDFCNKQSDRCVVLSDPLKDSSRTQESWNAFLTKLRTLLLMSFTKNLGKFEDDMRTLREKRTEPGWSFCEYFMVQEELAFVFEMLQQFEDALVQYDELDALFSQYVVNFGAGDGANWLTFFCQPVKSWNGLILRKPIDMEKRESIQRREATLLDLRSYLFSRQCTLLLFLQRPWEVAQRALELLHNCVQELKLLEVSVPPGALDCWVFLSCLEVLQRIEGCCDRAQIDSNIAHTVGLWSYATEKLKSLGYLCGLVSEKGPNSEDLNRTVDLLAGLGAERPETANTAQSPYKKLKEALSSVEAFEKHYLDLSHATIEMYTSIGRIRSAKFVGKDLAEFYMRKKAPQKAEIYLQGALKNYLAEGWALPITHTRKQLAECQKHLGQIENYLQTSSLLASDHHLTEEERKHFCQEILDFASQPSDSPGHKIVLPMHSFAQLRDLHFDPSNAVVHVGGVLCVEITMYSQMPVPVHVEQIVVNVHFSIEKNSYRKTAEWLTKHKTSNGIINFPPETAPFPVSQNSLPALELYEMFERSPSDNSLNTTGIICRNVHMLLRRQESSSSLEMPSGVALEEGAHVLRCSHVTLEPGANQITFRTQAKEPGTYTLRQLCASVGSVWFVLPHIYPIVQYDVYSQEPQLHVEPLADSLLAGIPQRVKFTVTTGHYTIKNGDSLQLSNAEAMLILCQAESRAVVYSNTREQSSEAALRIQSSDKVTSISLPVAPAYHVIEFELEVLSLPSAPALGGESDMLGMAEPHRKHKDKQRTGRCMVTTDHKVSIDCPWSIYSTVIALTFSVPFRTTHSLLSSGTRKYVQVCVQNLSELDFQLSDSYLVDTGDSTDLQLVPLNTQSQQPIYSKQSVFFVWELKWTEEPPPSLHCRFSVGFSPASEEQLSISLKPYTYEFKVENFFTLYNVKAEIFPPSGMEYCRTGSLCSLEVLITRLSDLLEVDKDEALTESDEHFSTKLMYEVVDNSSNWAVCGKSCGVISMPVAARATHRVHMEVMPLFAGYLPLPDVRLFKYLPHHSAHSSQLDADSWIENDSLSVDKHGDDQPDSSSLKSRGSVHSACSSEHKGLPMPRLQALPAGQVFNSSSGTQVLVIPSQDDHVLEVSVT

SEQ ID NO: 910752 - protein, 1259 aa, Homo sapiens; identical to SEQ ID NO: 910751

SEQ ID NO: 910753 - protein, 779 aa, Homo sapiens
MKATVCDFARRKKAPQKAEIYLQGALKNYLAEGWALPITHTRKQLAECQKHLGQIENYLQTSSLLASDHHLTEEERKHFCQEILDFASQPSDSPGHKIVLPMHSFAQLRDLHFDPSNAVVHVGGVLCVEITMYSQMPVPVHVEQIVVNVHFSIEKNSYRKTAEWLTKHKTSNGIINFPPETAPFPVSQNSLPALELYEMFERSPSDNSLNTTGIICRNVHMLLRRQESSSSLEMPSGVALEEGAHVLRCSHVTLEPGANQITFRTQAKEPGTYTLRQLCASVGSVWFVLPHIYPIVQYDVYSQEPQLHVEPLADSLLAGIPQRVKFTVTTGHYTIKNGDSLQLSNAEAMLILCQAESRAVVYSNTREQSSEAALRIQSSDKVTSISLPVAPAYHVIEFELEVLSLPSAPALGGESDMLGMAEPHRKHKDKQRTGRCMVTTDHKVSIDCPWSIYSTVIALTFSVPFRTTHSLLSSGTRKYVQVCVQNLSELDFQLSDSYLVDTGDSTDLQLVPLNTQSQQPIYSKQSVFFVWELKWTEEPPPSLHCRFSVGFSPASEEQLSISLKPYTYEFKVENFFTLYNVKAEIFPPSGMEYCRTGSLCSLEVLITRLSDLLEVDKDEALTESDEHFSTKLMYEVVDNSSNWAVCGKSCGVISMPVAARATHRVHMEVMPLFAGYLPLPDVRLFKYLPHHSAHSSQLDADSWIENDSLSVDKHGDDQPDSSSLKSRGSVHSACSSEHKGLPMPRLQALPAGQVFNSSSGTQVLVIPSQDDHVLEVSVT

SEQ ID NO: 910754 - protein, 820 aa, Homo sapiens
MDASEEPLPPVIYTMENKPIVTCAGDQNLFTSVYPTLSQQLPREPMEWRRSYGRAPKMIHLESNFVQFKEELLPKEGNKALLTFPFLHIYWTECCDTEVYKATVKDDLTKWQNVLKAHSSVDWLIVIVENDAKKKNKTNILPRTSIVDKIRNDFCNKQSDRCVVLSDPLKDSSRTQESWNAFLTKLRTLLLMSFTKNLGKFEDDMRTLREKRTEPGWSFCEYFMVQEELAFVFEMLQQFEDALVQYDELDALFSQYVVNFGAGDGANWLTFFCQPVKSWNGLILRKPIDMEKRESIQRREATLLDLRSYLFSRQCTLLLFLQRPWEVAQRALELLHNCVQELKLLEVSVPPGALDCWVFLSCLEVLQRIEGCCDRAQIDSNIAHTVGLWSYATEKLKSLGYLCGLVSEKGPNSEDLNRTVDLLAGLGAERPETANTAQSPYKKLKEALSSVEAFEKHYLDLSHATIEMYTSIGRIRSAKFVGKDLAEFYMRKKAPQKAEIYLQGALKNYLAEGWALPITHTRKQLAECQKHLGQIENYLQTSSLLASDHHLTEEERKHFCQEILDFASQPSDSPGHKIVLPMHSFAQLRDLHFDPSNAVVHVGGVLCVEITMYSQMPVPVHVEQIVVNVHFSIEKNSYRKTAEWLTKHKTSNGIINFPPETAPFPVSQNSLPALELYEMFERSPSDNSLNTTGIICRNVHMLLRRQESSSSLEMPSGVALEEGAHVLRCSHVTLEPGANQITFRTQAKEPGTYTLRQLCASVGSVWFVLPHIYPIVQYDVYSQEPQLHVEPLAGEWGPQPLRRRAAGAVLRRPAEMPGFS

SEQ ID NO: 910755 - protein, 276 aa, Homo sapiens
MDASEEPLPPVIYTMENKPIVTCAGDQNLFTSVYPTLSQQLPREPMEWRRSYGRAPKMIHLESNFVQFKEELLPKEGNKALLTFPFLHIYWTECCDTEVYKATVKDDLTKWQNVLKAHSSVDWLIVIVENDAKKKNKTNILPRTSIVDKIRNDFCNKQSDRCVVLSDPLKDSSRTQESWNAFLTKLRTLLLMSFTKNLGKFEDDMRTLREKRTEPGWSFCEYFMVQEELAFVFEMLQQFEDALVQYDELDALFSQYVVNFGAGGIKCPFHNSVACW

SEQ ID NO: 910756 - protein, 450 aa, Homo sapiens
  misc_feature (435)..(435): Xaa can be any naturally occurring amino acid
MDASEEPLPPVIYTMENKPIVTCAGDQNLFTSVYPTLSQQLPREPMEWRRSYGRAPKMIHLESNFVQFKEELLPKEGNKALLTFPFLHIYWTECCDTEVYKATVKDDLTKWQNVLKAHSSVDWLIVIVENDAKKKNKTNILPRTSIVDKIRNDFCNKQSDRCVVLSDPLKDSSRTQESWNAFLTKLRTLLLMSFTKNLGKFEDDMRTLREKRTEPGWSFCEYFMVQEELAFVFEMLQQFEDALVQYDELDALFSQYVVNFGAGDGANWLTFFCQPVKSWNGLILRKPIDMEKRESIQRREATLLDLRSYLFSRQCTLLLFLQRPWEVAQRALELLHNCVQELKLLEVSVPPGALDCWVFLSCLEVLQRIEGCCDRAQIDSNIAHTVGLWSYATEKLKSLGYLCGLVSEKGPNSEDLNRTVDLLAGLGAERPETGXSMYGGKSNEYATQCA

SEQ ID NO: 910757 - protein, 105 aa, Homo sapiens
ISFLFSPFPAQTLYNVKAEIFPPSGMEYCRTGSLCSLEVLITRLSDLLEVDKDEALTESDEHFSTKLMYEGRWSRTHGLKQSSRLGLPECWDYRCEALHSAYLAF

SEQ ID NO: 910758 - protein, 1202 aa, Homo sapiens [sequence omitted]

SEQ ID NO: 910759 - protein, 396 aa, Homo sapiens
WAAVVVAVLSVGEWSESVFVLPPQVSIDCPWSIYSTVIALTFSVPFRTTHSLLSSGTRKYVQVCVQNLSELDFQLSDSYLVDTGDSTDLQLVPLNTQSQQPIYSKQSVFFVWELKWTEEPPPSLHCRFSVGFSPASEEQLSISLKPYTYEFKVENFFGGPGPLARFQLAVSARVSPEEALRFWSLCLSSRCRQTLYNVKAEIFPPSGMEYCRTGSLCSLEVLITRLSDLLEVDKDEALTESDEHFSTKLMYEVVDNSSNWAVCGKSCGVISMPVAARATHRVHMEVMPLFAGYLPLPDVRLFKYLPHHSAHSSQLDADSWIENDSLSVDKHGDDQPDSSSLKSRGSVHSACSSEHKGLPMPRLQALPAGQVFNSSSGTQVLVIPSQDDHVLEVSVT

SEQ ID NO: 910760 - protein, 775 aa, Homo sapiens [sequence omitted]

SEQ ID NO: 910761 - protein, 101 aa, Homo sapiens
AAAYYYYYCSEFKLLTMYGDMCEGRSNFEEPWCQQENLEGDEVWGRSVLAVSTVLTLELISGADGYWLIVLLKIRSGYLTLLRCQYRHRTKAKCLLSKKIK

SEQ ID NO: 910762 - protein, 78 aa, Homo sapiens
MDASEEPLPPVIYTMENKPIVTCECPEAGRARRSLGGPGPWRYAPGAPRPSAPGALRAGPLPGGVTRAAAEAGPSDFS

SEQ ID NO: 910763 - protein, 2307 aa, Homo sapiens
MSPPPPPPPVRALPLLLLLAGPGAAAPPCLDGSPCANGGRCTQLPSREAACLCPPGWVGERCQLEDPCHSGPCAGRGVCQSSVVAGTARFSCRCPRGFRGPDCSLPDPCLSSPCAHGARCSVGPDGRFLCSCPPGYQGRSCRSDVDECRVGEPCRHGGTCLNTPGSFRCQCPAGYTGPLCENPAVPCAPSPCRNGGTCRQSGDLTYDCACLPGFEGQNCEVNVDDCPGHRCLNGGTCVDGVNTYNCQCPPEWTGQFCTEDVDECQLQPNACHNGGTCFNTLGGHSCVCVNGWTGESCSQNIDDCATAVCFHGATCHDRVASFYCACPMGKTGLLCHLDDACVSNPCHEDAICDTNPVNGRAICTCPPGFTGGACDQDVDECSIGANPCEHLGRCVNTQGSFLCQCGRGYTGPRCETDVNECLSGPCRNQATCLDRIGQFTCICMAGFTGTYCEVDIDECQSSPCVNGGVCKDRVNGFSCTCPSGFSGSTCQLDVDECASTPCRNGAKCVDQPDGYECRCAEGFEGTLCDRNVDDCSPDPCHHGRCVDGIASFSCACAPGYTGTRCESQVDECRSQPCRHGGKCLDLVDKYLCRCPSGTTGVNCEVNIDDCASNPCTFGVCRDGINRYDCVCQPGFTGPLCNVEINECASSPCGEGGSCVDGENGFRCLCPPGSLPPLCLPPSHPCAHEPCSHGICYDAPGGFRCVCEPGWSGPRCSQSLARDACESQPCRAGGTCSSDGMGFHCTCPPGVQGRQCELLSPCTPNPCEHGGRCESAPGQLPVCSCPQGWQGPRCQQDVDECAGPAPCGPHGICTNLAGSFSCTCHGGYTGPSCDQDINDCDPNPCLNGGSCQDGVGSFSCSCLPGFAGPRCARDVDECLSNPCGPGTCTDHVASFTCTCPPGYGGFHCEQDLPDCSPSSCFNGGTCVDGVNSFSCLCRPGYTGAHCQHEADPCLSRPCLHGGVCSAAHPGFRCTCLESFTGPQCQTLVDWCSRQPCQNGGRCVQTGAYCLCPPGWSGRLCDIRSLPCREAAAQIGVRLEQLCQAGGQCVDEDSSHYCVCPEGRTGSHCEQEVDPCLAQPCQHGGTCRGYMGGYMCECLPGYNGDNCEDDVDECASQPCQHGGSCIDLVARYLCSCPPGTLGVLCEINEDDCGPGPPLDSGPRCLHNGTCVDLVGGFRCTCPPGYTGLRCEADINECRSGACHAAHTRDCLQDPGGGFRCLCHAGFSGPRCQTVLSPCESQPCQHGGQCRPSPGPGGGLTFTCHCAQPFWGPRCERVARSCRELQCPVGVPCQQTPRGPRCACPPGLSGPSCRSFPGSPPGASNASCAAAPCLHGGSCRPAPLAPFFRCACAQGWTGPRCEAPAAAPEVSEEPRCPRAACQAKRGDQRCDRECNSPGCGWDGGDCSLSVGDPWRQCEALQCWRLFNNSRCDPACSSPACLYDNFDCHAGGRERTCNPVYEKYCADHFADGRCDQGCNTEECGWDGLDCASEVPALLARGVLVLTVLLPPEELLRSSADFLQRLSAILRTSLRFRLDAHGQAMVFPYHRPSPGSEPRARRELAPEVIGSVVMLEIDNRLCLQSPENDHCFPDAQSAADYLGALSAVERLDFPYPLRDVRGEPLEPPEPSVPLLPLLVAGAVLLLVILVLGVMVARRKREHSTLWFPEGFSLHKDVASGHKGRREPVGQDALGMKNMAKGESLMGEVATDWMDTECPEAKRLKVEEPGMGAEEAVDCRQWTQHHLVAADIRVAPAMALTPPQGDADADGMDVNVRGPDGFTPLMLASFCGGALEPMPTEEDEADDTSASIISDLICQGAQLGARTDRTGETALHLAARYARADAAKRLLDAGADTNAQDHSGRTPLHTAVTADAQGVFQILIRNRSTDLDARMADGSTALILAARLAVEGMVEELIASHADVNAVDELGKSALHWAAAVNNVEATLALLKNGANKDMQDSKEETPLFLAAREGSYEAAKLLLDHFANREITDHLDRLPRDVAQERLHQDIVRLLDQPSGPRSPPGPHGLGPLLCPPGAFLPGLKAAQSGSKKSRRPPGKAGLGPQGPRGRGKKLTLACPGPLADSSVTLSPVDSLDSPRPFGGPPASPGGFPLEGPYAAATATAVSLAQLGGPGRAGLGRQPPGGCVLSLGLLNPVAVPLDWARLPPPAPPGPSFLLPLAPGPQLLNPGTPVSPQERPPPYLAVPGHGEEYPVAGAHSSPPKARFLRVPSEHPYLTPSPESPEHWASPSPPSLSDWSESTPSPATATGAMATTTGALPAQPLPLSVPSSLAQAQTQLGPQPEVTPKRQVLA

SEQ ID NO: 910764 - protein, 1515 aa, Homo sapiens
MDLDSSDQMHPIPVEPGFLLNSSQSKAYPSQTGLNGGKVGDQTAFLLSADPCLNGGSCQDGVGSFSCSCLPGFAGPRCARDVDECLSNPCGPGTCTDHVASFTCTCPPGYGGFHCEQDLPDCSPSSCFNGGTCVDGVNSFSCLCRPGYTGAHCQHEADPCLSRPCLHGGVCSAAHPGFRCTCLESFTGPQCQTLVDWCSRQPCQNGGRCVQTGAYCLCPPGWSGRLCDIRSLPCREAAAQIGVRLEQLCQAGGQCVDEDSSHYCVCPEGRTGSHCEQEVDPCLAQPCQHGGTCRGYMGGYMCECLPGYNGDNCEDDVDECASQPCQHGGSCIDLVARYLCSCPPGTLGVLCEINEDDCGPGPPLDSGPRCLHNGTCVDLVGGFRCTCPPGYTGLRCEADINECRSGACHAAHTRDCLQDPGGGFRCLCHAGFSGPRCQTVLSPCESQPCQHGGQCRPSPGPGGGLTFTCHCAQPFWGPRCERVARSCRELQCPVGVPCQQTPRGPRCACPPGLSGPSCRSFPGSPPGASNASCAAAPCLHGGSCRPAPLAPFFRCACAQGWTGPRCEAPAAAPEVSEEPRCPRAACQAKRGDQRCDRECNSPGCGWDGGDCSLSVGDPWRQCEALQCWRLFNNSRCDPACSSPACLYDNFDCHAGGRERTCNPVYEKYCADHFADGRCDQGCNTEECGWDGLDCASEVPALLARGVLVLTVLLPPEELLRSSADFLQRLSAILRTSLRFRLDAHGQAMVFPYHRPSPGSEPRARRELAPEVIGSVVMLEIDNRLCLQSPENDHCFPDAQSAADYLGALSAVERLDFPYPLRDVRGEPLEPPEPSVPLLPLLVAGAVLLLVILVLGVMVARRKREHSTLWFPEGFSLHKDVASGHKGRREPVGQDALGMKNMAKGESLMGEVATDWMDTECPEAKRLKVEEPGMGAEEAVDCRQWTQHHLVAADIRVAPAMALTPPQGDADADGMDVNVRGPDGFTPLMLASFCGGALEPMPTEEDEADDTSASIISDLICQGAQLGARTDRTGETALHLAARYARADAAKRLLDAGADTNAQDHSGRTPLHTAVTADAQGVFQILIRNRSTDLDARMADGSTALILAARLAVEGMVEELIASHADVNAVDELGKSALHWAAAVNNVEATLALLKNGANKDMQDSKEETPLFLAAREGSYEAAKLLLDHFANREITDHLDRLPRDVAQERLHQDIVRLLDQPSGPRSPPGPHGLGPLLCPPGAFLPGLKAAQSGSKKSRRPPGKAGLGPQGPRGRGKKLTLACPGPLADSSVTLSPVDSLDSPRPFGGPPASPGGFPLEGPYAAATATAVSLAQLGGPGRAGLGRQPPGGCVLSLGLLNPVAVPLDWARLPPPAPPGPSFLLPLAPGPQLLNPGTPVSPQERPPPYLAVPGHGEEYPVAGAHSSPPKARFLRVPSEHPYLTPSPESPEHWASPSPPSLSDWSESTPSPATATGAMATTTGALPAQPLPLSVPSSLAQAQTQLGPQPEVTPKRQVLA

SEQ ID NO: 910765 - protein, 1213 aa, Homo sapiens
MCLPGYNGDNCEDDVDECASQPCQHGGSCIDLVARYLCSCPPGTLGVLCEINEDDCGPGPPLDSGPRCLHNGTCVDLVGGFRCTCPPGYTGLRCEADINECRSGACHAAHTRDCLQDPGGGFRCLCHAGFSGPRCQTVLSPCESQPCQHGGQCRPSPGPGGGLTFTCHCAQPFWGPRCERVARSCRELQCPVGVPCQQTPRGPRCACPPGLSGPSCRSFPGSPPGASNASCAAAPCLHGGSCRPAPLAPFFRCACAQGWTGPRCEAPAAAPEVSEEPRCPRAACQAKRGDQRCDRECNSPGCGWDGGDCSLSVGDPWRQCEALQCWRLFNNSRCDPACSSPACLYDNFDCHAGGRERTCNPVYEKYCADHFADGRCDQGCNTEECGWDGLDCASEVPALLARGVLVLTVLLPPEELLRSSADFLQRLSAILRTSLRFRLDAHGQAMVFPYHRPSPGSEPRARRELAPEVIGSVVMLEIDNRLCLQSPENDHCFPDAQSAADYLGALSAVERLDFPYPLRDVRGEPLEPPEPSVPLLPLLVAGAVLLLVILVLGVMVARRKREHSTLWFPEGFSLHKDVASGHKGRREPVGQDALGMKNMAKGESLMGEVATDWMDTECPEAKRLKVEEPGMGAEEAVDCRQWTQHHLVAADIRVAPAMALTPPQGDADADGMDVNVRGPDGFTPLMLASFCGGALEPMPTEEDEADDTSASIISDLICQGAQLGARTDRTGETALHLAARYARADAAKRLLDAGADTNAQDHSGRTPLHTAVTADAQGVFQILIRNRSTDLDARMADGSTALILAARLAVEGMVEELIASHADVNAVDELGKSALHWAAAVNNVEATLALLKNGANKDMQDSKEETPLFLAAREGSYEAAKLLLDHFANREITDHLDRLPRDVAQERLHQDIVRLLDQPSGPRSPPGPHGLGPLLCPPGAFLPGLKAAQSGSKKSRRPPGKAGLGPQGPRGRGKKLTLACPGPLADSSVTLSPVDSLDSPRPFGGPPASPGGFPLEGPYAAATATAVSLAQLGGPGRAGLGRQPPGGCVLSLGLLNPVAVPLDWARLPPPAPPGPSFLLPLAPGPQLLNPGTPVSPQERPPPYLAVPGHGEEYPVAGAHSSPPKARFLRVPSEHPYLTPSPESPEHWASPSPPSLSDWSESTPSPATATGAMATTTGALPAQPLPLSVPSSLAQAQTQLGPQPEVTPKRQVLA

SEQ ID NO: 910766 - protein, 2255 aa, Homo sapiens
MSPPPPPPPVRALPLLLLLAGPGAAAPPCLDGSPCANGGRCTQLPSREAACLCPPGWVGERCQLEDPCHSGPCAGRGVCQSSVVAGTARFSCRCPRGFRGPDCSLPDPCLSSPCAHGARCSVGPDGRFLCSCPPGYQGRSCRSDVDECRVGEPCRHGGTCLNTPGSFRCQCPAGYTGPLCENPAVPCAPSPCRNGGTCRQSGDLTYDCACLPGFEGQNCEVNVDDCPGHRCLNGGTCVDGVNTYNCQCPPEWTGQFCTEDVDECQLQPNACHNGGTCFNTLGGHSCVCVNGWTGESCSQNIDDCATAVCFHGATCHDRVASFYCACPMGKTGLLCHLDDACVSNPCHEDAICDTNPVNGRAICTCPPGFTGGACDQDVDECSIGANPCEHLGRCVNTQGSFLCQCGRGYTGPRCETDVNECLSGPCRNQATCLDRIGQFTCICMAGFTGTYCEVDIDECQSSPCVNGGVCKDRVNGFSCTCPSGFSGSTCQLDVDECASTPCRNGAKCVDQPDGYECRCAEGFEGTLCDRNVDDCSPDPCHHGRCVDGIASFSCACAPGYTGTRCESQVDECRSQPCRHGGKCLDLVDKYLCRCPSGTTGVNCEVNIDDCASNPCTFGVCRDGINRYDCVCQPGFTGPLCNVEINECASSPCGEGGSCVDGENGFRCLCPPGSLPPLCLPPSHPCAHEPCSHGICYDAPGGFRCVCEPGWSGPRCSQSLARDACESQPCRAGGTCSSDGMGFHCTCPPGVQGRQCELLSPCTPNPCEHGGRCESAPGQLPVCSCPQGWQDPCLNGGSCQDGVGSFSCSCLPGFAGPRCARDVDECLSNPCGPGTCTDHVASFTCTCPPGYGGFHCEQDLPDCSPSSCFNGGTCVDGVNSFSCLCRPGYTGAHCQHEADPCLSRPCLHGGVCSAAHPGFRCTCLESFTGPQCQTLVDWCSRQPCQNGGRCVQTGAYCLCPPGWSGRLCDIRSLPCREAAAQIGVRLEQLCQAGGQCVDEDSSHYCVCPEGRTGSHCEQEVDPCLAQPCQHGGTCRGYMGGYMCECLPGYNGDNCEDDVDECASQPCQHGGSCIDLVARYLCSCPPGTLGVLCEINEDDCGPGPPLDSGPRCLHNGTCVDLVGGFRCTCPPGYTGLRCEADINECRSGACHAAHTRDCLQDPGGGFRCLCHAGFSGPRCQTVLSPCESQPCQHGGQCRPSPGPGGGLTFTCHCAQPFWGPRCERVARSCRELQCPVGVPCQQTPRGPRCACPPGLSGPSCRSFPGSPPGASNASCAAAPCLHGGSCRPAPLAPFFRCACAQGWTGPRCEAPAAAPEVSEEPRCPRAACQAKRGDQRCDRECNSPGCGWDGGDCSLSVGDPWRQCEALQCWRLFNNSRCDPACSSPACLYDNFDCHAGGRERTCNPVYEKYCADHFADGRCDQGCNTEECGWDGLDCASEVPALLARGVLVLTVLLPPEELLRSSADFLQRLSAILRTSLRFRLDAHGQAMVFPYHRPSPGSEPRARRELAPEVIGSVVMLEIDNRLCLQSPENDHCFPDAQSAADYLGALSAVERLDFPYPLRDVRGEPLEPPEPSVPLLPLLVAGAVLLLVILVLGVMVARRKREHSTLWFPEGFSLHKDVASGHKGRREPVGQDALGMKNMAKGESLMGEVATDWMDTECPEAKRLKVEEPGMGAEEAVDCRQWTQHHLVAADIRVAPAMALTPPQGDADADGMDVNVRGPDGFTPLMLASFCGGALEPMPTEEDEADDTSASIISDLICQGAQLGARTDRTGETALHLAARYARADAAKRLLDAGADTNAQDHSGRTPLHTAVTADAQGVFQILIRNRSTDLDARMADGSTALILAARLAVEGMVEELIASHADVNAVDELGKSALHWAAAVNNVEATLALLKNGANKDMQDSKEETPLFLAAREGSYEAAKLLLDHFANREITDHLDRLPRDVAQERLHQDIVRLLDQPSGPRSPPGPHGLGPLLCPPGAFLPGLKAAQSGSKKSRRPPGKAGLGPQGPRGRGKKLTLACPGPLADSSVTLSPVDSLDSPRPFGGPPASPGGFPLEGPYAAATATAVSLAQLGGPGRAGLGRQPPGGCVLSLGLLNPVAVPLDWARLPPPAPPGPSFLLPLAPGPQLLNPGTPVSPQERPPPYLAVPGHGEEYPVAGAHSSPPKARFLRVPSEHPYLTPSPESPEHWASPSPPSLSDWSESTPSPATATGAMATTTGALPAQPLPLSVPSSLAQAQTQLGPQPEVTPKRQVLA

SEQ ID NO: 910767 - protein, 1939 aa, Homo sapiens
MSPPPPPPPVRALPLLLLLAGPGAAAPPCLDGSPCANGGRCTQLPSREAACLCPPGWVGERCQLEDPCHSGPCAGRGVCQSSVVAGTARFSCRCPRGFRGPDCSLPDPCLSSPCAHGARCSVGPDGRFLCSCPPGYQGRSCRSDVDECRVGEPCRHGGTCLNTPGSFRCQCPAGYTGPLCENPAVPCAPSPCRNGGTCRQSGDLTYDCACLPGFEGQNCEVNVDDCPGHRCLNGGTCVDGVNTYNCQCPPEWTGQFCTEDVDECQLQPNACHNGGTCFNTLGGHSCVCVNGWTGESCSQNIDDCATAVCFHGATCHDRVASFYCACPMGKTGLLCHLDDACVSNPCHEDAICDTNPVNGRAICTCPPGFTGGACDQDVDECSIGANPCEHLGRCVNTQGSFLCQCGRGYTGPRCETDVNECLSGPCRNQATCLDRIGQFTCICMAGFTGTYCEVDIDECQSSPCVNGGVCKDRVNGFSCTCPSGFSGSTCQLDVDECASTPCRNGAKCVDQPDGYECRCAEGFEGTLCDRNVDDCSPDPCHHGRCVDGIASFSCACAPGYTGTRCESQVDECRSQPCRHGGKCLDLVDKYLCRCPSGTTGVNCEVNIDDCASNPCTFGVCRDGINRYDCVCQPGFTGPLCNVEINECASSPCGEGGSCVDGENGFRCLCPPGSLPPLCLPPSHPCAHEPCSHGICYDAPGGFRCVCEPGWSGPRCSQSLARDACESQPCRAGGTCSSDGMGFHCTCPPGVQGRQCELLSPCTPNPCEHGGRCESAPGQLPVCSCPQGWQDPCLNGGSCQDGVGSFSCSCLPGFAGPRCARDVDECLSNPCGPGTCTDHVASFTCTCPPGYGGFHCEQDLPDCSPSSCFNGGTCVDGVNSFSCLCRPGYTGAHCQHEADPCLSRPCLHGGVCSAAHPGFRCTCLESFTGPQCQTLVDWCSRQPCQNGGRCVQTGAYCLCPPGWSGRLCDIRSLPCREAAAQIGVRLEQLCQAGGQCVDEDSSHYCVCPEGRTGSHCEQEVDPCLAQPCQHGGTCRGYMGGYMCECLPGYNGDNCEDDVDECASQPCQHGGSCIDLVARYLCSCPPGTLGVLCEINEDDCGPGPPLDSGPRCLHNGTCVDLVGGFRCTCPPGYTGLRCEADINECRSGACHAAHTRDCLQDPGGGFRCLCHAGFSGPRCQTVLSPCESQPCQHGGQCRPSPGPGGGLTFTCHCAQPFWGPRCERVARSCRELQCPVGVPCQQTPRGPRCACPPGLSGPSCRSFPGSPPGASNASCAAAPCLHGGSCRPAPLAPFFRCACAQGWTGPRCEAPAAAPEVSEEPRCPRAACQAKRGDQRCDRECNSPGCGWDGGDCSLSVGDPWRQCEALQCWRLFNNSRCDPACSSPACLYDNFDCHAGGRERTCNPVYEKYCADHFADGRCDQGCNTEECGWDGLDCASEVPALLARGVLVLTVLLPPEELLRSSADFLQRLSAILRTSLRFRLDAHGQAMVFPYHRPSPGSEPRARRELAPEVIGSVVMLEIDNRLCLQSPENDHCFPDAQSAADYLGALSAVERLDFPYPLRDVRGEPLEPPEPSVPLLPLLVAGAVLLLVILVLGVMVARRKREHSTLWFPEGFSLHKDVASGHKGRREPVGQDALGMKNMAKGESLMGEVATDWMDTECPEAKRLKVEEPGMGAEEAVDCRQWTQHHLVAADIRVAPAMALTPPQGDADADGMDVNVRGPDGFTPLMLASFCGGALEPMPTEEDEADDTSASIISDLICQGAQLGARTDRTGETALHLAARYARADAAKRLLDAGADTNAQDHSGRTPLHTAVTADAQGVFQILIRNRSTDLDARMADGSTALILAARLAVEGMVEELIASHADVNAVDELGKSALHWAAAVNNVEATLALLKNGANKDMQDSKVSPSPWSTGCQQWHSAIAIQPGQQSETLSKNKTK

SEQ ID NO: 910768 - protein, 1219 aa, Homo sapiens
MSPPPPPPPVRALPLLLLLAGPGAAAPPCLDGSPCANGGRCTQLPSREAACLCPPGWVGERCQLEDPCHSGPCAGRGVCQSSVVAGTARFSCRCPRGFRGPDCSLPDPCLSSPCAHGARCSVGPDGRFLCSCPPGYQGRSCRSDVDECRVGEPCRHGGTCLNTPGSFRCQCPAGYTGPLCENPAVPCAPSPCRNGGTCRQSGDLTYDCACLPGFEGQNCEVNVDDCPGHRCLNGGTCVDGVNTYNCQCPPEWTGQFCTEDVDECQLQPNACHNGGTCFNTLGGHSCVCVNGWTGESCSQNIDDCATAVCFHGATCHDRVASFYCACPMGKTGLLCHLDDACVSNPCHEDAICDTNPVNGRAICTCPPGFTGGACDQDVDECSIGANPCEHLGRCVNTQGSFLCQCGRGYTGPRCETDVNECLSGPCRNQATCLDRIGQFTCICMAGFTGTYCEVDIDECQSSPCVNGGVCKDRVNGFSCTCPSGFSGSTCQLDVDECASTPCRNGAKCVDQPDGYECRCAEGFEGTLCDRNVDDCSPDPCHHGRCVDGIASFSCACAPGYTGTRCESQVDECRSQPCRHGGKCLDLVDKYLCRCPSGTTGVNCEVNIDDCASNPCTFGVCRDGINRYDCVCQPGFTGPLCNVEINECASSPCGEGGSCVDGENGFRCLCPPGSLPPLCLPPSHPCAHEPCSHGICYDAPGGFRCVCEPGWSGPRCSQSLARDACESQPCRAGGTCSSDGMGFHCTCPPGVQGRQCELLSPCTPNPCEHGGRCESAPGQLPVCSCPQGWQDPCLNGGSCQDGVGSFSCSCLPGFAGPRCARDVDECLSNPCGPGTCTDHVASFTCTCPPGYGGFHCEQDLPDCSPSSCFNGGTCVDGVNSFSCLCRPGYTGAHCQHEADPCLSRPCLHGGVCSAAHPGFRCTCLESFTGPQCQTLVDWCSRQPCQNGGRCVQTGAYCLCPPGWSGRLCDIRSLPCREAAAQIGVRLEQLCQAGGQCVDEDSSHYCVCPEGRTGSHCEQEVDPCLAQPCQHGGTCRGYMGGYMCECLPGYNGDNCEDDVDECASQPCQHGGSCIDLVARYLCSCPPGTLGVLCEINEDDCGPGPPLDSGPRCLHNGTCVDLVGGFRCTCPPGYTGLRCEADINECRSGACHAAHTRDCLQDPGGGFRCLCHAGFSGPRCQTVLSPCESQPCQHGGQCRPSPGPGGGLTFTCHCAQVGVGGG

SEQ ID NO: 910769 - protein, 887 aa, Homo sapiens
MSPPPPPPPVRALPLLLLLAGPGAAAPPCLDGSPCANGGRCTQLPSREAACLCPPGWVGERCQLEDPCHSGPCAGRGVCQSSVVAGTARFSCRCPRGFRGPDCSLPDPCLSSPCAHGARCSVGPDGRFLCSCPPGYQGRSCRSDVDECRVGEPCRHGGTCLNTPGSFRCQCPAGYTGPLCENPAVPCAPSPCRNGGTCRQSGDLTYDCACLPGFEGQNCEVNVDDCPGHRCLNGGTCVDGVNTYNCQCPPEWTGQFCTEDVDECQLQPNACHNGGTCFNTLGGHSCVCVNGWTGESCSQNIDDCATAVCFHGATCHDRVASFYCACPMGKTGLLCHLDDACVSNPCHEDAICDTNPVNGRAICTCPPGFTGGACDQDVDECSIGANPCEHLGRCVNTQGSFLCQCGRGYTGPRCETDVNECLSGPCRNQATCLDRIGQFTCICMAGFTGTYCEVDIDECQSSPCVNGGVCKDRVNGFSCTCPSGFSGSTCQLDVDECASTPCRNGAKCVDQPDGYECRCAEGFEGTLCDRNVDDCSPDPCHHGRCVDGIASFSCACAPGYTGTRCESQVDECRSQPCRHGGKCLDLVDKYLCRCPSGTTGVNCEVNIDDCASNPCTFGVCRDGINRYDCVCQPGFTGPLCNVEINECASSPCGEGGSCVDGENGFRCLCPPGSLPPLCLPPSHPCAHEPCSHGICYDAPGGFRCVCEPGWSGPRCSQSLARDACESQPCRAGGTCSSDGMGFHCTCPPGVQGRQCELLSPCTPNPCEHGGRCESAPGQLPVCSCPQGWQGPRCQQDVDECAGPAPCGPHGICTNLAGSFSCTCHGGYTGPSCDQDINDCDPSECRGALGGAALGNTVIKLELCAWHCAVISSSQLSYFSRFIYMETE

SEQ ID NO: 910770 - protein, 2255 aa, Homo sapiens; identical to SEQ ID NO: 910766

SEQ ID NO: 910771 - protein, 1126 aa, Homo sapiens
  misc_feature (5)..(5): Xaa can be any naturally occurring amino acid
  misc_feature (36)..(36): Xaa can be any naturally occurring amino acid
CRSGXPATRHTPGTAAGPARFFFPPPGFFWGPPLFXLGSMLASQGPRCQTVLSPCESQPCQHGGQCRPSPGPGGGLTFTCHCAQPFWGPRCERVARSCRELQCPVGVPCQQTPRGPRCACPPGLSGPSCRSFPGSPPGASNASCAAAPCLHGGSCRPAPLAPFFRCACAQGWTGPRCEAPAAAPEVSEEPRCPRAACQAKRGDQRCDRECNSPGCGWDGGDCSLSVGDPWRQCEALQCWRLFNNSRCDPACSSPACLYDNFDCHAGGRERTCNPVYEKYCADHFADGRCDQGCNTEECGWDGLDCASEVPALLARGVLVLTVLLPPEELLRSSADFLQRLSAILRTSLRFRLDAHGQAMVFPYHRPSPGSEPRARRELAPEVIGSVVMLEIDNRLCLQSPENDHCFPDAQSAADYLGALSAVERLDFPYPLRDVRGEPLEPPEPSVPLLPLLVAGAVLLLVILVLGVMVARRKREHSTLWFPEGFSLHKDVASGHKGRREPVGQDALGMKNMAKGESLMGEVATDWMDTECPEAKRLKVEEPGMGAEEAVDCRQWTQHHLVAADIRVAPAMALTPPQGDADADGMDVNVRGPDGFTPLMLASFCGGALEPMPTEEDEADDTSASIISDLICQGAQLGARTDRTGETALHLAARYARADAAKRLLDAGADTNAQDHSGRTPLHTAVTADAQGVFQILIRNRSTDLDARMADGSTALILAARLAVEGMVEELIASHADVNAVDELGKSALHWAAAVNNVEATLALLKNGANKDMQDSKEETPLFLAAREGSYEAAKLLLDHFANREITDHLDRLPRDVAQERLHQDIVRLLDQPSGPRSPPGPHGLGPLLCPPGAFLPGLKAAQSGSKKSRRPPGKAGLGPQGPRGRGKKLTLACPGPLADSSVTLSPVDSLDSPRPFGGPPASPGGFPLEGPYAAATATAVSLAQLGGPGRAGLGRQPPGGCVLSLGLLNPVAVPLDWARLPPPAPPGPSFLLPLAPGPQLLNPGTPVSPQERPPPYLAVPGHGEEYPVAGAHSSPPKARFLRVPSEHPYLTPSPESPEHWASPSPPSLSDWSESTPSPATATGAMATTTGALPAQPLPLSVPSSLAQAQTQLGPQPEVTPKRQVLA

SEQ ID NO: 910772 - protein, 2255 aa, Homo sapiens; identical to SEQ ID NO: 910766

SEQ ID NO: 910773 - protein, 1869 aa, Homo sapiens
MSPPPPPPPVRALPLLLLLAGPGAAAPPCLDGSPCANGGRCTQLPSREAACLCPPGWVGERCQLEDPCHSGPCAGRGVCQSSVVAGTARFSCRCPRGFRGPDCSLPDPCLSSPCAHGARCSVGPDGRFLCSCPPGYQGRSCRSDVDECRVGEPCRHGGTCLNTPGSFRCQCPAGYTGPLCENPAVPCAPSPCRNGGTCRQSGDLTYDCACLPGFEGQNCEVNVDDCPGHRCLNGGTCVDGVNTYNCQCPPEWTGQFCTEDVDECQLQPNACHNGGTCFNTLGGHSCVCVNGWTGESCSQNIDDCATAVCFHGATCHDRVASFYCACPMGKTGLLCHLDDACVSNPCHEDAICDTNPVNGRAICTCPPGFTGGACDQDVDECSIGANPCEHLGRCVNTQGSFLCQCGRGYTGPRCETDVNECLSGPCRNQATCLDRIGQFTCICMAGFTGTYCEVDIDECQSSPCVNGGVCKDRVNGFSCTCPSGFSGSTCQLDVDECASTPCRNGAKCVDQPDGYECRCAEGFEGTLCDRNVDDCSPDPCHHGRCVDGIASFSCACAPGYTGTRCESQVDECRSQPCRHGGKCLDLVDKYLCRCPSGTTGVNCEVNIDDCASNPCTFGVCRDGINRYDCVCQPGFTGPLCNVEINECASSPCGEGGSCVDGENGFRCLCPPGSLPPLCLPPSHPCAHEPCSHGICYDAPGGFRCVCEPGWSGPRCSQSLARDACESQPCRAGGTCSSDGMGFHCTCPPGVQGRQCELLSPCTPNPCEHGGRCESAPGQLPVCSCPQGWQDPCLNGGSCQDGVGSFSCSCLPGFAGPRCARDVDECLSNPCGPGTCTDHVASFTCTCPPGYGGFHCEQDLPDCSPSSCFNGGTCVDGVNSFSCLCRPGYTGAHCQHEADPCLSRPCLHGGVCSAAHPGFRCTCLESFTGPQCQTLVDWCSRQPCQNGGRCVQTGAYCLCPPGWSGRLCDIRSLPCREAAAQIGVRLEQLCQAGGQCVDEDSSHYCVCPEGRTGSHCEQEVDPCLAQPCQHGGTCRGYMGGYMCECLPGYNGDNCEDDVDECASQPCQHGGSCIDLVARYLCSCPPGTLGVLCEINEDDCGPGPPLDSGPRCLHNGTCVDLVGGFRCTCPPGYTGLRCEADINECRSGACHAAHTRDCLQDPGGGFRCLCHAGFSGPRCQTVLSPCESQPCQHGGQCRPSPGPGGGLTFTCHCAQPFWGPRCERVARSCRELQCPVGVPCQQTPRGPRCACPPGLSGPSCRSFPGSPPGASNASCAAAPCLHGGSCRPAPLAPFFRCACAQGWTGPRCEAPAAAPEVSEEPRCPRAACQAKRGDQRCDRECNSPGCGWDGGDCSLSVGDPWRQCEALQCWRLFNNSRCDPACSSPACLYDNFDCHAGGRERTCNPVYEKYCADHFADGRCDQGCNTEECGWDGLDCASEVPALLARGVLVLTVLLPPEELLRSSADFLQRLSAILRTSLRFRLDAHGQAMVFPYHRPSPGSEPRARRELAPEVIGSVVMLEIDNRLCLQSPENDHCFPDAQSAADYLGALSAVERLDFPYPLRDVRGEPLEPPEPSVPLLPLLVAGAVLLLVILVLGVMVARRKREHSTLWFPEGFSLHKDVASGHKGRREPVGQDALGMKNMAKGESLMGEVATDWMDTECPEAKRLKVEEPGMGAEEAVDCRQWTQHHLVAADIRVAPAMALTPPQGDADADGMDVNVRGPDGFTPLMLASFCGGALEPMPTEEDEADDTSASIISDLICQGAQLGARTDRTGETALHLAARYARADAAKRLLDAGADTNAQDHSGRTPLHTAVTADAQGVFQILIRNRSTDLDARMADGSTALILAARLARTSVLARTSDGPHNPYCP

SEQ ID NO: 910774 - protein, 254 aa, Homo sapiens
MVREANIKQATAEKQLKEAQGKIDVLQAEVAALKTLVLSSSPTSPTQEPLPGGKTPFKKGHTRNKSTSSAMSGSHQDLSVIQPIVKDCKEADLSLYNEFRLWKDEPTMDRTCPFLDKIYQEDIFPCLTFSKSELASAVLEAVENNTLSIEPVGLQPIRFVKASAVECGGPKKCALTGQSKSCKHRIKLGDSSNYYYISPFCRYRITSVCNFFTYIRYIQQGLVKQQDVDQMFWEVMQLRKEMSLAKLGYFKEEL

SEQ ID NO: 910775 - protein, 460 aa, Homo sapiens
MANDPLEGFHEVNLASPTSPDLLGVYESGTQEQTTSPSVIYRPHPSALSSVPIQANALDVSELPTQPVYSSPRRLNCAEISSISFHVTDPAPCSTSGVTAGLTKLTTRKDNYNAEREFLQGATITEACDGSDDIFGLSTDSLSRLRSPSVLEVREKGYERLKEELAKAQRELKLKDEECERLSKVRDQLGQELEELTASLFEEAHKMVREANIKQATAEKQLKEAQGKIDVLQAEVAALKTLVLSSSPTSPTQEPLPGGKTPFKKGHTRNKSTSSAMSGSHQDLSVIQPIVKDCKEADLSLYNEFRLWKDEPTMDRTCPFLDKIYQEDIFPCLTFSKSELASAVLEAVENNTLSIEPVGLQPIRFVKASAVECGGPKKCALTGQSKSCKHRIKLGDSSNYYYISPFCRYRITSVCNFFTYIRYIQQGLVKQQDVDQMFWEVMQLRKEMSLAKLGYFKEEL

SEQ ID NO: 910776 - protein, 460 aa, Homo sapiens; identical to SEQ ID NO: 910775

SEQ ID NO: 910777 - protein, 304 aa, Homo sapiens
MANDPLEGFHEVNLASPTSPDLLGVYESGTQEQTTSPSVIYRPHPSALSSVPIQANALDVSELPTQPVYSSPRRLNCAEISSISFHVTDPAPCSTSGVTAGLTKLTTRKDNYNAEREFLQGATITEACDGSDDIFGLSTDSLSRLRSPSVLEVREKGYERLKEELAKAQRELKLKDEECERLSKVRDQLGQELEELTASLFEEAHKMVREANIKQATAEKQLKEAQGKIDVLQAEVAALKTLVLSSSPTSPTQEPLPGGKTPFKKGHTRNKSTSSAMSGSHQDLSVIQPIVKDCKEKMCSHWPE

SEQ ID NO: 910778 - protein, 395 aa, Homo sapiens
MANDPLEGFHEVNLASPTSPDLLGVYESGTQEQTTSPSVIYRPHPSALSSVPIQANALDVSELPTQPVYSSPRRLNCAEISSISFHVTDPAPCSTSGVTAGLTKLTTRKDNYNAEREFLQGATITEACDGSDDIFGLSTDSLSRLRSPSVLEVREKGYERLKEELAKAQRELKLKDEECERLSKVRDQLGQELEELTASLFEEAHKMVREANIKQATAEKQLKEAQGKIDVLQAEVAALKTLVLSSSPTSPTQEPLPGGKTPFKKGHTRNKSTSSAMSGSHQDLSVIQPIVKDCKEADLSLYNEFRLWKDEPTMDRTCPFLDKIYQEDIFPCLTFSKSELASAVLEAVENNTLSIEPVGLQPIRFVKASAVECGGPKSLLYVTFLHTFDTFSRDS

SEQ ID NO: 910779 - protein, 395 aa, Homo sapiens; identical to SEQ ID NO: 910778

SEQ ID NO: 910780 - protein, 320 aa, Homo sapiens
MGLKKMKGLSYDEAFAMANDPLEGFHEVNLASPTSPDLLGVYESGTQEQTTSPSVIYRPHPSALSSVPIQANALDVSELPTQPVYSSPRRLNCAEISSISFHVTDPAPCSTSGVTAGLTKLTTRKDNYNAEREFLQGATITEACDGSDDIFGLSTDSLSRLRSPSVLEVREKGYERLKEELAKAQRELKLKDEECERLSKVRDQLGQELEELTASLFEEAHKMVREANIKQATAEKQLKEAQGKIDVLQAEVAALKTLVLSSSPTSPTQEPLPGGKTPFKKGHTRNKSTSSAMSGSHQDLSVIQPIVKDCKEKMCSHWPE

SEQ ID NO: 910781 - protein, 142 aa, Homo sapiens
GRGRCRCWRRAGRGTRGFGGMPRPGELALRLGTWAPGPWGRRVGGTLATRVSRPPPGLLVGVGRRLLPRARARYTLTARSRAPGAGSPSPAGYLAAGGRGRERRAAVAKRMKREFPNKSEAAHNTGRRAAGLWTWGGFVSQS

SEQ ID NO: 910782 - protein, 167 aa, Homo sapiens
MMLADLSLYNEFRLWKDEPTMDRTCPFLDKIYQEDIFPCLTFSKSELASAVLEAVENNTLSIEPVGLQPIRFVKASAVECGGPKKCALTGQSKSCKHRIKLGDSSNYYYISPFCRYRITSVCNFFTYIRYIQQGLVKQQDVDQMFWEVMQLRKEMSLAKLGYFKEEL

SEQ ID NO: 910783 - protein, 118 aa, Homo sapiens
  misc_feature (1)..(1): Xaa can be any naturally occurring amino acid
  misc_feature (34)..(34): Xaa can be any naturally occurring amino acid
  misc_feature (41)..(41): Xaa can be any naturally occurring amino acid
  misc_feature (46)..(46): Xaa can be any naturally occurring amino acid
  misc_feature (51)..(51): Xaa can be any naturally occurring amino acid
  misc_feature (54)..(55): Xaa can be any naturally occurring amino acid
  misc_feature (57)..(57): Xaa can be any naturally occurring amino acid
  misc_feature (59)..(60): Xaa can be any naturally occurring amino acid
  misc_feature (62)..(62): Xaa can be any naturally occurring amino acid
  misc_feature (69)..(69): Xaa can be any naturally occurring amino acid
  misc_feature (71)..(71): Xaa can be any naturally occurring amino acid
  misc_feature (76)..(77): Xaa can be any naturally occurring amino acid
  misc_feature (79)..(81): Xaa can be any naturally occurring amino acid
  misc_feature (83)..(83): Xaa can be any naturally occurring amino acid
  misc_feature (85)..(90): Xaa can be any naturally occurring amino acid
XTTKNQKGSEGNRNDSKATKGEAKRRKKKRTTTXANRQTKXGKTPXNKENXNNXXHXNXXPXNAQKQKXKXSKTPXXIXXXAXNXXXXXXKAHNGQDVSFLRQNLPGRYLSMFNILKK

SEQ ID NO: 910784 - protein, 254 aa, Homo sapiens; identical to SEQ ID NO: 910774

SEQ ID NO: 910785 - protein, 460 aa, Homo sapiens; identical to SEQ ID NO: 910775

SEQ ID NO: 910786 - protein, 323 aa, Homo sapiens
MANDPLEGFHEVNLASPTSPDLLGVYESGTQEQTTSPSVIYRPHPSALSSVPIQANALDVSELPTQPVYSSPRRLNCAEISSISFHVTDPAPCSTSGVTAGLTKLTTRKDNYNAEREFLQGATITEACDGSDDIFGLSTDSLSRLRSPSVLEVREKGYERLKEELAKAQRELKLKDEECERLSKVRDQLGQELEELTASLFEEAHKMVREANIKQATAEKQLKEAQGKIDVLQAEVAALKTLVLSSSPTSPTQEPLPGGKTPFKKGHTRNKSTSSAMSGSHQDLSVIQPIVKDCKEAHNGQDVSFLRQNLPGRYLSMFNILKK

SEQ ID NO: 910787 - protein, 476 aa, Homo sapiens
MGLKKMKGLSYDEAFAMANDPLEGFHEVNLASPTSPDLLGVYESGTQEQTTSPSVIYRPHPSALSSVPIQANALDVSELPTQPVYSSPRRLNCAEISSISFHVTDPAPCSTSGVTAGLTKLTTRKDNYNAEREFLQGATITEACDGSDDIFGLSTDSLSRLRSPSVLEVREKGYERLKEELAKAQRELKLKDEECERLSKVRDQLGQELEELTASLFEEAHKMVREANIKQATAEKQLKEAQGKIDVLQAEVAALKTLVLSSSPTSPTQEPLPGGKTPFKKGHTRNKSTSSAMSGSHQDLSVIQPIVKDCKEADLSLYNEFRLWKDEPTMDRTCPFLDKIYQEDIFPCLTFSKSELASAVLEAVENNTLSIEPVGLQPIRFVKASAVECGGPKKCALTGQSKSCKHRIKLGDSSNYYYISPFCRYRITSVCNFFTYIRYIQQGLVKQQDVDQMFWEVMQLRKEMSLAKLGYFKEEL

SEQ ID NO: 910788 - protein, 411 aa, Homo sapiens
MGLKKMKGLSYDEAFAMANDPLEGFHEVNLASPTSPDLLGVYESGTQEQTTSPSVIYRPHPSALSSVPIQANALDVSELPTQPVYSSPRRLNCAEISSISFHVTDPAPCSTSGVTAGLTKLTTRKDNYNAEREFLQGATITEACDGSDDIFGLSTDSLSRLRSPSVLEVREKGYERLKEELAKAQRELKLKDEECERLSKVRDQLGQELEELTASLFEEAHKMVREANIKQATAEKQLKEAQGKIDVLQAEVAALKTLVLSSSPTSPTQEPLPGGKTPFKKGHTRNKSTSSAMSGSHQDLSVIQPIVKDCKEADLSLYNEFRLWKDEPTMDRTCPFLDKIYQEDIFPCLTFSKSELASAVLEAVENNTLSIEPVGLQPIRFVKASAVECGGPKSLLYVTFLHTFDTFSRDS

SEQ ID NO: 910789 - protein, 142 aa, Homo sapiens; identical to SEQ ID NO: 910781

SEQ ID NO: 910790 - protein, 313 aa, Homo sapiens
MANDPLEGFHEVNLASPTSPDLLGVYESGTQEQTTSPSVIYRPHPSALSSVPIQANALDVSELPTQPVYSSPRRLNCAEISSISFHVTDPAPCSTSGVTAGLTKLTTRKDNYNAEREFLQGATITEACDGSDDIFGLSTDSLSRLRSPSVLEVREKGYERLKEELAKAQRELKLKDEECERLSKVRDQLGQELEELTASLFEEAHKMVREANIKQATAEKQLKEAQGKIDVLQAEVAALKTLVLSSSPTSPTQEPLPGGKTPFKKGHTRNKSTSSAMSGSHQDLSVIQPIVKDCKEVTHQGLSPLTLLILVSS

SEQ ID NO: 910791 - protein, 162 aa, Homo sapiens
MPTDSQDSLFASRTLFKSRRLQDSFASETNLDFRSGLAIVSQHDLDQLQADAINAFGESLQKKLLDIEGLYSKVRSRYSFIQALVRRIRGLYDLEATEDHFVRLANALPLFFYQMQIRLLVFQELFVIEQQVPFAVQDVLDAGLGDDGIVTLEPLVYVLPDK

SEQ ID NO: 910792 - protein, 160 aa, Homo sapiens
MRRVAHHGGPRAVVKNFRTKMFHLRTCAAKLRPLTASQTVKTFSQNRPAAARTFQQIRCYSAPVAAEPFLSGTSSNYVEEMYCAWLENPKSVHKKVRLAGLWVCLMLVCWPVPDWSPGKCVRPEESAGRQAAGAPYQPPYLYRTQHSPSRSHGPWIGVQQ

SEQ ID NO: 910793 - protein, 93 aa, Homo sapiens
DSRGTPRCLRAHAFGKSPEIAASLWQSLEYTQILQTVRIPSQRQAIGIEVELNEIESRCEEYPLTRAFCQLISTLVESSFPSNLGAGLAAPWL

SEQ ID NO: 910794 - protein, 149 aa, Homo sapiens
LSVGDLAGSWDHSGGKVSRKELEQIFCQFDSKLEAADEGSGDVKYHLGMYHRRINRVTDRNITLSLVANPPPRESVDALSVGGLPPLTGFLPQWAIIEEFTKNHSLIIPTIIATITLLNLYFYLRLIYSTSIHYLPTRESVGILKITQH

SEQ ID NO: 910795 - protein, 1061 aa, Homo sapiens
TPYAGAGPRVWSPGVGCRRLIRVELSRRQAVVKNFRTKMFHLRTCAAKLRPLTASQTVKTFSQNRPAAARTFQQIRCYSAPVAAEPFLSGTSSNYVEEMYCAWLENPKSVHKSWDIFFRNTNAGAPPGTAYQSPLPLSRGSLAAVAHAQSLVEAQPNVDKLVEDHLAVQSLIRAYQIRGHHVAQLDPLGILDADLDSSVPADIISSTDKLGFYGLDESDLDKVFHLPTTTFIGGQESALPLREIIRRLEMAYCQHIGVEFMFINDLEQCQWIRQKFETPGIMQFTNEEKRTLLARLVRSTRFEEFLQRKWSSEKRFGLEGCEVLIPALKTIIDKSSENGVDYVIMGMPHRGRLNVLANVIRKELEQIFCQFDSKLEAADEGSGDVKYHLGMYHRRINRVTDRNITLSLVANPSHLEAADPVVMGKTKAEQFYCGDTEGKKVMSILLHGDAAFAGQGIVYETFHLSDLPSYTTHGTVHVVVNNQIGFTTDPRMARSSPYPTDVARVVNAPIFHVNSDDPEAVMYVCKVAAEWRSTFHKDVVVDLVCYRRNGHNEMDEPMFTQPLMYKQIRKQKPVLQKYAELLVSQGVVNQPEYEEEISKYDKICEEAFARSKDEKILHIKHWLDSPWPGFFTLDGQPRSMSCPSTGLTEDILTHIGNVASSVPVENFTIHGGLSRILKTRGEMVKNRTVDWALAEYMAFGSLLKEGIHIRLSGQDVERGTFSHRHHVLHDQNVDKRTCIPMNHLWPNQAPYTVCNSSLSEYGVLGFELGFAMASPNALVLWEAQFGDFHNTAQCIIDQFICPGQAKWVRQNGIVLLLPHGMEGMGPEHSSARPERFLQMCNDDPDVLPDLKEANFDINQLYDCNWVVVNCSTPGNFFHVLRRQILLPFRKPLIIFTPKSLLRHPEARSSFDEMLPGTHFQRVIPEDGPAAQNPENVKRLLFCTGKVYYDLTRERKARDMVGQVAITRIEQLSPFPFDLLLKEVQKYPNAELAWCQEEHKNQGYYDYVKPRLRTTISRAKPVWYAGRDPAAAPATGNKKTHLTELQRLLDTAFDLDVFKNFS

SEQ ID NO: 910796 - protein, 2170 aa, Homo sapiens
MDLLRESQLALIVCPLEQLLQGINPRTKKADNVVNIARYLYHGNTNPELAFESAKILCCISCNSNIQIKLVGDFTHDQSISQKLMAGFVECLDCEDAEEFVRLEEGSELEKKLVAIRHETRIHILNLLITSLECNPPNLALYLLGFELKKPVSTTNLQDPGVLGCPRTCLHAILNILEKGTEGRTGPVAVRESPQLAELCYQVIYQLCACSDTSGPTMRYLRTSQDFLFSQLQYLPFSNKEYEISMLNQMSWLMKTASIELRVTSLNRQRSHTQRLLHLLLDDMPVKPYSDGEGGIEDENRSVSGFLHFDTATKVRRKILNILDSIDFSQEIPEPLQLDFFDRAQIEQVIANCEHKNLRGQTVCNVKLLHRVLVAEVNALQGMAAIGQRPLLMEEISTVLQYVVGRNKLLQCLHAKRHALESWRQLVEIILTACPQDLIQAEDRQLIIRDILQDVHDKILDDEAAQELMPVVAGAVFTLTAHLSQAVLTEQKQTSVLGPAEAHYAFMLDSCFTSPPPEENPLVGFASIGDSSLYIILKKLLDFILKTGGGFQRVRTHLYGSLLYYLQIAQRPDEPDTLEAAKKTMWERLTAPEDVFSKLQRENIAIIESYGAALMEVVCRDACDGHEIGRMLALALLDRIVSVDKQQQWLLYLSNSGYLKVLVDSLVEDDRTLQSLLTPQPPLLKALYTYESKMAFLTRVAKIQQGALELLRSGVIVRLAQCQVYDMRPETDPQSMFGMRDPPMFIPTPVDRYRQILLPALQLCQVILTSSMAQHLQAAGQVLQFLISHSDTIQAILRCQDVSAGSLQELALLTGIISKAALPGILSELDVDVNEGSLMELQGHIGRFQRQCLGLLSRFGGSDRLRQFKFQDDNVEGDKVSKKDEIELAMQQICANVMEYCQSLMLQSSPTFQHAVCLFTPSLSETVNRDGPRQDTQAPVVPYWRLPGLGIIIYLLKQSANDFFSYYDSHRQSVSKLQNVEQLPPDEIKELCQSVMPAGVDKISTAQKYVLARRRLVKVINNRAKLLSLCSFIIETCLFILWRHLEYYLLHCMPTDSQDSLFASRTLFKSRRLQDSFASETNLDFRSGLAIVSQHDLDQLQADAINAFGESLQKKLLDIEGLYSKVRSRYSFIQALVRRIRGLYELEATDKYKDCLVGLRFHHSQTVKTFSQNRPAAARTFQQIRCYSAPVAAEPFLSGTSSNYVEEMYCAWLENPKSVHKSWDIFFRNTNAGAPPGTAYQSPLPLSRGSLAAVAHAQSLVEAQPNVDKLVEDHLAVQSLIRAYQIRGHHVAQLDPLGILDADLDSSVPADIISSTDKLGFYGLDESDLDKVFHLPTTTFIGGQESALPLREIIRRLEMAYCQHIGVEFMFINDLEQCQWIRQKFETPGIMQFTNEEKRTLLARLVRSTRFEEFLQRKWSSEKRFGLEGCEVLIPALKTIIDKSSENGVDYVIMGMPHRGRLNVLANVIRKELEQIFCQFDSKLEAADEGSGDVKYHLGMYHRRINRVTDRNITLSLVANPSHLEAADPVVMGKTKAEQFYCGDTEGKKVMSILLHGDAAFAGQGIVYETFHLSDLPSYTTHGTVHVVVNNQIGFTTDPRMARSSPYPTDVARVVNAPIFHVNSDDPEAVMYVCKVAAEWRSTFHKDVVVDLVCYRRNGHNEMDEPMFTQPLMYKQIRKQKPVLQKYAELLVSQGVVNQPEYEEEISKYDKICEEAFARSKDEKILHIKHWLDSPWPGFFTLDGQPRSMSCPSTGLTEDILTHIGNVASSVPVENFTIHGGLSRILKTRGEMVKNRTVDWALAEYMAFGSLLKEGIHIRLSGQDVERGTFSHRHHVLHDQNVDKRTCIPMNHLWPNQAPYTVCNSSLSEYGVLGFELGFAMASPNALVLWEAQFGDFHNTAQCIIDQFICPGQAKWVRQNGIVLLLPHGMEGMGPEHSSARPERFLQMCNDDPDVLPDLKEANFDINQLYDCNWVVVNCSTPGNFFHVLRRQILLPFRKPLIIFTPKSLLRHPEARSSFDEMLPGTHFQRVIPEDGPAAQNPENVKRLLFCTGKVYYDLTRERKARDMVGQVAITRIEQLSPFPFDLLLKEVQKYPNAELAWCQEEHKNQGYYDYVKPRLRTTISRAKPVWYAGRDPAAAPATGNKKTHLTELQRLLDTAFDLDVFKNFS

SEQ ID NO: 910797 - protein, 1788 aa, Homo sapiens
ESSSVPTSYKREEISTVLQYVVGRNKLLQCLHAKRHALESWRQLVEIILTACPQDLIQAEDRQLIIRDILQDVHDKILDDEAAQELMPVVAGAVFTLTAHLSQAVLTEQKQTSVLGPAEAHYAFMLDSCFTSPPPEENPLVGFASIGDSSLYIILKKLLDFILKTGGGFQRVRTHLYGSLLYYLQIAQRPDEPDTLEAAKKTMWERLTAPEDVFSKLQRENIAIIESYGAALMEVVCRDACDGHEIGRMLALALLDRIVSVDKQQQWLLYLSNSGYLKVLVDSLVEDDRTLQSLLTPQPPLLKALYTYESKMAFLTRVAKIQQGALELLRSGVIVRLAQCQVYDMRPETDPQSMFGMRDPPMFIPTPVDRYRQILLPALQLCQVILTSSMAQHLQAAGQVLQFLISHSDTIQAILRCQDVSAGSLQELALLTGIISKAALPGILSELDVDVNEGSLMELQGHIGRFQRQCLGLLSRFGGSDRLRQFKFQDDNVEGDKVSKKDEIELAMQQICANVMEYCQSLMLQSSPTFQHAVCLFTPSLSETVNRDGPRQDTQAPVVPYWRLPGLGIIIYLLKQSANDFFSYYDSHRQSVSKLQNVEQLPPDEIKELCQSVMPAGVDKISTAQKYVLARRRLVKVINNRAKLLSLCSFIIETCLFILWRHLEYYLLHCMPTDSQDSLFASRTLFKSRRLQDSFASETNLDFRSGLAIVSQHDLDQLQADAINAFGESLQKKLLDIEGLYSKVRSRYSFIQALVRRIRGLYNSEATDKYKDCLVGLRFHHSQTVKTFSQNRPAAARTFQQIRCYSAPVAAEPFLSGTSSNYVEEMYCAWLENPKSVHKSWDIFFRNTNAGAPPGTAYQSPLPLSRGSLAAVAHAQSLVEAQPNVDKLVEDHLAVQSLIRAYQIRGHHVAQLDPLGILDADLDSSVPADIISSTDKLGFYGLDESDLDKVFHLPTTTFIGGQESALPLREIIRRLEMAYCQHIGVEFMFINDLEQCQWIRQKFETPGIMQFTNEEKRTLLARLVRSTRFEEFLQRKWSSEKRFGLEGCEVLIPALKTIIDKSSENGVDYVIMGMPHRGRLNVLANVIRKELEQIFCQFDSKLEAADEGSGDVKYHLGMYHRRINRVTDRNITLSLVANPSHLEAADPVVMGKTKAEQFYCGDTEGKKVMSILLHGDAAFAGQGIVYETFHLSDLPSYTTHGTVHVVVNNQIGFTTDPRMARSSPYPTDVARVVNAPIFHVNSDDPEAVMYVCKVAAEWRSTFHKDVVVDLVCYRRNGHNEMDEPMFTQPLMYKQIRKQKPVLQKYAELLVSQGVVNQPEYEEEISKYDKICEEAFARSKDEKILHIKHWLDSPWPGFFTLDGQPRSMSCPSTGLTEDILTHIGNVASSVPVENFTIHGGLSRILKTRGEMVKNRTVDWALAEYMAFGSLLKEGIHIRLSGQDVERGTFSHRHHVLHDQNVDKRTCIPMNHLWPNQAPYTVCNSSLSEYGVLGFELGFAMASPNALVLWEAQFGDFHNTAQCIIDQFICPGQAKWVRQNGIVLLLPHGMEGMGPEHSSARPERFLQMCNDDPDVLPDLKEANFDINQLYDCNWVVVNCSTPGNFFHVLRRQILLPFRKPLIIFTPKSLLRHPEARSSFDEMLPGTHFQRVIPEDGPAAQNPENVKRLLFCTGKVYYDLTRERKARDMVGQVAITRIEQLSPFPFDLLLKEVQKYPNAELAWCQEEHKNQGYYDYVKPRLRTTISRAKPVWYAGRDPAAAPATGNKKTHLTELQRLLDTAFDLDVFKNFS

SEQ ID NO: 910798 - protein, 2522 aa, Homo sapiens
MATPLAVNSAASLWGPYKDIWHKVGNALWRRQPEAVHLLDKILKKHKPDFISLFKNPPKNVQQHEKVQKASTEGVAIQGQQGTRLLPEQLIKEAFILSDLFDIGELAAVELLLAGEHQQPHFPGLTRGLVAVLLYWDGKRCIANSLKALIQSRRGKTWTLELSPELASMTTRFTDELMEQGLTYKVLTLVSQIDVNNEFEKLQRERGLGSEKHRKEVSDLIKECRQSLAESLFAWACQSPLGKEDTLLLIGHLERVTVEANGSLDAVNLALLMALLYCFDISFIEQSTEERDDMIHQLPLLTEKQYIATIHSRLQDSQLWKLPGLQATVRLAWALALRGISQLPDVTALAEFTEADEAMAELAIADNVFLFLMESVVVSEYFYQEEFYIRRVHNLITDFLALMPMKVKQLRNRADEDARMIHMSMQMGNEPPISLRRDLEHLMLLIGELYKKNPFHLELALEYWCPTEPLQTPTIMGSYLGVAHQRPPQRQVVLSKFVRQMGDLLPPTIYIPYLKMLQGLANGPQCAHYCFSLLKVNGSSHVENIQGAGGSPVSWEHFFHSLMLYHEHLRKDLPSADSVQYRHLPSRGITQKEQDGLIAFLQLTSTIITWSENARLALCEHPQWTPVVVILGLLQCSIPPVLKAELLKTLAAFGKSPEIAASLWQSLEYTQILQTVRIPSQRQAIGIEVELNEIESRCEEYPLTRAFCQLISTLVESSFPSNLGAGLRPPGFDPYLQFLRDSVFLRFRTRAYRRAAEKWEVAEVVLEVFYKLLRDYEPQLEDFVDQFVELQGEEIIAYKPPGFSLMYHLLNESPMLELALSLLEEGVKQLDTYAPFPGKKHLEKAVQHCLALLNLTLQKENLFMDLLRESQLALIVCPLEQLLQGINPRTKKADNVVNIARYLYHGNTNPELAFESAKILCCISCNSNIQIKLVGDFTHDQSISQKLMAGFVECLDCEDAEEFVRLEEGSELEKKLVAIRHETRIHILNLLITSLECNPPNLALYLLGFELKKPVSTTNLQDPGVLGCPRTCLHAILNILEKGTEGRTGPVAVRESPQLAELCYQVIYQLCACSDTSGPTMRYLRTSQDFLFSQLQYLPFSNKEYEISMLNQMSWLMKTASIELRVTSLNRQRSHTQRLLHLLLDDMPVKPYSDGEGGIEDENRSVSGFLHFDTATKVRRKILNILDSIDFSQEIPEPLQLDFFDRAQIEQVIANCEHKNLRGQTVCNVKLLHRVLVAEVNALQGMAAIGQRPLLMEEISTVLQYVVGRNKLLQCLHAKRHALESWRQLVEIILTACPQDLIQAEDRQLIIRDILQDVHDKILDDEAAQELMPVVAGAVFTLTAHLSQAVLTEQKQTSVLGPAEAHYAFMLDSCFTSPPPEENPLVGFASIGDSSLYIILKKLLDFILKTGGGFQRVRTHLYGSLLYYLQIAQRPDEPDTLEAAKKTMWERLTAPEDVFSKLQRENIAIIESYGAALMEVVCRDACDGHEIGRMLALALLDRIVSVDKQQQWLLYLSNSGYLKVLVDSLVEDDRTLQSLLTPQPPLLKALYTYESKMAFLTRVAKIQQGALELLRSGVIVRLAQCQVYDMRPETDPQSMFGMRDPPMFIPTPVDRYRQILLPALQLCQVILTSSMAQHLQAAGQVLQFLISHSDTIQAILRCQDVSAGSLQELALLTGIISKAALPGILSELDVDVNEGSLMELQGHIGRFQRQCLGLLSRFGGSDRLRQFKFQDDNVEGDKVSKKDEIELAMQQICANVMEYCQSLMLQSSPTFQHAVCLFTPSLSETVNRDGPRQDTQAPVVPYWRLPGLGIIIYLLKQSANDFFSYYDSHRQSVSKLQNVEQLPPDEIKELCQSVMPAGVDKISTAQKYVLARRRLVKVINNRAKLLSLCSFIIETCLFILWRHLEYYLLHCMPTDSQDSLFASRTLFKSRRLQDSFASETNLDFRSGLAIVSQHDLDQLQADAINAFGESLQKKLLDIEGLYSKVRSRYSFIQALVRRIRGLYELEATDKYKDCLVGLRFHHSQTVKTFSQNRPAAARTFQQIRCYSAPVAAEPFLSGTSSNYVEEMYCAWLENPKSVHKSWDIFFRNTNAGAPPGTAYQSPLPLSRGSLAAVAHAQSLVEAQPNVDKLVEDHLAVQSLIRAYQIRGHHVAQLDPLGILDADLDSSVPADIISSTDKLGFYGLDESDLDKVFHLPTTTFIGGQESALPLREIIRRLEMAYCQHIGVEFMFINDLEQCQWIRQKFETPGIMQFTNEEKRTLLARLVRSTRFEEFLQRKWSSEKRFGLEGCEVLIPALKTIIDKSSENGVDYVIMGMPHRGRLNVLANVIRKELEQIFCQFDSKLEAADEGSGDVKYHLGMYHRRINRVTDRNITLSLVANPSHLEAADPVVMGKTKAEQFYCGDTEGKKVMSILLHGDAAFAGQGIVYETFHLSDLPSYTTHGTVHVVVNNQIGFTTDPRMARSSPYPTDVARVVNAPIFHVNSDDPEAVMYVCKVAAEWRSTFHKDVVVDLPPPPCAP

SEQ ID NO: 910799 - protein, 1067 aa, Homo sapiens
MQSTLLENHYKRNFWTLKDYIQKFDLDIVSYRLLSDVSVASKLEATDKYKDCLVGLRFHHSQTVKTFSQNRPAAARTFQQIRCYSAPVAAEPFLSGTSSNYVEEMYCAWLENPKSVHKSWDIFFRNTNAGAPPGTAYQSPLPLSRGSLAAVAHAQSLVEAQPNVDKLVEDHLAVQSLIRAYQIRGHHVAQLDPLGILDADLDSSVPADIISSTDKLGFYGLDESDLDKVFHLPTTTFIGGQESALPLREIIRRLEMAYCQHIGVEFMFINDLEQCQWIRQKFETPGIMQFTNEEKRTLLARLVRSTRFEEFLQRKWSSEKRFGLEGCEVLIPALKTIIDKSSENGVDYVIMGMPHRGRLNVLANVIRKELEQIFCQFDSKLEAADEGSGDVKYHLGMYHRRINRVTDRNITLSLVANPSHLEAADPVVMGKTKAEQFYCGDTEGKKVMSILLHGDAAFAGQGIVYETFHLSDLPSYTTHGTVHVVVNNQIGFTTDPRMARSSPYPTDVARVVNAPIFHVNSDDPEAVMYVCKVAAEWRSTFHKDVVVDLVCYRRNGHNEMDEPMFTQPLMYKQIRKQKPVLQKYAELLVSQGVVNQPEYEEEISKYDKICEEAFARSKDEKILHIKHWLDSPWPGFFTLDGQPRSMSCPSTGLTEDILTHIGNVASSVPVENFTIHGGLSRILKTRGEMVKNRTVDWALAEYMAFGSLLKEGIHIRLSGQDVERGTFSHRHHVLHDQNVDKRTCIPMNHLWPNQAPYTVCNSSLSEYGVLGFELGFAMASPNALVLWEAQFGDFHNTAQCIIDQFICPGQAKWVRQNGIVLLLPHGMEGMGPEHSSARPERFLQMCNDDPDVLPDLKEANFDINQLYDCNWVVVNCSTPGNFFHVLRRQILLPFRKPLIIFTPKSLLRHPEARSSFDEMLPGTHFQRVIPEDGPAAQNPENVKRLLFCTGKVYYDLTRERKARDMVGQVAITRIEQLSPFPFDLLLKEVQKYPNAELAWCQEEHKNQGYYDYVKPRLRTTISRAKPVWYAGRDPAAAPATGNKKTHLTELQRLLDTAFDLDVFKNFS

SEQ ID NO: 910800 - protein, 1023 aa, Homo sapiens
MFHLRTCAAKLRPLTASQTVKTFSQNRPAAARTFQQIRCYSAPVAAEPFLSGTSSNYVEEMYCAWLENPKSVHKSWDIFFRNTNAGAPPGTAYQSPLPLSRGSLAAVAHAQSLVEAQPNVDKLVEDHLAVQSLIRAYQIRGHHVAQLDPLGILDADLDSSVPADIISSTDKLGFYGLDESDLDKVFHLPTTTFIGGQESALPLREIIRRLEMAYCQHIGVEFMFINDLEQCQWIRQKFETPGIMQFTNEEKRTLLARLVRSTRFEEFLQRKWSSEKRFGLEGCEVLIPALKTIIDKSSENGVDYVIMGMPHRGRLNVLANVIRKELEQIFCQFDSKLEAADEGSGDVKYHLGMYHRRINRVTDRNITLSLVANPSHLEAADPVVMGKTKAEQFYCGDTEGKKVMSILLHGDAAFAGQGIVYETFHLSDLPSYTTHGTVHVVVNNQIGFTTDPRMARSSPYPTDVARVVNAPIFHVNSDDPEAVMYVCKVAAEWRSTFHKDVVVDLVCYRRNGHNEMDEPMFTQPLMYKQIRKQKPVLQKYAELLVSQGVVNQPEYEEEISKYDKICEEAFARSKDEKILHIKHWLDSPWPGFFTLDGQPRSMSCPSTGLTEDILTHIGNVASSVPVENFTIHGGLSRILKTRGEMVKNRTVDWALAEYMAFGSLLKEGIHIRLSGQDVERGTFSHRHHVLHDQNVDKRTCIPMNHLWPNQAPYTVCNSSLSEYGVLGFELGFAMASPNALVLWEAQFGDFHNTAQCIIDQFICPGQAKWVRQNGIVLLLPHGMEGMGPEHSSARPERFLQMCNDDPDVLPDLKEANFDINQLYDCNWVVVNCSTPGNFFHVLRRQILLPFRKPLIIFTPKSLLRHPEARSSFDEMLPGTHFQRVIPEDGPAAQNPENVKRLLFCTGKVYYDLTRERKARDMVGQVAITRIEQLSPFPFDLLLKEVQKYPNAELAWCQEEHKNQGYYDYVKPRLRTTISRAKPVWYAGRDPAAAPATGNKKTHLTELQRLLDTAFDLDVFKNFS

SEQ ID NO: 910801 - protein, 1057 aa, Homo sapiens
TPYAGAGPRVWSPGVGCRRLIRVELSRRQAVVKNFRTKMFHLRTCAAKLRPLTASQTVKTFSQNRPAAARTFQQIRCYSAPVAAEPFLSGTSSNYVEEMYCAWLENPKSVHKSWDIFFRNTNAGAPPGTAYQSPLPLSRGSLAAVAHAQSLVEAQPNVDKLVEDHLAVQSLIRAYQVRGHHIAKLDPLGISCVNFDDAPVTVSSNVGFYGLDESDLDKVFHLPTTTFIGGQESALPLREIIRRLEMAYCQHIGVEFMFINDLEQCQWIRQKFETPGIMQFTNEEKRTLLARLVRSTRFEEFLQRKWSSEKRFGLEGCEVLIPALKTIIDKSSENGVDYVIMGMPHRGRLNVLANVIRKELEQIFCQFDSKLEAADEGSGDVKYHLGMYHRRINRVTDRNITLSLVANPSHLEAADPVVMGKTKAEQFYCGDTEGKKVMSILLHGDAAFAGQGIVYETFHLSDLPSYTTHGTVHVVVNNQIGFTTDPRMARSSPYPTDVARVVNAPIFHVNSDDPEAVMYVCKVAAEWRSTFHKDVVVDLVCYRRNGHNEMDEPMFTQPLMYKQIRKQKPVLQKYAELLVSQGVVNQPEYEEEISKYDKICEEAFARSKDEKILHIKHWLDSPWPGFFTLDGQPRSMSCPSTGLTEDILTHIGNVASSVPVENFTIHGGLSRILKTRGEMVKNRTVDWALAEYMAFGSLLKEGIHIRLSGQDVERGTFSHRHHVLHDQNVDKRTCIPMNHLWPNQAPYTVCNSSLSEYGVLGFELGFAMASPNALVLWEAQFGDFHNTAQCIIDQFICPGQAKWVRQNGIVLLLPHGMEGMGPEHSSARPERFLQMCNDDPDVLPDLKEANFDINQLYDCNWVVVNCSTPGNFFHVLRRQILLPFRKPLIIFTPKSLLRHPEARSSFDEMLPGTHFQRVIPEDGPAAQNPENVKRLLFCTGKVYYDLTRERKARDMVGQVAITRIEQLSPFPFDLLLKEVQKYPNAELAWCQEEHKNQGYYDYVKPRLRTTISRAKPVWYAGRDPAAAPATGNKKTHLTELQRLLDTAFDLDVFKNFS

SEQ ID NO: 910802 - protein, 3033 aa, Homo sapiens
MATPLAVNSAASLWGPYKDIWHKVGNALWRRQPEAVHLLDKILKKHKPDFISLFKNPPKNVQQHEKVQKASTEGVAIQGQQGTRLLPEQLIKEAFILSDLFDIGELAAVELLLAGEHQQPHFPGLTRGLVAVLLYWDGKRCIANSLKALIQSRRGKTWTLELSPELASMTTRFTDELMEQGLTYKVLTLVSQIDVNNEFEKLQRERGLGSEKHRKEVSDLIKECRQSLAESLFAWACQSPLGKEDTLLLIGHLERVTVEANGSLDAVNLALLMALLYCFDISFIEQSTEERDDMIHQLPLLTEKQYIATIHSRLQDSQLWKLPGLQATVRLAWALALRGISQLPDVTALAEFTEADEAMAELAIADNVFLFLMESVVVSEYFYQEEFYIRRVHNLITDFLALMPMKVKQLRNRADEDARMIHMSMQMGNEPPISLRRDLEHLMLLIGELYKKNPFHLELALEYWCPTEPLQTPTIMGSYLGVAHQRPPQRQVVLSKFVRQMGDLLPPTIYIPYLKMLQGLANGPQCAHYCFSLLKVNGSSHVENIQGAGGSPVSWEHFFHSLMLYHEHLRKDLPSADSVQYRHLPSRGITQKEQDGLIAFLQLTSTIITWSENARLALCEHPQWTPVVVILGLLQCSIPPVLKAELLKTLAAFGKSPEIAASLWQSLEYTQILQTVRIPSQRQAIGIEVELNEIESRCEEYPLTRAFCQLISTLVESSFPSNLGAGLRPPGFDPYLQFLRDSVFLRFRTRAYRRAAEKWEVAEVVLEVFYKLLRDYEPQLEDFVDQFVELQGEEIIAYKPPGFSLMYHLLNESPMLELALSLLEEGVKQLDTYAPFPGKKHLEKAVQHCLALLNLTLQKENLFMDLLRESQLALIVCPLEQLLQGINPRTKKADNVVNIARYLYHGNTNPELAFESAKILCCISCNSNIQIKLVGDFTHDQSISQKLMAGFVECLDCEDAEEFVRLEEGSELEKKLVAIRHETRIHILNLLITSLECNPPNLALYLLGFELKKPVSTTNLQDPGVLGCPRTCLHAILNILEKGTEGRTGPVAVRESPQLAELCYQVIYQLCACSDTSGPTMRYLRTSQDFLFSQLQYLPFSNKEYEISMLNQMSWLMKTASIELRVTSLNRQRSHTQRLLHLLLDDMPVKPYSDGEGGIEDENRSVSGFLHFDTATKVRRKILNILDSIDFSQEIPEPLQLDFFDRAQIEQVIANCEHKNLRGQTVCNVKLLHRVLVAEVNALQGMAAIGQRPLLMEEISTVLQYVVGRNKLLQCLHAKRHALESWRQLVEIILTACPQDLIQAEDRQLIIRDILQDVHDKILDDEAAQELMPVVAGAVFTLTAHLSQAVLTEQKQTSVLGPAEAHYAFMLDSCFTSPPPEENPLVGFASIGDSSLYIILKKLLDFILKTGGGFQRVRTHLYGSLLYYLQIAQRPDEPDTLEAAKKTMWERLTAPEDVFSKLQRENIAIIESYGAALMEVVCRDACDGHEIGRMLALALLDRIVSVDKQQQWLLYLSNSGYLKVLVDSLVEDDRTLQSLLTPQPPLLKALYTYESKMAFLTRVAKIQQGALELLRSGVIVRLAQCQVYDMRPETDPQSMFGMRDPPMFIPTPVDRYRQILLPALQLCQVILTSSMAQHLQAAGQVLQFLISHSDTIQAILRCQDVSAGSLQELALLTGIISKAALPGILSELDVDVNEGSLMELQGHIGRFQRQCLGLLSRFGGSDRLRQFKFQDDNVEGDKVSKKDEIELAMQQICANVMEYCQSLMLQSSPTFQHAVCLFTPSLSETVNRDGPRQDTQAPVVPYWRLPGLGIIIYLLKQSANDFFSYYDSHRQSVSKLQNVEQLPPDEIKELCQSVMPAGVDKISTAQKYVLARRRLVKVINNRAKLLSLCSFIIETCLFILWRHLEYYLLHCMPTDSQDSLFASRTLFKSRRLQDSFASETNLDFRSGLAIVSQHDLDQLQADAINAFGESLQKKLLDIEGLYSKVRSRYSFIQALVRRIRGLYELEATDKYKDCLVGLRFHHSQTVKTFSQNRPAAARTFQQIRCYSAPVAAEPFLSGTSSNYVEEMYCAWLENPKSVHKSWDIFFRNTNAGAPPGTAYQSPLPLSRGSLAAVAHAQSLVEAQPNVDKLVEDHLAVQSLIRAYQIRGHHVAQLDPLGILDADLDSSVPADIISSTDKLGFYGLDESDLDKVFHLPTTTFIGGQESALPLREIIRRLEMAYCQHIGVEFMFINDLEQCQWIRQKFETPGIMQFTNEEKRTLLARLVRSTRFEEFLQRKWSSEKRFGLEGCEVLIPALKTIIDKSSENGVDYVIMGMPHRGRLNVLANVIRKELEQIFCQFDSKLEAADEGSGDVKYHLGMYHRRINRVTDRNITLSLVANPSHLEAADPVVMGKTKAEQFYCGDTEGKKVMSILLHGDAAFAGQGIVYETFHLSDLPSYTTHGTVHVVVNNQIGFTTDPRMARSSPYPTDVARVVNAPIFHVNSDDPEAVMYVCKVAAEWRSTFHKDVVVDLVCYRRNGHNEMDEPMFTQPLMYKQIRKQKPVLQKYAELLVSQGVVNQPEYEEEISKYDKICEEAFARSKDEKILHIKHWLDSPWPGFFTLDGQPRSMSCPSTGLTEDILTHIGNVASSVPVENFTIHGGLSRILKTRGEMVKNRTVDWALAEYMAFGSLLKEGIHIRLSGQDVERGTFSHRHHVLHDQNVDKRTCIPMNHLWPNQAPYTVCNSSLSEYGVLGFELGFAMASPNALVLWEAQFGDFHNTAQCIIDQFICPGQAKWVRQNGIVLLLPHGMEGMGPEHSSARPERFLQMCNDDPDVLPDLKEANFDINQLYDCNWVVVNCSTPGNFFHVLRRQILLPFRKPLIIFTPKSLLRHPEARSSFDEMLPGTHFQRVIPEDGPAAQNPENVKRLLFCTGKVYYDLTRERKARDMVGQVAITRIEQLSPFPFDLLLKEVQKYPNAELAWCQEEHKNQGYYDYVKPRLRTTISRAKPVWYAGRDPAAAPATGNKKTHLTELQRLLDTAFDLDVFKNFS

SEQ ID NO: 910803 - protein, 595 aa, Homo sapiens
MSYCSCVNCIRYMRRRQIGFTTDPRMARSSPYPTDVARVVNAPIFHVNSDDPEAVMYVCKVAAEWRSTFHKDVVVDLVCYRRNGHNEMDEPMFTQPLMYKQIRKQKPVLQKYAELLVSQGVVNQPEYEEEISKYDKICEEAFARSKDEKILHIKHWLDSPWPGFFTLDGQPRSMSCPSTGLTEDILTHIGNVASSVPVENFTIHGGLSRILKTRGEMVKNRTVDWALAEYMAFGSLLKEGIHIRLSGQDVERGTFSHRHHVLHDQNVDKRTCIPMNHLWPNQAPYTVCNSSLSEYGVLGFELGFAMASPNALVLWEAQFGDFHNTAQCIIDQFICPGQAKWVRQNGIVLLLPHGMEGMGPEHSSARPERFLQMCNDDPDVLPDLKEANFDINQLYDCNWVVVNCSTPGNFFHVLRRQILLPFRKPLIIFTPKSLLRHPEARSSFDEMLPGTHFQRVIPEDGPAAQNPENVKRLLFCTGKVYYDLTRERKARDMVGQVAITRIEQLSPFPFDLLLKEVQKYPNAELAWCQEEHKNQGYYDYVKPRLRTTISRAKPVWYAGRDPAAAPATGNKKTHLTELQRLLDTAFDLDVFKNFS

SEQ ID NO: 910804 - protein, 537 aa, Homo sapiens
EDDLEDPSRPCHKDVVYDVVCYRRNGHNEMDEPMFTQPLMYKQIRKQKPVLQKYAELLVSQGVVNQPEYEEEISKYDKICEEAFARSKDEKILHIKHWLDSPWPGFFTLDGQPRSMSCPSTGLTEDILTHIGNVASSVPVENFTIHGGLSRILKTRGEMVKNRTVDWALAEYMAFGSLLKEGIHIRLSGQDVERGTFSHRHHVLHDQNVDKRTCIPMNHLWPNQAPYTVCNSSLSEYGVLGFELGFAMASPNALVLWEAQFGDFHNTAQCIIDQFICPGQAKWVRQNGIVLLLPHGMEGMGPEHSSARPERFLQMCNDDPDVLPDLKEANFDINQLYDCNWVVVNCSTPGNFFHVLRRQILLPFRKPLIIFTPKSLLRHPEARSSFDEMLPGTHFQRVIPEDGPAAQNPENVKRLLFCTGKVYYDLTRERKARDMVGQVAITRIEQLSPFPFDLLLKEVQKYPNAELAWCQEEHKNQGYYDYVKPRLRTTISRAKPVWYAGRDPAAAPATGNKKTHLTELQRLLDTAFDLDVFKNFS

SEQ ID NO: 910805 - protein, 255 aa, Homo sapiens
DLGQQQHDAILPHGMEGMGPEHSSARPERFLQMCNDDPDVLPDLKEANFDINQLYDCNWVVVNCSTPGNFFHVLRRQILLPFRKPLIIFTPKSLLRHPEARSSFDEMLPGTHFQRVIPEDGPAAQNPENVKRLLFCTGKVYYDLTRERKARDMVGQVAITRIEQLSPFPFDLLLKEVQKYPNAELAWCQEEHKNQGYYDYVKPRLRTTISRAKPVWYAGRDPAAAPATGNKKTHLTELQRLLDTAFDLDVFKNFS

SEQ ID NO: 910806 - protein, 3038 aa, Homo sapiens
MATPLAVNSAASLWGPYKDIWHKVGNALWRRQPEAVHLLDKILKKHKPDFISLFKNPPKNVQQHEKVQKASTEGVAIQGQQGTRLLPEQLIKEAFILSDLFDIGELAAVELLLAGEHQQPHFPGLTRGLVAVLLYWDGKRCIANSLKALIQSRRGKTWTLELSPELASMTTRFTDELMEQGLTYKVLTLVSQIDVNNEFEKLQRERGLGSEKHRKEVSDLIKECRQSLAESLFAWACQSPLGKEDTLLLIGHLERVTVEANGSLDAVNLALLMALLYCFDISFIEQSTEERDDMIHQLPLLTEKQYIATIHSRLQDSQLWKLPGLQATVRLAWALALRGISQLPDVTALAEFTEADEAMAELAIADNVFLFLMESVVVSEYFYQEEFYIRRVHNLITDFLALMPMKVKQLRNRADEDARMIHMSMQMGNEPPISLRRDLEHLMLLIGELYKKNPFHLELALEYWCPTEPLQTPTIMGSYLGVAHQRPPQRQVVLSKFVRQMGDLLPPTIYIPYLKMLQGLANGPQCAHYCFSLLKVNGSSHVENIQGAGGSPVSWEHFFHSLMLYHEHLRKDLPSADSVQYRHLPSRGITQKEQDGLIAFLQLTSTIITWSENARLALCEHPQWTPVVVILGLLQCSIPPVLKAELLKTLAAFGKSPEIAASLWQSLEYTQILQTVRIPSQRQAIGIEVELNEIESRCEEYPLTRAFCQLISTLVESSFPSNLGAGLRPPGFDPYLQFLRDSVFLRFRTRAYRRAAEKWEVAEVVLEVFYKLLRDYEPQLEDFVDQFVELQGEEIIAYKPPGFSLMYHLLNESPMLELALSLLEEGVKQLDTYAPFPGKKHLEKAVQHCLALLNLTLQKENLFMDLLRESQLALIVCPLEQLLQGINPRTKKADNVVNIARYLYHGNTNPELAFESAKILCCISCNSNIQIKLVGDFTHDQSISQKLMAGFVECLDCEDAEEFVRLEEGSELEKKLVAIRHETRIHILNLLITSLECNPPNLALYLLGFELKKPVSTTNLQDPGVLGCPRTCLHAILNILEKGTEGRTGPVAVRESPQLAELCYQVIYQLCACSDTSGPTMRYLRTSQDFLFSQLQYLPFSNKEYEISMLNQMSWLMKTASIELRVTSLNRQRSHTQRLLHLLLDDMPVKPYSDGEGGIEDENRSVSGFLHFDTATKVRRKILNILDSIDFSQEIPEPLQLDFFDRAQIEQVIANCEHKNLRGQTVCNVKLLHRVLVAEVNALQGMAAIGQRPLLMEEISTVLQYVVGRNKLLQCLHAKRHALESWRQLVEIILTACPQDLIQAEDRQLIIRDILQDVHDKILDDEAAQELMPVVAGAVFTLTAHLSQAVLTEQKQTSVLGPAEAHYAFMLDSCFTSPPPEENPLVGFASIGDSSLYIILKKLLDFILKTGGGFQRVRTHLYGSLLYYLQIAQRPDEPDTLEAAKKTMWERLTAPEDVFSKLQRENIAIIESYGAALMEVVCRDACDGHEIGRMLALALLDRIVSVDKQQQWLLYLSNSGYLKVLVDSLVEDDRTLQSLLTPQPPLLKALYTYESKMAFLTRVAKIQQGALELLRSGVIVRLAQCQVYDMRPETDPQSMFGMRDPPMFIPTPVDRYRQILLPALQLCQVILTSSMAQHLQAAGQVLQFLISHSDTIQAILRCQDVSAGSLQELALLTGIISKAALPGILSELDVDVNEGSLMELQGHIGRFQRQCLGLLSRFGGSDRLRQFKFQDDNVEGDKVSKKDEIELAMQQICANVMEYCQSLMLQSSPTFQHAVCLFTPSLSETVNRDGPRQDTQAPVVPYWRLPGLGIIIYLLKQSANDFFSYYDSHRQSVSKLQNVEQLPPDEIKELCQSVMPAGVDKISTAQKYVLARRRLVKVINNRAKLLSLCSFIIETCLFILWRHLEYYLLHCMPTDSQDSLFASRTLFKSRRLQDSFASETNLDFRSGLAIVSQHDLDQLQADAINAFGESLQKKLLDIEGLYSKVRSRYSFIQALVRRIRGLYELEATDKYKDCLVGLRFHHSQTVKTFSQNRPAAARTFQQIRCYSAPVAAEPFLSGTSSNYVEEMYCAWLENPKSVHKSWDIFFRNTNAGAPPGTAYQSPLPLSRGSLAAVAHAQSLVEAQPNVDKLVEDHLAVQSLIRAYQIRGHHVAQLDPLGILDADLDSSVPADIISSTDKLGFYGLDESDLDKVFHLPTTTFIGGQESALPLREIIRRLEMAYCQHIGVEFMFINDLEQCQWIRQKFETPGIMQFTNEEKRTLLARLVRSTRFEEFLQRKWSSEKRFGLEGCEVLIPALKTIIDKSSENGVDYVIMGMPHRGRLNVLANVIRKELEQIFCQFDSKLEAADEGSGDVKYHLGMYHRRINRVTDRNITLSLVANPSHLEAADPVVMGKTKAEQFYCGDTEGKKVMSILLHGDAAFAGQGIVYETFHLSDLPSYTTHGTVHVVVNNQIGFTTDPRMARSSPYPTDVARVVNAPIFHVNSDDPEAVMYVCKVAAEWRSTFHKDVVVDLVCYRRNGHNEMDEPMFTQPLMYKQIRKQKPVLQKYAELLVSQGVVNQPEYEEEISKYDKICEEAFARSKDEKILHIKHWLDSPWPGFFTLDGQPRSMSCPSTGLTEDILTHIGNVASSVPVENFTIHGGLSRILKTRGEMVKNRTVDWALAEYMAFGSLLKEGIHIRLSGQDVERGTFSHRHHVLHDQNVDKRTCIPMNHLWPNQAPYTVCNSSLSEYGVLGFELGFAMASPNALVLWEAQFGDFHNTAQCIIDQFICPGQAKWVRQNGIVLLLPHGMEGMGPEHSSARPERFLQMCNDDPDVLPDLKEANFDINQLYDCNWVVVNCSTPGNFFHVLRRQILLPFRKPLIIFTPKSLLRHPEARSSFDEMLPGTHFQRVIPEDGPAAQNPENVKRLLFCTGKVYYDLTRERKARDMVGQVAITRIEQLSPFPFDLLLKEVQKYPNAELAWCQEEHKNQGYYDYVKPRLRTTISRAKPVCYAGGPGVFRTEKKHLKSEALEGFDGRSDFRNVLGCGPASTVMPV

SEQ ID NO: 910807 - protein, 149 aa, Homo sapiens [sequence omitted]

SEQ ID NO: 910808 - protein, 1944 aa, Homo sapiens
MATPLAVNSAASLWGPYKDIWHKVGNALWRRQPEAVHLLDKILKKHKPDFISLFKNPPKNVQQHEKVQKASTEGVAIQGQQGTRLLPEQLIKEAFILSDLFDIGELAAVELLLAGEHQQPHFPGLTRGLVAVLLYWDGKRCIANSLKALIQSRRGKTWTLELSPELASMTTRFTDELMEQGLTYKVLTLVSQIDVNNEFEKLQRERGLGSEKHRKEVSDLIKECRQSLAESLFAWACQSPLGKEDTLLLIGHLERVTVEANGSLDAVNLALLMALLYCFDISFIEQSTEERDDMIHQLPLLTEKQYIATIHSRLQDSQLWKLPGLQATVRLAWALALRGISQLPDVTALAEFTEADEAMAELAIADNVFLFLMESVVVSEYFYQEEFYIRRVHNLITDFLALMPMKVKQLRNRADEDARMIHMSMQMGNEPPISLRRDLEHLMLLIGELYKKNPFHLELALEYWCPTEPLQTPTIMGSYLGVAHQRPPQRQVVLSKFVRQMGDLLPPTIYIPYLKMLQGLANGPQCAHYCFSLLKVNGSSHVENIQGAGGSPVSWEHFFHSLMLYHEHLRKDLPSADSVQYRHLPSRGITQKEQDGLIAFLQLTSTIITWSENARLALCEHPQWTPVVVILGLLQCSIPPVLKAELLKTLAAFGKSPEIAASLWQSLEYTQILQTVRIPSQRQAIGIEVELNEIESRCEEYPLTRAFCQLISTLVESSFPSNLGAGLRPPGFDPYLQFLRDSVFLRFRTRAYRRAAEKWEVAEVVLEVFYKLLRDYEPQLEDFVDQFVELQGEEIIAYKPPGFSLMYHLLNESPMLELALSLLEEGVKQLDTYAPFPGKKHLEKAVQHCLALLNLTLQKENLFMDLLRESQLALIVCPLEQLLQGINPRTKKADNVVNIARYLYHGNTNPELAFESAKILCCISCNSNIQIKLVGDFTHDQSISQKLMAGFVECLDCEDAEEFVRLEEGSELEKKLVAIRHETRIHILNLLITSLECNPPNLALYLLGFELKKPVSTTNLQDPGVLGCPRTCLHAILNILEKGTEGRTGPVAVRESPQLAELCYQVIYQLCACSDTSGPTMRYLRTSQDFLFSQLQYLPFSNKEYEISMLNQMSWLMKTASIELRVTSLNRQRSHTQRLLHLLLDDMPVKPYSDGEGGIEDENRSVSGFLHFDTATKVRRKILNILDSIDFSQEIPEPLQLDFFDRAQIEQVIANCEHKNLRGQTVCNVKLLHRVLVAEVNALQGMAAIGQRPLLMEEISTVLQYVVGRNKLLQCLHAKRHALESWRQLVEIILTACPQDLIQAEDRQLIIRDILQDVHDKILDDEAAQELMPVVAGAVFTLTAHLSQAVLTEQKQTSVLGPAEAHYAFMLDSCFTSPPPEENPLVGFASIGDSSLYIILKKLLDFILKTGGGFQRVRTHLYGSLLYYLQIAQRPDEPDTLEAAKKTMWERLTAPEDVFSKLQRENIAIIESYGAALMEVVCRDACDGHEIGRMLALALLDRIVSVDKQQQWLLYLSNSGYLKVLVDSLVEDDRTLQSLLTPQPPLLKALYTYESKMAFLTRVAKIQQGALELLRSGVIVRLAQCQVYDMRPETDPQSMFGMRDPPMFIPTPVDRYRQILLPALQLCQVILTSSMAQHLQAAGQVLQFLISHSDTIQAILRCQDVSAGSLQELALLTGIISKAALPGILSELDVDVNEGSLMELQGHIGRFQRQCLGLLSRFGGSDRLRQFKFQDDNVEGDKVSKKDEIELAMQQICANVMEYCQSLMLQSSPTFQHAVCLFTPSLSETVNRDGPRQDTQAPVVPYWRLPGLGIIIYLLKQSANDFFSYYDSHRQSVSKLQNVEQLPPDEIKELCQSVMPAGVDKISTAQKYVLARRRLVKVINNRAKLLSLCSFIIETCLFILWRHLEYYLLHCMPTDSQDSLFASRTLFKSRRLQGKLSAKN

SEQ ID NO: 910809 - protein, 2188 aa, Homo sapiens
MATPLAVNSAASLWGPYKDIWHKVGNALWRRQPEAVHLLDKILKKHKPDFISLFKNPPKNVQQHEKVQKASTEGVAIQGQQGTRLLPEQLIKEAFILSDLFDIGELAAVELLLAGEHQQPHFPGLTRGLVAVLLYWDGKRCIANSLKALIQSRRGKTWTLELSPELASMTTRFTDELMEQGLTYKVLTLVSQIDVNNEFEKLQRERGLGSEKHRKEVSDLIKECRQSLAESLFAWACQSPLGKEDTLLLIGHLERVTVEANGSLDAVNLALLMALLYCFDISFIEQSTEERDDMIHQLPLLTEKQYIATIHSRLQDSQLWKLPGLQATVRLAWALALRGISQLPDVTALAEFTEADEAMAELAIADNVFLFLMESVVVSEYFYQEEFYIRRVHNLITDFLALMPMKVKQLRNRADEDARMIHMSMQMGNEPPISLRRDLEHLMLLIGELYKKNPFHLELALEYWCPTEPLQTPTIMGSYLGVAHQRPPQRQVVLSKFVRQMGDLLPPTIYIPYLKMLQGLANGPQCAHYCFSLLKVNGSSHVENIQGAGGSPVSWEHFFHSLMLYHEHLRKDLPSADSVQYRHLPSRGITQKEQDGLIAFLQLTSTIITWSENARLALCEHPQWTPVVVILGLLQCSIPPVLKAELLKTLAAFGKSPEIAASLWQSLEYTQILQTVRIPSQRQAIGIEVELNEIESRCEEYPLTRAFCQLISTLVESSFPSNLGAGLRPPGFDPYLQFLRDSVFLRFRTRAYRRAAEKWEVAEVVLEVFYKLLRDYEPQLEDFVDQFVELQGEEIIAYKPPGFSLMYHLLNESPMLELALSLLEEGVKQLDTYAPFPGKKHLEKAVQHCLALLNLTLQKENLFMDLLRESQLALIVCPLEQLLQGINPRTKKADNVVNIARYLYHGNTNPELAFESAKILCCISCNSNIQIKLVGDFTHDQSISQKLMAGFVECLDCEDAEEFVRLEEGSELEKKLVAIRHETRIHILNLLITSLECNPPNLALYLLGFELKKPVSTTNLQDPGVLGCPRTCLHAILNILEKGTEGRTGPVAVRESPQLAELCYQVIYQLCACSDTSGPTMRYLRTSQDFLFSQLQYLPFSNKEYEISMLNQMSWLMKTASIELRVTSLNRQRSHTQRLLHLLLDDMPVKPYSDGEGGIEDENRSVSGFLHFDTATKVRRKILNILDSIDFSQEIPEPLQLDFFDRAQIEQVIANCEHKNLRGQTVCNVKLLHRVLVAEVNALQGMAAIGQRPLLMEEISTVLQYVVGRNKLLQCLHAKRHALESWRQLVEIILTACPQDLIQAEDRQLIIRDILQDVHDKILDDEAAQELMPVVAGAVFTLTAHLSQAVLTEQKQTSVLGPAEAHYAFMLDSCFTSPPPEENPLVGFASIGDSSLYIILKKLLDFILKTGGGFQRVRTHLYGSLLYYLQIAQRPDEPDTLEAAKKTMWERLTAPEDVFSKLQRENIAIIESYGAALMEVVCRDACDGHEIGRMLALALLDRIVSVDKQQQWLLYLSNSGYLKVLVDSLVEDDRTLQSLLTPQPPLLKALYTYESKMAFLTRVAKIQQGALELLRSGVIVRLAQCQVYDMRPETDPQSMFGMRDPPMFIPTPVDRYRQILLPALQLCQVILTSSMAQHLQAAGQVLQFLISHSDTIQAILRCQDVSAGSLQELALLTGIISKAALPGILSELDVDVNEGSLMELQGHIGRFQRQCLGLLSRFGGSDRLRQFKFQDDNVEGDKVSKKDEIELAMQQICANVMEYCQSLMLQSSPTFQHAVCLFTPSLSETVNRDGPRQDTQAPVVPYWRLPGLGIIIYLLKQSANDFFSYYDSHRQSVSKLQNVEQLPPDEIKELCQSVMPAGVDKISTAQKYVLARRRLVKVINNRAKLLSLCSFIIETCLFILWRHLEYYLLHCMPTDSQDSLFASRTLFKSRRLQDSFASETNLDFRSGLAIVSQHDLDQLQADAINAFGESLQKKLLDIEGLYSKVRSRYSFIQALVRRIRGLYELEATDKYKDCLVGLRFHHSQTVKTFSQNRPAAARTFQQIRCYSAPVAAEPFLSGTSSNYVEEMYCAWLENPKSVHKSWDIFFRNTNAGAPPGTAYQSPLPLSRGSLAAVAHAQSLVEAQPNVDKLVEDHLAVQSLIRAYQVRRVLYPHTGKGAVFLRSCLMGPIGLSECMLSLYLYLLKY

SEQ ID NO: 910810 - protein, 2150 aa, Homo sapiens
MATPLAVNSAASLWGPYKDIWHKVGNALWRRQPEAVHLLDKILKKHKPDFISLFKNPPKNVQQHEKVQKASTEGVAIQGQQGTRLLPEQLIKEAFILSDLFDIGELAAVELLLAGEHQQPHFPGLTRGLVAVLLYWDGKRCIANSLKALIQSRRGKTWTLELSPELASMTTRFTDELMEQGLTYKVLTLVSQIDVNNEFEKLQRERGLGSEKHRKEVSDLIKECRQSLAESLFAWACQSPLGKEDTLLLIGHLERVTVEANGSLDAVNLALLMALLYCFDISFIEQSTEERDDMIHQLPLLTEKQYIATIHSRLQDSQLWKLPGLQATVRLAWALALRGISQLPDVTALAEFTEADEAMAELAIADNVFLFLMESVVVSEYFYQEEFYIRRVHNLITDFLALMPMKVKQLRNRADEDARMIHMSMQMGNEPPISLRRDLEHLMLLIGELYKKNPFHLELALEYWCPTEPLQTPTIMGSYLGVAHQRPPQRQVVLSKFVRQMGDLLPPTIYIPYLKMLQGLANGPQCAHYCFSLLKVNGSSHVENIQGAGGSPVSWEHFFHSLMLYHEHLRKDLPSADSVQYRHLPSRGITQKEQDGLIAFLQLTSTIITWSENARLALCEHPQWTPVVVILGLLQCSIPPVLKAELLKTLAAFGKSPEIAASLWQSLEYTQILQTVRIPSQRQAIGIEVELNEIESRCEEYPLTRAFCQLISTLVESSFPSNLGAGLRPPGFDPYLQFLRDSVFLRFRTRAYRRAAEKWEVAEVVLEVFYKLLRDYEPQLEDFVDQFVELQGEEIIAYKPPGFSLMYHLLNESPMLELALSLLEEGVKQLDTYAPFPGKKHLEKAVQHCLALLNLTLQKENLFMDLLRESQLALIVCPLEQLLQGINPRTKKADNVVNIARYLYHGNTNPELAFESAKILCCISCNSNIQIKLVGDFTHDQSISQKLMAGFVECLDCEDAEEFVRLEEGSELEKKLVAIRHETRIHILNLLITSLECNPPNLALYLLGFELKKPVSTTNLQDPGVLGCPRTCLHAILNILEKGTEGRTGPVAVRESPQLAELCYQVIYQLCACSDTSGPTMRYLRTSQDFLFSQLQYLPFSNKEYEISMLNQMSWLMKTASIELRVTSLNRQRSHTQRLLHLLLDDMPVKPYSDGEGGIEDENRSVSGFLHFDTATKVRRKILNILDSIDFSQEIPEPLQLDFFDRAQIEQVIANCEHKNLRGQTVCNVKLLHRVLVAEVNALQGMAAIGQRPLLMEEISTVLQYVVGRNKLLQCLHAKRHALESWRQLVEIILTACPQDLIQAEDRQLIIRDILQDVHDKILDDEAAQELMPVVAGAVFTLTAHLSQAVLTEQKQTSVLGPAEAHYAFMLDSCFTSPPPEENPLVGFASIGDSSLYIILKKLLDFILKTGGGFQRVRTHLYGSLLYYLQIAQRPDEPDTLEAAKKTMWERLTAPEDVFSKLQRENIAIIESYGAALMEVVCRDACDGHEIGRMLALALLDRIVSVDKQQQWLLYLSNSGYLKVLVDSLVEDDRTLQSLLTPQPPLLKALYTYESKMAFLTRVAKIQQGALELLRSGVIVRLAQCQVYDMRPETDPQSMFGMRDPPMFIPTPVDRYRQILLPALQLCQVILTSSMAQHLQAAGQVLQFLISHSDTIQAILRCQDVSAGSLQELALLTGIISKAALPGILSELDVDVNEGSLMELQGHIGRFQRQCLGLLSRFGGSDRLRQFKFQDDNVEGDKVSKKDEIELAMQQICANVMEYCQSLMLQSSPTFQHAVCLFTPSLSETVNRDGPRQDTQAPVVPYWRLPGLGIIIYLLKQSANDFFSYYDSHRQSVSKLQNVEQLPPDEIKELCQSVMPAGVDKISTAQKYVLARRRLVKVINNRAKLLSLCSFIIETCLFILWRHLEYYLLHCMPTDSQDSLFASRTLFKSRRLQDSFASETNLDFRSGLAIVSQHDLDQLQADAINAFGESLQKKLLDIEGLYSKVRSRYSFIQALVRRIRGLYELEATDKYKDCLVGLRFHHSQTVKTFSQNRPAAARTFQQIRCYSAPVAAEPFLSGTSSNYVEEMYCAWLENPKSVHKKVRLAGLWVCLMLVCWPVPDWSPGKCVRPEESAGRQAAGAPYQPPYLYRTQHSPSRSHGPWIGVQQ

SEQ ID NO: 910811 - protein, 2006 aa, Homo sapiens
MATPLAVNSAASLWGPYKDIWHKVGNALWRRQPEAVHLLDKILKKHKPDFISLFKNPPKNVQQHEKVQKASTEGVAIQGQQGTRLLPEQLIKEAFILSDLFDIGELAAVELLLAGEHQQPHFPGLTRGLVAVLLYWDGKRCIANSLKALIQSRRGKTWTLELSPELASMTTRFTDELMEQGLTYKVLTLVSQIDVNNEFEKLQRERGLGSEKHRKEVSDLIKECRQSLAESLFAWACQSPLGKEDTLLLIGHLERVTVEANGSLDAVNLALLMALLYCFDISFIEQSTEERDDMIHQLPLLTEKQYIATIHSRLQDSQLWKLPGLQATVRLAWALALRGISQLPDVTALAEFTEADEAMAELAIADNVFLFLMESVVVSEYFYQEEFYIRRVHNLITDFLALMPMKVKQLRNRADEDARMIHMSMQMGNEPPISLRRDLEHLMLLIGELYKKNPFHLELALEYWCPTEPLQTPTIMGSYLGVAHQRPPQRQVVLSKFVRQMGDLLPPTIYIPYLKMLQGLANGPQCAHYCFSLLKVNGSSHVENIQGAGGSPVSWEHFFHSLMLYHEHLRKDLPSADSVQYRHLPSRGITQKEQDGLIAFLQLTSTIITWSENARLALCEHPQWTPVVVILGLLQCSIPPVLKAELLKTLAAFGKSPEIAASLWQSLEYTQILQTVRIPSQRQAIGIEVELNEIESRCEEYPLTRAFCQLISTLVESSFPSNLGAGLRPPGFDPYLQFLRDSVFLRFRTRAYRRAAEKWEVAEVVLEVFYKLLRDYEPQLEDFVDQFVELQGEEIIAYKPPGFSLMYHLLNESPMLELALSLLEEGVKQLDTYAPFPGKKHLEKAVQHCLALLNLTLQKENLFMDLLRESQLALIVCPLEQLLQGINPRTKKADNVVNIARYLYHGNTNPELAFESAKILCCISCNSNIQIKLVGDFTHDQSISQKLMAGFVECLDCEDAEEFVRLEEGSELEKKLVAIRHETRIHILNLLITSLECNPPNLALYLLGFELKKPVSTTNLQDPGVLGCPRTCLHAILNILEKGTEGRTGPVAVRESPQLAELCYQVIYQLCACSDTSGPTMRYLRTSQDFLFSQLQYLPFSNKEYEISMLNQMSWLMKTASIELRVTSLNRQRSHTQRLLHLLLDDMPVKPYSDGEGGIEDENRSVSGFLHFDTATKVRRKILNILDSIDFSQEIPEPLQLDFFDRAQIEQVIANCEHKNLRGQTVCNVKLLHRVLVAEVNALQGMAAIGQRPLLMEEISTVLQYVVGRNKLLQCLHAKRHALESWRQLVEIILTACPQDLIQAEDRQLIIRDILQDVHDKILDDEAAQELMPVVAGAVFTLTAHLSQAVLTEQKQTSVLGPAEAHYAFMLDSCFTSPPPEENPLVGFASIGDSSLYIILKKLLDFILKTGGGFQRVRTHLYGSLLYYLQIAQRPDEPDTLEAAKKTMWERLTAPEDVFSKLQRENIAIIESYGAALMEVVCRDACDGHEIGRMLALALLDRIVSVDKQQQWLLYLSNSGYLKVLVDSLVEDDRTLQSLLTPQPPLLKALYTYESKMAFLTRVAKIQQGALELLRSGVIVRLAQCQVYDMRPETDPQSMFGMRDPPMFIPTPVDRYRQILLPALQLCQVILTSSMAQHLQAAGQVLQFLISHSDTIQAILRCQDVSAGSLQELALLTGIISKAALPGILSELDVDVNEGSLMELQGHIGRFQRQCLGLLSRFGGSDRLRQFKFQDDNVEGDKVSKKDEIELAMQQICANVMEYCQSLMLQSSPTFQHAVCLFTPSLSETVNRDGPRQDTQAPVVPYWRLPGLGIIIYLLKQSANDFFSYYDSHRQSVSKLQNVEQLPPDEIKELCQSVMPAGVDKISTAQKYVLARRRLVKVINNRAKLLSLCSFIIETCLFILWRHLEYYLLHCMPTDSQDSLFASRTLFKSRRLQDSFASETNLDFRSGLAIVSQHDLDQLQADAINAFGESLQKKLLDIEGLYSKVRSRYSFIQALVRRIRGL

SEQ ID NO: 910812 - protein, 1909 aa, Homo sapiens
MATPLAVNSAASLWGPYKDIWHKVGNALWRRQPEAVHLLDKILKKHKPDFISLFKNPPKNVQQHEKVQKASTEGVAIQGQQGTRLLPEQLIKEAFILSDLFDIGELAAVELLLAGEHQQPHFPGLTRGLVAVLLYWDGKRCIANSLKALIQSRRGKTWTLELSPELASMTTRFTDELMEQGLTYKVLTLVSQIDVNNEFEKLQRERGLGSEKHRKEVSDLIKECRQSLAESLFAWACQSPLGKEDTLLLIGHLERVTVEANGSLDAVNLALLMALLYCFDISFIEQSTEERDDMIHQLPLLTEKQYIATIHSRLQDSQLWKLPGLQATVRLAWALALRGISQLPDVTALAEFTEADEAMAELAIADNVFLFLMESVVVSEYFYQEEFYIRRVHNLITDFLALMPMKVKQLRNRADEDARMIHMSMQMGNEPPISLRRDLEHLMLLIGELYKKNPFHLELALEYWCPTEPLQTPTIMGSYLGVAHQRPPQRQVVLSKFVRQMGDLLPPTIYIPYLKMLQGLANGPQCAHYCFSLLKVNGSSHVENIQGAGGSPVSWEHFFHSLMLYHEHLRKDLPSADSVQYRHLPSRGITQKEQDGLIAFLQLTSTIITWSENARLALCEHPQWTPVVVILGLLQCSIPPVLKAELLKTLAAFGKSPEIAASLWQSLEYTQILQTVRIPSQRQAIGIEVELNEIESRCEEYPLTRAFCQLISTLVESSFPSNLGAGLRPPGFDPYLQFLRDSVFLRFRTRAYRRAAEKWEVAEVVLEVFYKLLRDYEPQLEDFVDQFVELQGEEIIAYKPPGFSLMYHLLNESPMLELALSLLEEGVKQLDTYAPFPGKKHLEKAVQHCLALLNLTLQKENLFMDLLRESQLALIVCPLEQLLQGINPRTKKADNVVNIARYLYHGNTNPELAFESAKILCCISCNSNIQIKLVGDFTHDQSISQKLMAGFVECLDCEDAEEFVRLEEGSELEKKLVAIRHETRIHILNLLITSLECNPPNLALYLLGFELKKPVSTTNLQDPGVLGCPRTCLHAILNILEKGTEGRTGPVAVRESPQLAELCYQVIYQLCACSDTSGPTMRYLRTSQDFLFSQLQYLPFSNKEYEISMLNQMSWLMKTASIELRVTSLNRQRSHTQRLLHLLLDDMPVKPYSDGEGGIEDENRSVSGFLHFDTATKVRRKILNILDSIDFSQEIPEPLQLDFFDRAQIEQVIANCEHKNLRGQTVCNVKLLHRVLVAEVNALQGMAAIGQRPLLMEEISTVLQYVVGRNKLLQCLHAKRHALESWRQLVEIILTACPQDLIQAEDRQLIIRDILQDVHDKILDDEAAQELMPVVAGAVFTLTAHLSQAVLTEQKQTSVLGPAEAHYAFMLDSCFTSPPPEENPLVGFASIGDSSLYIILKKLLDFILKTGGGFQRVRTHLYGSLLYYLQIAQRPDEPDTLEAAKKTMWERLTAPEDVFSKLQRENIAIIESYGAALMEVVCRDACDGHEIGRMLALALLDRIVSVDKQQQWLLYLSNSGYLKVLVDSLVEDDRTLQSLLTPQPPLLKALYTYESKMAFLTRVAKIQQGALELLRSGVIVRLAQCQVYDMRPETDPQSMFGMRDPPMFIPTPVDRYRQILLPALQLCQVILTSSMAQHLQAAGQVLQFLISHSDTIQAILRCQDVSAGSLQELALLTGIISKAALPGILSELDVDVNEGSLMELQGHIGRFQRQCLGLLSRFGGSDRLRQFKFQDDNVEGDKVSKKDEIELAMQQICANVMEYCQSLMLQSSPTFQHAVCLFTPSLSETVNRDGPRQDTQAPVVPYWRLPGLGIIIYLLKQSANDFFSYYDSHRQSVSKLQNVEQLPPDEIKELCQSVMPAGVDKISTAQKYVLARRRLVKVINNRAKLLSLCSCILYEIMHLNDDLEI

SEQ ID NO: 910813 - protein, 1759 aa, Homo sapiens
MATPLAVNSAASLWGPYKDIWHKVGNALWRRQPEAVHLLDKILKKHKPDFISLFKNPPKNVQQHEKVQKASTEGVAIQGQQGTRLLPEQLIKEAFILSDLFDIGELAAVELLLAGEHQQPHFPGLTRGLVAVLLYWDGKRCIANSLKALIQSRRGKTWTLELSPELASMTTRFTDELMEQGLTYKVLTLVSQIDVNNEFEKLQRERGLGSEKHRKEVSDLIKECRQSLAESLFAWACQSPLGKEDTLLLIGHLERVTVEANGSLDAVNLALLMALLYCFDISFIEQSTEERDDMIHQLPLLTEKQYIATIHSRLQDSQLWKLPGLQATVRLAWALALRGISQLPDVTALAEFTEADEAMAELAIADNVFLFLMESVVVSEYFYQEEFYIRRVHNLITDFLALMPMKVKQLRNRADEDARMIHMSMQMGNEPPISLRRDLEHLMLLIGELYKKNPFHLELALEYWCPTEPLQTPTIMGSYLGVAHQRPPQRQVVLSKFVRQMGDLLPPTIYIPYLKMLQGLANGPQCAHYCFSLLKVNGSSHVENIQGAGGSPVSWEHFFHSLMLYHEHLRKDLPSADSVQYRHLPSRGITQKEQDGLIAFLQLTSTIITWSENARLALCEHPQWTPVVVILGLLQCSIPPVLKAELLKTLAAFGKSPEIAASLWQSLEYTQILQTVRIPSQRQAIGIEVELNEIESRCEEYPLTRAFCQLISTLVESSFPSNLGAGLRPPGFDPYLQFLRDSVFLRFRTRAYRRAAEKWEVAEVVLEVFYKLLRDYEPQLEDFVDQFVELQGEEIIAYKPPGFSLMYHLLNESPMLELALSLLEEGVKQLDTYAPFPGKKHLEKAVQHCLALLNLTLQKENLFMDLLRESQLALIVCPLEQLLQGINPRTKKADNVVNIARYLYHGNTNPELAFESAKILCCISCNSNIQIKLVGDFTHDQSISQKLMAGFVECLDCEDAEEFVRLEEGSELEKKLVAIRHETRIHILNLLITSLECNPPNLALYLLGFELKKPVSTTNLQDPGVLGCPRTCLHAILNILEKGTEGRTGPVAVRESPQLAELCYQVIYQLCACSDTSGPTMRYLRTSQDFLFSQLQYLPFSNKEYEISMLNQMSWLMKTASIELRVTSLNRQRSHTQRLLHLLLDDMPVKPYSDGEGGIEDENRSVSGFLHFDTATKVRRKILNILDSIDFSQEIPEPLQLDFFDRAQIEQVIANCEHKNLRGQTVCNVKLLHRVLVAEVNALQGMAAIGQRPLLMEEISTVLQYVVGRNKLLQCLHAKRHALESWRQLVEIILTACPQDLIQAEDRQLIIRDILQDVHDKILDDEAAQELMPVVAGAVFTLTAHLSQAVLTEQKQTSVLGPAEAHYAFMLDSCFTSPPPEENPLVGFASIGDSSLYIILKKLLDFILKTGGGFQRVRTHLYGSLLYYLQIAQRPDEPDTLEAAKKTMWERLTAPEDVFSKLQRENIAIIESYGAALMEVVCRDACDGHEIGRMLALALLDRIVSVDKQQQWLLYLSNSGYLKVLVDSLVEDDRTLQSLLTPQPPLLKALYTYESKMAFLTRVAKIQQGALELLRSGVIVRLAQCQVYDMRPETDPQSMFGMRDPPMFIPTPVDRYRQILLPALQLCQVILTSSMAQHLQAAGQVLQFLISHSDTIQAILRCQDVSAGSLQELALLTGIISKAALPGILSELDVDVNEGSLMELQGHIGRFQRQCLGLLSRFGGSDRLRQFKFQDDNVEGDKVSKKDEIELAMQQVRTM

SEQ ID NO: 910814 - protein, 850 aa, Homo sapiens
MATPLAVNSAASLWGPYKDIWHKVGNALWRRQPEAVHLLDKILKKHKPDFISLFKNPPKNVQQHEKVQKASTEGVAIQGQQGTRLLPEQLIKEAFILSDLFDIGELAAVELLLAGEHQQPHFPGLTRGLVAVLLYWDGKRCIANSLKALIQSRRGKTWTLELSPELASMTTRFTDELMEQGLTYKVLTLVSQIDVNNEFEKLQRERGLGSEKHRKEVSDLIKECRQSLAESLFAWACQSPLGKEDTLLLIGHLERVTVEANGSLDAVNLALLMALLYCFDISFIEQSTEERDDMIHQLPLLTEKQYIATIHSRLQDSQLWKLPGLQATVRLAWALALRGISQLPDVTALAEFTEADEAMAELAIADNVFLFLMESVVVSEYFYQEEFYIRRVHNLITDFLALMPMKVKQLRNRADEDARMIHMSMQMGNEPPISLRRDLEHLMLLIGELYKKNPFHLELALEYWCPTEPLQTPTIMGSYLGVAHQRPPQRQVVLSKFVRQMGDLLPPTIYIPYLKMLQGLANGPQCAHYCFSLLKVNGSSHVENIQGAGGSPVSWEHFFHSLMLYHEHLRKDLPSADSVQYRHLPSRGITQKEQDGLIAFLQLTSTIITWSENARLALCEHPQWTPVVVILGLLQCSIPPVLKAELLKTLAAFGKSPEIAASLWQSLEYTQILQTVRIPSQRQAIGIEVELNEIESRCEEYPLTRAFCQLISTLVESSFPSNLGAGLRPPGFDPYLQFLRDSVFLRFRTRAYRRAAEKWEVAEVVLEVFYKLLRDYEPQLEDFVDQFVELQGEEIIAYKPPGFSLMYHLLNESPMLELALSLLEEGVKQLDTYAPFPGICLKAFMSCKQL

SEQ ID NO: 910815 - protein, 65 aa, Homo sapiens
MAYCQHIGVEFMFINDLEQCQWIRQKFETPGIMQFTNEEKRTLLARLVRSTRYGSGPGPWGRHSQ

SEQ ID NO: 910816 - protein, 2012 aa, Homo sapiens
MATPLAVNSAASLWGPYKDIWHKVGNALWRRQPEAVHLLDKILKKHKPDFISLFKNPPKNVQQHEKVQKASTEGVAIQGQQGTRLLPEQLIKEAFILSDLFDIGELAAVELLLAGEHQQPHFPGLTRGLVAVLLYWDGKRCIANSLKALIQSRRGKTWTLELSPELASMTTRFTDELMEQGLTYKVLTLVSQIDVNNEFEKLQRERGLGSEKHRKEVSDLIKECRQSLAESLFAWACQSPLGKEDTLLLIGHLERVTVEANGSLDAVNLALLMALLYCFDISFIEQSTEERDDMIHQLPLLTEKQYIATIHSRLQDSQLWKLPGLQATVRLAWALALRGISQLPDVTALAEFTEADEAMAELAIADNVFLFLMESVVVSEYFYQEEFYIRRVHNLITDFLALMPMKVKQLRNRADEDARMIHMSMQMGNEPPISLRRDLEHLMLLIGELYKKNPFHLELALEYWCPTEPLQTPTIMGSYLGVAHQRPPQRQVVLSKFVRQMGDLLPPTIYIPYLKMLQGLANGPQCAHYCFSLLKVNGSSHVENIQGAGGSPVSWEHFFHSLMLYHEHLRKDLPSADSVQYRHLPSRGITQKEQDGLIAFLQLTSTIITWSENARLALCEHPQWTPVVVILGLLQCSIPPVLKAELLKTLAAFGKSPEIAASLWQSLEYTQILQTVRIPSQRQAIGIEVELNEIESRCEEYPLTRAFCQLISTLVESSFPSNLGAGLRPPGFDPYLQFLRDSVFLRFRTRAYRRAAEKWEVAEVVLEVFYKLLRDYEPQLEDFVDQFVELQGEEIIAYKPPGFSLMYHLLNESPMLELALSLLEEGVKQLDTYAPFPGKKHLEKAVQHCLALLNLTLQKENLFMDLLRESQLALIVCPLEQLLQGINPRTKKADNVVNIARYLYHGNTNPELAFESAKILCCISCNSNIQIKLVGDFTHDQSISQKLMAGFVECLDCEDAEEFVRLEEGSELEKKLVAIRHETRIHILNLLITSLECNPPNLALYLLGFELKKPVSTTNLQDPGVLGCPRTCLHAILNILEKGTEGRTGPVAVRESPQLAELCYQVIYQLCACSDTSGPTMRYLRTSQDFLFSQLQYLPFSNKEYEISMLNQMSWLMKTASIELRVTSLNRQRSHTQRLLHLLLDDMPVKPYSDGEGGIEDENRSVSGFLHFDTATKVRRKILNILDSIDFSQEIPEPLQLDFFDRAQIEQVIANCEHKNLRGQTVCNVKLLHRVLVAEVNALQGMAAIGQRPLLMEEISTVLQYVVGRNKLLQCLHAKRHALESWRQLVEIILTACPQDLIQAEDRQLIIRDILQDVHDKILDDEAAQELMPVVAGAVFTLTAHLSQAVLTEQKQTSVLGPAEAHYAFMLDSCFTSPPPEENPLVGFASIGDSSLYIILKKLLDFILKTGGGFQRVRTHLYGSLLYYLQIAQRPDEPDTLEAAKKTMWERLTAPEDVFSKLQRENIAIIESYGAALMEVVCRDACDGHEIGRMLALALLDRIVSVDKQQQWLLYLSNSGYLKVLVDSLVEDDRTLQSLLTPQPPLLKALYTYESKMAFLTRVAKIQQGALELLRSGVIVRLAQCQVYDMRPETDPQSMFGMRDPPMFIPTPVDRYRQILLPALQLCQVILTSSMAQHLQAAGQVLQFLISHSDTIQAILRCQDVSAGSLQELALLTGIISKAALPGILSELDVDVNEGSLMELQGHIGRFQRQCLGLLSRFGGSDRLRQFKFQDDNVEGDKVSKKDEIELAMQQICANVMEYCQSLMLQSSPTFQHAVCLFTPSLSETVNRDGPRQDTQAPVVPYWRLPGLGIIIYLLKQSANDFFSYYDSHRQSVSKLQNVEQLPPDEIKELCQSVMPAGVDKISTAQKYVLARRRLVKVINNRAKLLSLCSFIIETCLFILWRHLEYYLLHCMPTDSQDSLFASRTLFKSRRLQDSFASETNLDFRSGLAIVSQHDLDQLQADAINAFGESLQKKLLDIEGLYSKVRSRYSFIQALVRRIRGLLRISRN

SEQ ID NO: 910817 - protein, 338 aa, Homo sapiens
TPYAGAGPRVWSPGVGCRRLIRVELSRRQAVVKNFRTKMFHLRTCAAKLRPLTASQTVKTFSQNRPAAARTFQQIRCYSAPVAAEPFLSGTSSNYVEEMYCAWLENPKSVHKSWDIFFRNTNAGAPPGTAYQSPLPLSRGSLAAVAHAQSLVEAQPNVDKLVEDHLAVQSLIRAYQIRGHHVAQLDPLGILDADLDSSVPADIISSTDKLDLAVFQGNRLSNANSRRGSMGWIESDPRQVLPIGPQANFQSGGTGENPGTLPILDRDKFIRSNWKNWAYTGASKIGGGEIQCPPQETLEHAATVEPRAEDSGEPPWTIVTVTKLAESNRTREAKVRRH

SEQ ID NO: 910818 - protein, 164 aa, Homo sapiens
TPYAGAGPRVWSPGVGCRRLIRVELSRRQAVVKNFRTKMFHLRTCAAKLRPLTASQTVKTFSQNRPAAARTFQQIRCYSAPVAAEPFLSGTSSNYVEEMYCAWLENPKSVHKCWPVPDWSPGKCVRPEESAGRQAAGAPYQPPYLYRTQHSPSRSHGPWIGVQQ

SEQ ID NO: 910819 - protein, 1061 aa, Homo sapiens; identical to SEQ ID NO: 910795

SEQ ID NO: 910820 - protein, 3033 aa, Homo sapiens; identical to SEQ ID NO: 910802

SEQ ID NO: 910821 - protein, 3220 aa, Homo sapiens
MATPLAVNSAASLWGPYKDIWHKVGNALWRRQPEAVHLLDKILKKHKPDFISLFKNPPKNVQQHEKVQKASTEGVAIQGQQGTRLLPEQLIKEAFILSDLFDIGELAAVELLLAGEHQQPHFPGLTRGLVAVLLYWDGKRCIANSLKALIQSRRGKTWTLELSPELASMTTRFTDELMEQGLTYKVLTLVSQIDVNNEFEKLQRERGLGSEKHRKEVSDLIKECRQSLAESLFAWACQSPLGKEDTLLLIGHLERVTVEANGSLDAVNLALLMALLYCFDISFIEQSTEERDDMIHQLPLLTEKQYIATIHSRLQDSQLWKLPGLQATVRLAWALALRGISQLPDVTALAEFTEADEAMAELAIADNVFLFLMESVVVSEYFYQEEFYIRRVHNLITDFLALMPMKVKQLRNRADEDARMIHMSMQMGNEPPISLRRDLEHLMLLIGELYKKNPFHLELALEYWCPTEPLQTPTIMGSYLGVAHQRPPQRQVVLSKFVRQMGDLLPPTIYIPYLKMLQGLANGPQCAHYCFSLLKVNGSSHVENIQGAGGSPVSWEHFFHSLMLYHEHLRKDLPSADSVQYRHLPSRGITQKEQDGLIAFLQLTSTIITWSENARLALCEHPQWTPVVVILGLLQCSIPPVLKAELLKTLAAFGKSPEIAASLWQSLEYTQILQTVRIPSQRQAIGIEVELNEIESRCEEYPLTRAFCQLISTLVESSFPSNLGAGLRPPGFDPYLQFLRDSVFLRFRTRAYRRAAEKWEVAEVVLEVFYKLLRDYEPQLEDFVDQFVELQGEEIIAYKPPGFSLMYHLLNESPMLELALSLLEEGVKQLDTYAPFPGKKHLEKAVQHCLALLNLTLQKENLFMDLLRESQLALIVCPLEQLLQGINPRTKKADNVVNIARYLYHGNTNPELAFESAKILCCISCNSNIQIKLVGDFTHDQSISQKLMAGFVECLDCEDAEEFVRLEEGSELEKKLVAIRHETRIHILNLLITSLECNPPNLALYLLGFELKKPVSTTNLQDPGVLGCPRTCLHAILNILEKGTEGRTGPVAVRESPQLAELCYQVIYQLCACSDTSGPTMRYLRTSQDFLFSQLQYLPFSNKEYEISMLNQMSWLMKTASIELRVTSLNRQRSHTQRLLHLLLDDMPVKPYSDGEGGIEDENRSVSGFLHFDTATKVRRKILNILDSIDFSQEIPEPLQLDFFDRAQIEQVIANCEHKNLRGQTVCNVKLLHRVLVAEVNALQGMAAIGQRPLLMEEISTVLQYVVGRNKLLQCLHAKRHALESWRQLVEIILTACPQDLIQAEDRQLIIRDILQDVHDKILDDEAAQELMPVVAGAVFTLTAHLSQAVLTEQKQTSVLGPAEAHYAFMLDSCFTSPPPEENPLVGFASIGDSSLYIILKKLLDFILKTGGGFQRVRTHLYGSLLYYLQIAQRPDEPDTLEAAKKTMWERLTAPEDVFSKLQRENIAIIESYGAALMEVVCRDACDGHEIGRMLALALLDRIVSVDKQQQWLLYLSNSGYLKVLVDSLVEDDRTLQSLLTPQPPLLKALYTYESKMAFLTRVAKIQQGALELLRSGVIVRLAQCQVYDMRPETDPQSMFGMRDPPMFIPTPVDRYRQILLPALQLCQVILTSSMAQHLQAAGQVLQFLISHSDTIQAILRCQDVSAGSLQELALLTGIISKAALPGILSELDVDVNEGSLMELQGHIGRFQRQCLGLLSRFGGSDRLRQFKFQDDNVEGDKVSKKDEIELAMQQICANVMEYCQSLMLQSSPTFQHAVCLFTPSLSETVNRDGPRQDTQAPVVPYWRLPGLGIIIYLLKQSANDFFSYYDSHRQSVSKLQNVEQLPPDEIKELCQSVMPAGVDKISTAQKYVLARRRLVKVINNRAKLLSLCSFIIETCLFILWRHLEYYLLHCMPTDSQDSLFASRTLFKSRRLQGKLSAEKLMNHEIPICALKSKYQFFFIFVSRLLRVNWVNQELFESLDVAISCILLSVTGHCAEHKNILEPAHQLFLSFLLQLGADPALEEWRRSAIMLILIAGVGLCDLMAIYWIPEVEGNREKLRTLVWTSEMLSRGFHLLKVKIEFPILSRVFHGAIVIIIVIRFLHCVVDRYLHSRYDSVFLSLDSFASETNLDFRSGLAIVSQHDLDQLQADAINAFGESLQKKLLDIEGLYSKVRSRYSFIQALVRRIRGLYNSEATDKYKDCLVGLRFHHSQTVKTFSQNRPAAARTFQQIRCYSAPVAAEPFLSGTSSNYVEEMYCAWLENPKSVHKSWDIFFRNTNAGAPPGTAYQSPLPLSRGSLAAVAHAQSLVEAQPNVDKLVEDHLAVQSLIRAYQIRGHHVAQLDPLGILDADLDSSVPADIISSTDKLGFYGLDESDLDKVFHLPTTTFIGGQESALPLREIIRRLEMAYCQHIGVEFMFINDLEQCQWIRQKFETPGIMQFTNEEKRTLLARLVRSTRFEEFLQRKWSSEKRFGLEGCEVLIPALKTIIDKSSENGVDYVIMGMPHRGRLNVLANVIRKELEQIFCQFDSKLEAADEGSGDVKYHLGMYHRRINRVTDRNITLSLVANPSHLEAADPVVMGKTKAEQFYCGDTEGKKVMSILLHGDAAFAGQGIVYETFHLSDLPSYTTHGTVHVVVNNQIGFTTDPRMARSSPYPTDVARVVNAPIFHVNSDDPEAVMYVCKVAAEWRSTFHKDVVVDLVCYRRNGHNEMDEPMFTQPLMYKQIRKQKPVLQKYAELLVSQGVVNQPEYEEEISKYDKICEEAFARSKDEKILHIKHWLDSPWPGFFTLDGQPRSMSCPSTGLTEDILTHIGNVASSVPVENFTIHGGLSRILKTRGEMVKNRTVDWALAEYMAFGSLLKEGIHIRLSGQDVERGTFSHRHHVLHDQNVDKRTCIPMNHLWPNQAPYTVCNSSLSEYGVLGFELGFAMASPNALVLWEAQFGDFHNTAQCIIDQFICPGQAKWVRQNGIVLLLPHGMEGMGPEHSSARPERFLQMCNDDPDVLPDLKEANFDINQLYDCNWVVVNCSTPGNFFHVLRRQILLPFRKPLIIFTPKSLLRHPEARSSFDEMLPGTHFQRVIPEDGPAAQNPENVKRLLFCTGKVYYDLTRERKARDMVGQVAITRIEQLSPFPFDLLLKEVQKYPNAELAWCQEEHKNQGYYDYVKPRLRTTISRAKPVWYAGRDPAAAPATGNKKTHLTELQRLLDTAFDLDVFKNFS

SEQ ID NO: 910822 - protein, 1490 aa, Homo sapiens
DAWVDPRVAYESKMAFLTRVAKIQQGALELLRSGVIVRLAQCQVYDMRPETDPQSMFGMRDPPMFIPTPVDRYRQILLPALQLCQVILTSSMAQHLQAAGQVLQFLISHSDTIQAILRCQDVSAGSLQELALLTGIISKAALPGILSELDVDVNEGSLMELQGHIGRFQRQCLGLLSRFGGSDRLRQFKFQDDNVEGDKVSKKDEIELAMQQICANVMEYCQSLMLQSSPTFQHAVCLFTPSLSETVNRDGPRQDTQAPVVPYWRLPGLGIIIYLLKQSANDFFSYYDSHRQSVSKLQNVEQLPPDEIKELCQSVMPAGVDKISTAQKYVLARRRLVKVINNRAKLLSLCSFIIETCLFILWRHLEYYLLHCMPTDSQDSLFASRTLFKSRRLQDSFASETNLDFRSGLAIVSQHDLDQLQADAINAFGESLQKKLLDIEGLYSKVRSRYSFIQALVRRIRGLYNSEATDKYKDCLVGLRFHHSQTVKTFSQNRPAAARTFQQIRCYSAPVAAEPFLSGTSSNYVEEMYCAWLENPKSVHKSWDIFFRNTNAGAPPGTAYQSPLPLSRGSLAAVAHAQSLVEAQPNVDKLVEDHLAVQSLIRAYQIRGHHVAQLDPLGILDADLDSSVPADIISSTDKLGFYGLDESDLDKVFHLPTTTFIGGQESALPLREIIRRLEMAYCQHIGVEFMFINDLEQCQWIRQKFETPGIMQFTNEEKRTLLARLVRSTRFEEFLQRKWSSEKRFGLEGCEVLIPALKTIIDKSSENGVDYVIMGMPHRGRLNVLANVIRKELEQIFCQFDSKLEAADEGSGDVKYHLGMYHRRINRVTDRNITLSLVANPSHLEAADPVVMGKTKAEQFYCGDTEGKKVMSILLHGDAAFAGQGIVYETFHLSDLPSYTTHGTVHVVVNNQIGFTTDPRMARSSPYPTDVARVVNAPIFHVNSDDPEAVMYVCKVAAEWRSTFHKDVVVDLVCYRRNGHNEMDEPMFTQPLMYKQIRKQKPVLQKYAELLVSQGVVNQPEYEEEISKYDKICEEAFARSKDEKILHIKHWLDSPWPGFFTLDGQPRSMSCPSTGLTEDILTHIGNVASSVPVENFTIHGGLSRILKTRGEMVKNRTVDWALAEYMAFGSLLKEGIHIRLSGQDVERGTFSHRHHVLHDQNVDKRTCIPMNHLWPNQAPYTVCNSSLSEYGVLGFELGFAMASPNALVLWEAQFGDFHNTAQCIIDQFICPGQAKWVRQNGIVLLLPHGMEGMGPEHSSARPERFLQMCNDDPDVLPDLKEANFDINQLYDCNWVVVNCSTPGNFFHVLRRQILLPFRKPLIIFTPKSLLRHPEARSSFDEMLPGTHFQRVIPEDGPAAQNPENVKRLLFCTGKVYYDLTRERKARDMVGQVAITRIEQLSPFPFDLLLKEVQKYPNAELAWCQEEHKNQGYYDYVKPRLRTTISRAKPVWYAGRDPAAAPATGNKKTHLTELQRLLDTAFDLDVFKNFS

SEQ ID NO: 910823 - protein, 1023 aa, Homo sapiens; identical to SEQ ID NO: 910800

SEQ ID NO: 910824 - protein, 2469 aa, Homo sapiens
MATPLAVNSAASLWGPYKDIWHKVGNALWRRQPEAVHLLDKILKKHKPDFISLFKNPPKNVQQHEKVQKASTEGVAIQGQQGTRLLPEQLIKEAFILSDLFDIGELAAVELLLAGEHQQPHFPGLTRGLVAVLLYWDGKRCIANSLKALIQSRRGKTWTLELSPELASMTTRFTDELMEQGLTYKVLTLVSQIDVNNEFEKLQRERGLGSEKHRKEVSDLIKECRQSLAESLFAWACQSPLGKEDTLLLIGHLERVTVEANGSLDAVNLALLMALLYCFDISFIEQSTEERDDMIHQLPLLTEKQYIATIHSRLQDSQLWKLPGLQATVRLAWALALRGISQLPDVTALAEFTEADEAMAELAIADNVFLFLMESVVVSEYFYQEEFYIRRVHNLITDFLALMPMKVKQLRNRADEDARMIHMSMQMGNEPPISLRRDLEHLMLLIGELYKKNPFHLELALEYWCPTEPLQTPTIMGSYLGVAHQRPPQRQVVLSKFVRQMGDLLPPTIYIPYLKMLQGLANGPQCAHYCFSLLKVNGSSHVENIQGAGGSPVSWEHFFHSLMLYHEHLRKDLPSADSVQYRHLPSRGITQKEQDGLIAFLQLTSTIITWSENARLALCEHPQWTPVVVILGLLQCSIPPVLKAELLKTLAAFGKSPEIAASLWQSLEYTQILQTVRIPSQRQAIGIEVELNEIESRCEEYPLTRAFCQLISTLVESSFPSNLGAGLRPPGFDPYLQFLRDSVFLRFRTRAYRRAAEKWEVAEVVLEVFYKLLRDYEPQLEDFVDQFVELQGEEIIAYKPPGFSLMYHLLNESPMLELALSLLEEGVKQLDTYAPFPGKKHLEKAVQHCLALLNLTLQKENLFMDLLRESQLALIVCPLEQLLQGINPRTKKADNVVNIARYLYHGNTNPELAFESAKILCCISCNSNIQIKLVGDFTHDQSISQKLMAGFVECLDCEDAEEFVRLEEGSELEKKLVAIRHETRIHILNLLITSLECNPPNLALYLLGFELKKPVSTTNLQDPGVLGCPRTCLHAILNILEKGTEGRTGPVAVRESPQLAELCYQVIYQLCACSDTSGPTMRYLRTSQDFLFSQLQYLPFSNKEYEISMLNQMSWLMKTASIELRVTSLNRQRSHTQRLLHLLLDDMPVKPYSDGEGGIEDENRSVSGFLHFDTATKVRRKILNILDSIDFSQEIPEPLQLDFFDRAQIEQVIANCEHKNLRGQTVCNVKLLHRVLVAEVNALQGMAAIGQRPLLMEEISTVLQYVVGRNKLLQCLHAKRHALESWRQLVEIILTACPQDLIQAEDRQLIIRDILQDVHDKILDDEAAQELMPVVAGAVFTLTAHLSQAVLTEQKQTSVLGPAEAHYAFMLDSCFTSPPPEENPLVGFASIGDSSLYIILKKLLDFILKTGGGFQRVRTHLYGSLLYYLQIAQRPDEPDTLEAAKKTMWERLTAPEDVFSKLQRENIAIIESYGAALMEVVCRDACDGHEIGRMLALALLDRIVSVDKQQQWLLYLSNSGYLKVLVDSLVEDDRTLQSLLTPQPPLLKALYTYESKMAFLTRVAKIQQGALELLRSGVIVRLAQCQVYDMRPETDPQSMFGMRDPPMFIPTPVDRYRQILLPALQLCQVILTSSMAQHLQAAGQVLQFLISHSDTIQAILRCQDVSAGSLQELALLTGIISKAALPGILSELDVDVNEGSLMELQGHIGRFQRQCLGLLSRFGGSDRLRQFKFQDDNVEGDKVSKKDEIELAMQQICANVMEYCQSLMLQSSPTFQHAVCLFTPSLSETVNRDGPRQDTQAPVVPYWRLPGLGIIIYLLKQSANDFFSYYDSHRQSVSKLQNVEQLPPDEIKELCQSVMPAGVDKISTAQKYVLARRRLVKVINNRAKLLSLCSFIIETCLFILWRHLEYYLLHCMPTDSQDSLFASRTLFKSRRLQDSFASETNLDFRSGLAIVSQHDLDQLQADAINAFGESLQKKLLDIEGLYSKVRSRYSFIQALVRRIRGLYELEATDKYKDCLVGLRFHHSQTVKTFSQNRPAAARTFQQIRCYSAPVAAEPFLSGTSSNYVEEMYCAWLENPKSVHKSWDIFFRNTNAGAPPGTAYQSPLPLSRGSLAAVAHAQSLVEAQPNVDKLVEDHLAVQSLIRAYQIRGHHVAQLDPLGILDADLDSSVPADIISSTDKLGFYGLDESDLDKVFHLPTTTFIGGQESALPLREIIRRLEMAYCQHIGVEFMFINDLEQCQWIRQKFETPGIMQFTNEEKRTLLARLVRSTRFEEFLQRKWSSEKRFGLEGCEVLIPALKTIIDKSLLRHPEARSSFDEMLPGTHFQRVIPEDGPAAQNPENVKRLLFCTGKVYYDLTRERKARDMVGQVAITRIEQLSPFPFDLLLKEVQKYPNAELAWCQEEHKNQGYYDYVKPRLRTTISRAKPVWYAGRDPAAAPATGNKKTHLTELQRLLDTAFDLDVFKNFS

SEQ ID NO: 910825 - protein, 946 aa, Homo sapiens
MSWDIFFRNTNAGAPPGTAYQSPLPLSRGSLAAVAHAQSLVEAQPNVDKLVEDHLAVQSLIRAYQVRGHHIAKLDPLGISCVNFDDAPVTVSSNVGFYGLDESDLDKVFHLPTTTFIGGQESALPLREIIRRLEMAYCQHIGVEFMFINDLEQCQWIRQKFETPGIMQFTNEEKRTLLARLVRSTRFEEFLQRKWSSEKRFGLEGCEVLIPALKTIIDKSSENGVDYVIMGMPHRGRLNVLANVIRKELEQIFCQFDSKLEAADEGSGDVKYHLGMYHRRINRVTDRNITLSLVANPSHLEAADPVVMGKTKAEQFYCGDTEGKKVMSILLHGDAAFAGQGIVYETFHLSDLPSYTTHGTVHVVVNNQIGFTTDPRMARSSPYPTDVARVVNAPIFHVNSDDPEAVMYVCKVAAEWRSTFHKDVVVDLVCYRRNGHNEMDEPMFTQPLMYKQIRKQKPVLQKYAELLVSQGVVNQPEYEEEISKYDKICEEAFARSKDEKILHIKHWLDSPWPGFFTLDGQPRSMSCPSTGLTEDILTHIGNVASSVPVENFTIHGGLSRILKTRGEMVKNRTVDWALAEYMAFGSLLKEGIHIRLSGQDVERGTFSHRHHVLHDQNVDKRTCIPMNHLWPNQAPYTVCNSSLSEYGVLGFELGFAMASPNALVLWEAQFGDFHNTAQCIIDQFICPGQAKWVRQNGIVLLLPHGMEGMGPEHSSARPERFLQMCNDDPDVLPDLKEANFDINQLYDCNWVVVNCSTPGNFFHVLRRQILLPFRKPLIIFTPKSLLRHPEARSSFDEMLPGTHFQRVIPEDGPAAQNPENVKRLLFCTGKVYYDLTRERKARDMVGQVAITRIEQLSPFPFDLLLKEVQKYPNAELAWCQEEHKNQGYYDYVKPRLRTTISRAKPVWYAGRDPAAAPATGNKKTHLTELQRLLDTAFDLDVFKNFS

SEQ ID NO: 910826 - protein, 522 aa, Homo sapiens
EDDLEDPSRPCHNEMDEPMFTQPLMYKQIRKQKPVLQKYAELLVSQGVVNQPEYEEEISKYDKICEEAFARSKDEKILHIKHWLDSPWPGFFTLDGQPRSMSCPSTGLTEDILTHIGNVASSVPVENFTIHGGLSRILKTRGEMVKNRTVDWALAEYMAFGSLLKEGIHIRLSGQDVERGTFSHRHHVLHDQNVDKRTCIPMNHLWPNQAPYTVCNSSLSEYGVLGFELGFAMASPNALVLWEAQFGDFHNTAQCIIDQFICPGQAKWVRQNGIVLLLPHGMEGMGPEHSSARPERFLQMCNDDPDVLPDLKEANFDINQLYDCNWVVVNCSTPGNFFHVLRRQILLPFRKPLIIFTPKSLLRHPEARSSFDEMLPGTHFQRVIPEDGPAAQNPENVKRLLFCTGKVYYDLTRERKARDMVGQVAITRIEQLSPFPFDLLLKEVQKYPNAELAWCQEEHKNQGYYDYVKPRLRTTISRAKPVWYAGRDPAAAPATGNKKTHLTELQRLLDTAFDLDVFKNFS

SEQ ID NO: 910827 - protein, 3033 aa, Homo sapiens; identical to SEQ ID NO: 910802

SEQ ID NO: 910828 - protein, 190 aa, Homo sapiens
NRLSRGAWYSAEADLLHSGTLIIFTPKSLLRHPEARSSFDEMLPGTHFQRVIPEDGPAAQNPENVKRLLFCTGKVYYDLTRERKARDMVGQVAITRIEQLSPFPFDLLLKEVQKYPNAELAWCQEEHKNQGYYDYVKPRLRTTISRAKPVWYAGRDPAAAPATGNKKTHLTELQRLLDTAFDLDVFKNFS

SEQ ID NO: 910829 - protein, 104 aa, Homo sapiens
MPHPPLLGPGSTWSPQSLCVARKPRSGSHRRGTGCSVLVLLTLHLLSWTPSPPQPLFLSPLTQWRLSDASFSLLCQSRSEEGEEGLGVRGQAMAKGPAAPHLSL

SEQ ID NO: 910830 - protein, 2327 aa, Homo sapiens
MATPLAVNSAASLWGPYKDIWHKVGNALWRRQPEAVHLLDKILKKHKPDFISLFKNPPKNVQQHEKVQKASTEGVAIQGQQGTRLLPEQLIKEAFILSDLFDIGELAAVELLLAGEHQQPHFPGLTRGLVAVLLYWDGKRCIANSLKALIQSRRGKTWTLELSPELASMTTRFTDELMEQGLTYKVLTLVSQIDVNNEFEKLQRERGLGSEKHRKEVSDLIKECRQSLAESLFAWACQSPLGKEDTLLLIGHLERVTVEANGSLDAVNLALLMALLYCFDISFIEQSTEERDDMIHQLPLLTEKQYIATIHSRLQDSQLWKLPGLQATVRLAWALALRGISQLPDVTALAEFTEADEAMAELAIADNVFLFLMESVVVSEYFYQEEFYIRRVHNLITDFLALMPMKVKQLRNRADEDARMIHMSMQMGNEPPISLRRDLEHLMLLIGELYKKNPFHLELALEYWCPTEPLQTPTIMGSYLGVAHQRPPQRQVVLSKFVRQMGDLLPPTIYIPYLKMLQGLANGPQCAHYCFSLLKVNGSSHVENIQGAGGSPVSWEHFFHSLMLYHEHLRKDLPSADSVQYRHLPSRGITQKEQDGLIAFLQLTSTIITWSENARLALCEHPQWTPVVVILGLLQCSIPPVLKAELLKTLAAFGKSPEIAASLWQSLEYTQILQTVRIPSQRQAIGIEVELNEIESRCEEYPLTRAFCQLISTLVESSFPSNLGAGLRPPGFDPYLQFLRDSVFLRFRTRAYRRAAEKWEVAEVVLEVFYKLLRDYEPQLEDFVDQFVELQGEEIIAYKPPGFSLMYHLLNESPMLELALSLLEEGVKQLDTYAPFPGKKHLEKAVQHCLALLNLTLQKENLFMDLLRESQLALIVCPLEQLLQGINPRTKKADNVVNIARYLYHGNTNPELAFESAKILCCISCNSNIQIKLVGDFTHDQSISQKLMAGFVECLDCEDAEEFVRLEEGSELEKKLVAIRHETRIHILNLLITSLECNPPNLALYLLGFELKKPVSTTNLQDPGVLGCPRTCLHAILNILEKGTEGRTGPVAVRESPQLAELCYQVIYQLCACSDTSGPTMRYLRTSQDFLFSQLQYLPFSNKEYEISMLNQMSWLMKTASIELRVTSLNRQRSHTQRLLHLLLDDMPVKPYSDGEGGIEDENRSVSGFLHFDTATKVRRKILNILDSIDFSQEIPEPLQLDFFDRAQIEQVIANCEHKNLRGQTVCNVKLLHRVLVAEVNALQGMAAIGQRPLLMEEISTVLQYVVGRNKLLQCLHAKRHALESWRQLVEIILTACPQDLIQAEDRQLIIRDILQDVHDKILDDEAAQELMPVVAGAVFTLTAHLSQAVLTEQKQTSVLGPAEAHYAFMLDSCFTSPPPEENPLVGFASIGDSSLYIILKKLLDFILKTGGGFQRVRTHLYGSLLYYLQIAQRPDEPDTLEAAKKTMWERLTAPEDVFSKLQRENIAIIESYGAALMEVVCRDACDGHEIGRMLALALLDRIVSVDKQQQWLLYLSNSGYLKVLVDSLVEDDRTLQSLLTPQPPLLKALYTYESKMAFLTRVAKIQQGALELLRSGVIVRLAQCQVYDMRPETDPQSMFGMRDPPMFIPTPVDRYRQILLPALQLCQVILTSSMAQHLQAAGQVLQFLISHSDTIQAILRCQDVSAGSLQELALLTGIISKAALPGILSELDVDVNEGSLMELQGHIGRFQRQCLGLLSRFGGSDRLRQFKFQDDNVEGDKVSKKDEIELAMQQICANVMEYCQSLMLQSSPTFQHAVCLFTPSLSETVNRDGPRQDTQAPVVPYWRLPGLGIIIYLLKQSANDFFSYYDSHRQSVSKLQNVEQLPPDEIKELCQSVMPAGVDKISTAQKYVLARRRLVKVINNRAKLLSLCSFIIETCLFILWRHLEYYLLHCMPTDSQDSLFASRTLFKSRRLQDSFASETNLDFRSGLAIVSQHDLDQLQADAINAFGESLQKKLLDIEGLYSKVRSRYSFIQALVRRIRGLYELEATDKYKDCLVGLRFHHSQTVKTFSQNRPAAARTFQQIRCYSAPVAAEPFLSGTSSNYVEEMYCAWLENPKSVHKSWDIFFRNTNAGAPPGTAYQSPLPLSRGSLAAVAHAQSLVEAQPNVDKLVEDHLAVQSLIRAYQIRGHHVAQLDPLGILDADLDSSVPADIISSTDKLGFYGLDESDLDKVFHLPTTTFIGGQESALPLREIIRRLEMAYCQHIGVEFMFINDLEQCQWIRQKFETPGIMQFTNEEKRTLLARLVRSTRYGSGPGPWGRHSQGSSDPVCVDRACVQPVGRGERGFGVVQAKLHLHMCEETPDK

SEQ ID NO: 910831 - protein, 2077 aa, Homo sapiens
MATPLAVNSAASLWGPYKDIWHKVGNALWRRQPEAVHLLDKILKKHKPDFISLFKNPPKNVQQHEKVQKASTEGVAIQGQQGTRLLPEQLIKEAFILSDLFDIGELAAVELLLAGEHQQPHFPGLTRGLVAVLLYWDGKRCIANSLKALIQSRRGKTWTLELSPELASMTTRFTDELMEQGLTYKVLTLVSQIDVNNEFEKLQRERGLGSEKHRKEVSDLIKECRQSLAESLFAWACQSPLGKEDTLLLIGHLERVTVEANGSLDAVNLALLMALLYCFDISFIEQSTEERDDMIHQLPLLTEKQYIATIHSRLQDSQLWKLPGLQATVRLAWALALRGISQLPDVTALAEFTEADEAMAELAIADNVFLFLMESVVVSEYFYQEEFYIRRVHNLITDFLALMPMKVKQLRNRADEDARMIHMSMQMGNEPPISLRRDLEHLMLLIGELYKKNPFHLELALEYWCPTEPLQTPTIMGSYLGVAHQRPPQRQVVLSKFVRQMGDLLPPTIYIPYLKMLQGLANGPQCAHYCFSLLKVNGSSHVENIQGAGGSPVSWEHFFHSLMLYHEHLRKDLPSADSVQYRHLPSRGITQKEQDGLIAFLQLTSTIITWSENARLALCEHPQWTPVVVILGLLQCSIPPVLKAELLKTLAAFGKSPEIAASLWQSLEYTQILQTVRIPSQRQAIGIEVELNEIESRCEEYPLTRAFCQLISTLVESSFPSNLGAGLRPPGFDPYLQFLRDSVFLRFRTRAYRRAAEKWEVAEVVLEVFYKLLRDYEPQLEDFVDQFVELQGEEIIAYKPPGFSLMYHLLNESPMLELALSLLEEGVKQLDTYAPFPGKKHLEKAVQHCLALLNLTLQKENLFMDLLRESQLALIVCPLEQLLQGINPRTKKADNVVNIARYLYHGNTNPELAFESAKILCCISCNSNIQIKLVGDFTHDQSISQKLMAGFVECLDCEDAEEFVRLEEGSELEKKLVAIRHETRIHILNLLITSLECNPPNLALYLLGFELKKPVSTTNLQDPGVLGCPRTCLHAILNILEKGTEGRTGPVAVRESPQLAELCYQVIYQLCACSDTSGPTMRYLRTSQDFLFSQLQYLPFSNKEYEISMLNQMSWLMKTASIELRVTSLNRQRSHTQRLLHLLLDDMPVKPYSDGEGGIEDENRSVSGFLHFDTATKVRRKILNILDSIDFSQEIPEPLQLDFFDRAQIEQVIANCEHKNLRGQTVCNVKLLHRVLVAEVNALQGMAAIGQRPLLMEEISTVLQYVVGRNKLLQCLHAKRHALESWRQLVEIILTACPQDLIQAEDRQLIIRDILQDVHDKILDDEAAQELMPVVAGAVFTLTAHLSQAVLTEQKQTSVLGPAEAHYAFMLDSCFTSPPPEENPLVGFASIGDSSLYIILKKLLDFILKTGGGFQRVRTHLYGSLLYYLQIAQRPDEPDTLEAAKKTMWERLTAPEDVFSKLQRENIAIIESYGAALMEVVCRDACDGHEIGRMLALALLDRIVSVDKQQQWLLYLSNSGYLKVLVDSLVEDDRTLQSLLTPQPPLLKALYTYESKMAFLTRVAKIQQGALELLRSGVIVRLAQCQVYDMRPETDPQSMFGMRDPPMFIPTPVDRYRQILLPALQLCQVILTSSMAQHLQAAGQVLQFLISHSDTIQAILRCQDVSAGSLQELALLTGIISKAALPGILSELDVDVNEGSLMELQGHIGRFQRQCLGLLSRFGGSDRLRQFKFQDDNVEGDKVSKKDEIELAMQQICANVMEYCQSLMLQSSPTFQHAVCLFTPSLSETVNRDGPRQDTQAPVVPYWRLPGLGIIIYLLKQSANDFFSYYDSHRQSVSKLQNVEQLPPDEIKELCQSVMPAGVDKISTAQKYVLARRRLVKVINNRAKLLSLCSFIIETCLFILWRHLEYYLLHCMPTDSQDSLFASRTLFKSRRLQDSFASETNLDFRSGLAIVSQHDLDQLQADAINAFGESLQKKLLDIEGLYSKVRSRYSFIQALVRRIRGLYDLEATEDHFVRLANALPLFFYQMQIRLLVFQELFVIEQQVPFAVQDVLDAGLGDDGIVTLEPLVYVLPDK

SEQ ID NO: 910832 - protein, 1896 aa, Homo sapiens
MATPLAVNSAASLWGPYKDIWHKVGNALWRRQPEAVHLLDKILKKHKPDFISLFKNPPKNVQQHEKVQKASTEGVAIQGQQGTRLLPEQLIKEAFILSDLFDIGELAAVELLLAGEHQQPHFPGLTRGLVAVLLYWDGKRCIANSLKALIQSRRGKTWTLELSPELASMTTRFTDELMEQGLTYKVLTLVSQIDVNNEFEKLQRERGLGSEKHRKEVSDLIKECRQSLAESLFAWACQSPLGKEDTLLLIGHLERVTVEANGSLDAVNLALLMALLYCFDISFIEQSTEERDDMIHQLPLLTEKQYIATIHSRLQDSQLWKLPGLQATVRLAWALALRGISQLPDVTALAEFTEADEAMAELAIADNVFLFLMESVVVSEYFYQEEFYIRRVHNLITDFLALMPMKVKQLRNRADEDARMIHMSMQMGNEPPISLRRDLEHLMLLIGELYKKNPFHLELALEYWCPTEPLQTPTIMGSYLGVAHQRPPQRQVVLSKFVRQMGDLLPPTIYIPYLKMLQGLANGPQCAHYCFSLLKVNGSSHVENIQGAGGSPVSWEHFFHSLMLYHEHLRKDLPSADSVQYRHLPSRGITQKEQDGLIAFLQLTSTIITWSENARLALCEHPQWTPVVVILGLLQCSIPPVLKAELLKTLAAFGKSPEIAASLWQSLEYTQILQTVRIPSQRQAIGIEVELNEIESRCEEYPLTRAFCQLISTLVESSFPSNLGAGLRPPGFDPYLQFLRDSVFLRFRTRAYRRAAEKWEVAEVVLEVFYKLLRDYEPQLEDFVDQFVELQGEEIIAYKPPGFSLMYHLLNESPMLELALSLLEEGVKQLDTYAPFPGKKHLEKAVQHCLALLNLTLQKENLFMDLLRESQLALIVCPLEQLLQGINPRTKKADNVVNIARYLYHGNTNPELAFESAKILCCISCNSNIQIKLVGDFTHDQSISQKLMAGFVECLDCEDAEEFVRLEEGSELEKKLVAIRHETRIHILNLLITSLECNPPNLALYLLGFELKKPVSTTNLQDPGVLGCPRTCLHAILNILEKGTEGRTGPVAVRESPQLAELCYQVIYQLCACSDTSGPTMRYLRTSQDFLFSQLQYLPFSNKEYEISMLNQMSWLMKTASIELRVTSLNRQRSHTQRLLHLLLDDMPVKPYSDGEGGIEDENRSVSGFLHFDTATKVRRKILNILDSIDFSQEIPEPLQLDFFDRAQIEQVIANCEHKNLRGQTVCNVKLLHRVLVAEVNALQGMAAIGQRPLLMEEISTVLQYVVGRNKLLQCLHAKRHALESWRQLVEIILTACPQDLIQAEDRQLIIRDILQDVHDKILDDEAAQELMPVVAGAVFTLTAHLSQAVLTEQKQTSVLGPAEAHYAFMLDSCFTSPPPEENPLVGFASIGDSSLYIILKKLLDFILKTGGGFQRVRTHLYGSLLYYLQIAQRPDEPDTLEAAKKTMWERLTAPEDVFSKLQRENIAIIESYGAALMEVVCRDACDGHEIGRMLALALLDRIVSVDKQQQWLLYLSNSGYLKVLVDSLVEDDRTLQSLLTPQPPLLKALYTYESKMAFLTRVAKIQQGALELLRSGVIVRLAQCQVYDMRPETDPQSMFGMRDPPMFIPTPVDRYRQILLPALQLCQVILTSSMAQHLQAAGQVLQFLISHSDTIQAILRCQDVSAGSLQELALLTGIISKAALPGILSELDVDVNEGSLMELQGHIGRFQRQCLGLLSRFGGSDRLRQFKFQDDNVEGDKVSKKDEIELAMQQICANVMEYCQSLMLQSSPTFQHAVCLFTPSLSETVNRDGPRQDTQAPVVPYWRLPGLGIIIYLLKQSANDFFSYYDSHRQSVSKLQNVEQLPPDEIKELCQSVMPAGVDKISTAQKYVLARRRLVKVINNRAKLLSLCSWG

SEQ ID NO: 910833 - protein, 1915 aa, Homo sapiens
MATPLAVNSAASLWGPYKDIWHKVGNALWRRQPEAVHLLDKILKKHKPDFISLFKNPPKNVQQHEKVQKASTEGVAIQGQQGTRLLPEQLIKEAFILSDLFDIGELAAVELLLAGEHQQPHFPGLTRGLVAVLLYWDGKRCIANSLKALIQSRRGKTWTLELSPELASMTTRFTDELMEQGLTYKVLTLVSQIDVNNEFEKLQRERGLGSEKHRKEVSDLIKECRQSLAESLFAWACQSPLGKEDTLLLIGHLERVTVEANGSLDAVNLALLMALLYCFDISFIEQSTEERDDMIHQLPLLTEKQYIATIHSRLQDSQLWKLPGLQATVRLAWALALRGISQLPDVTALAEFTEADEAMAELAIADNVFLFLMESVVVSEYFYQEEFYIRRVHNLITDFLALMPMKVKQLRNRADEDARMIHMSMQMGNEPPISLRRDLEHLMLLIGELYKKNPFHLELALEYWCPTEPLQTPTIMGSYLGVAHQRPPQRQVVLSKFVRQMGDLLPPTIYIPYLKMLQGLANGPQCAHYCFSLLKVNGSSHVENIQGAGGSPVSWEHFFHSLMLYHEHLRKDLPSADSVQYRHLPSRGITQKEQDGLIAFLQLTSTIITWSENARLALCEHPQWTPVVVILGLLQCSIPPVLKAELLKTLAAFGKSPEIAASLWQSLEYTQILQTVRIPSQRQAIGIEVELNEIESRCEEYPLTRAFCQLISTLVESSFPSNLGAGLRPPGFDPYLQFLRDSVFLRFRTRAYRRAAEKWEVAEVVLEVFYKLLRDYEPQLEDFVDQFVELQGEEIIAYKPPGFSLMYHLLNESPMLELALSLLEEGVKQLDTYAPFPGKKHLEKAVQHCLALLNLTLQKENLFMDLLRESQLALIVCPLEQLLQGINPRTKKADNVVNIARYLYHGNTNPELAFESAKILCCISCNSNIQIKLVGDFTHDQSISQKLMAGFVECLDCEDAEEFVRLEEGSELEKKLVAIRHETRIHILNLLITSLECNPPNLALYLLGFELKKPVSTTNLQDPGVLGCPRTCLHAILNILEKGTEGRTGPVAVRESPQLAELCYQVIYQLCACSDTSGPTMRYLRTSQDFLFSQLQYLPFSNKEYEISMLNQMSWLMKTASIELRVTSLNRQRSHTQRLLHLLLDDMPVKPYSDGEGGIEDENRSVSGFLHFDTATKVRRKILNILDSIDFSQEIPEPLQLDFFDRAQIEQVIANCEHKNLRGQTVCNVKLLHRVLVAEVNALQGMAAIGQRPLLMEEISTVLQYVVGRNKLLQCLHAKRHALESWRQLVEIILTACPQDLIQAEDRQLIIRDILQDVHDKILDDEAAQELMPVVAGAVFTLTAHLSQAVLTEQKQTSVLGPAEAHYAFMLDSCFTSPPPEENPLVGFASIGDSSLYIILKKLLDFILKTGGGFQRVRTHLYGSLLYYLQIAQRPDEPDTLEAAKKTMWERLTAPEDVFSKLQRENIAIIESYGAALMEVVCRDACDGHEIGRMLALALLDRIVSVDKQQQWLLYLSNSGYLKVLVDSLVEDDRTLQSLLTPQPPLLKALYTYESKMAFLTRVAKIQQGALELLRSGVIVRLAQCQVYDMRPETDPQSMFGMRDPPMFIPTPVDRYRQILLPALQLCQVILTSSMAQHLQAAGQVLQFLISHSDTIQAILRCQDVSAGSLQELALLTGIISKAALPGILSELDVDVNEGSLMELQGHIGRFQRQCLGLLSRFGGSDRLRQFKFQDDNVEGDKVSKKDEIELAMQQICANVMEYCQSLMLQSSPTFQHAVCLFTPSLSETVNRDGPRQDTQAPVVPYWRLPGLGIIIYLLKQSANDFFSYYDSHRQSVSKLQNVEQLPPDEIKELCQSVMPAGVDKISTAQKYVLARRRLVKVINNRAKLLSLCSYRDLPIILWRHQRELQGSSKR

SEQ ID NO: 910834 - protein, 94 aa, Homo sapiens
MYKQIRKQKPVLQKYAELLVSQGVVNQPEYEVRPCGSIPVPFPGLAMTRKGGPQGQFSLLPVMRIHVRGCEIFTTTAFQCITFWRIWATEMLYK

SEQ ID NO: 910835 - protein, 375 aa, Homo sapiens
MDELQDVQLTEIKPLLNDKNGTRNFQDFDCQEHDIETTHGVVHVTIRGLPKGNRPVILTYHDIGLNHKSCFNAFFNFEDMQEITQHFAVCHVDAPGQQEGAPSFPTGYQYPTMDELAEMLPPVLTHLSLKSIIGIGVGAGAYILSRFALNHPELVEGLVLINVDPCAKGWIDWAASKLSGLTTNVVDIILAHHFGQEELQANLDLIQTYRMHIAQDINQDNLQLFLNSYNGRRDLEIERPILGQNDNKSKTLKCSTLLVVGDNSPAVEAVVECNSRLNPINTTLLKMADCGGLPQVVQPGKLTEAFKYFLQGMGYIPSASMTRLARSRTHSTSSSLGSGESPFSRSVTSNQSDGTQESCESPDVLDRHQTMEVSC

SEQ ID NO: 910836 - protein, 363 aa, Homo sapiens
MDELQDVQLTEIKPLLNDKEHDIETTHGVVHVTIRGLPKGNRPVILTYHDIGLNHKSCFNAFFNFEDMQEITQHFAVCHVDAPGQQEGAPSFPTGYQYPTMDELAEMLPPVLTHLSLKSIIGIGVGAGAYILSRFALNHPELVEGLVLINVDPCAKGWIDWAASKLSGLTTNVVDIILAHHFGQEELQANLDLIQTYRMHIAQDINQDNLQLFLNSYNGRRDLEIERPILGQNDNKSKTLKCSTLLVVGDNSPAVEAVVECNSRLNPINTTLLKMADCGGLPQVVQPGKLTEAFKYFLQGMGYIPSASMTRLARSRTHSTSSSLGSGESPFSRSVTSNQSDGTQESCESPDVLDRHQTMEVSC

SEQ ID NO: 910837 - protein, 286 aa, Homo sapiens
MDELQDVQLTEIKPLLNDKNGTRNFQDFDCQEHDIETTHGVVHVTIRVGAGAYILSRFALNHPELVEGLVLINVDPCAKGWIDWAASKLSGLTTNVVDIILAHHFGQEELQANLDLIQTYRMHIAQDINQDNLQLFLNSYNGRRDLEIERPILGQNDNKSKTLKCSTLLVVGDNSPAVEAVVECNSRLNPINTTLLKMADCGGLPQVVQPGKLTEAFKYFLQGMGYIPSASMTRLARSRTHSTSSSLGSGESPFSRSVTSNQSDGTQESCESPDVLDRHQTMEVSC

SEQ ID NO: 910838 - protein, 286 aa, Homo sapiens; identical to SEQ ID NO: 910837

SEQ ID NO: 910839 - protein, 286 aa, Homo sapiens; identical to SEQ ID NO: 910837

SEQ ID NO: 910840 - protein, 363 aa, Homo sapiens; identical to SEQ ID NO: 910836

SEQ ID NO: 910841 - protein, 286 aa, Homo sapiens; identical to SEQ ID NO: 910837

SEQ ID NO: 910842 - protein, 350 aa, Homo sapiens [sequence omitted]

SEQ ID NO: 910843 - protein, 266 aa, Homo sapiens
IIPNLFHSLQACTPPALSQQAAPLTSRSPVSCPRACVAPVPVAPVPVAPLPPLTMGPGPRLLLPLVLCVGLGALVFSSGAEGFRKRGPSVTAKVFFDVRIGDKDVGRIVIGLFGKVVPKTVENFVALATGEKGYGYKGSKFHRVIKDFMIQGGDITTGDGTGGVSIYGETFPDENFKLKHYGIGWVSMANAGPDTNGSQFFITLTKPTWLDGKHVVFGKVIDGMTVVHSIELQATDGHDRPLTNCSIINSGKIDVKTPFVVEIADW

SEQ ID NO: 910844 - protein, 266 aa, Homo sapiens; identical to SEQ ID NO: 910843

SEQ ID NO: 910845 - protein, 266 aa, Homo sapiens; identical to SEQ ID NO: 910843

SEQ ID NO: 910846 - protein, 74 aa, Homo sapiens
MAWWECPCCICMKPLLFRPHSHQNPACPPATPPQQCHSHLPQRSYSAKPSQGLFLWTRASLVIICCRVSSFTVC

SEQ ID NO: 910847 - protein, 475 aa, Homo sapiens [sequence omitted]

SEQ ID NO: 910848 - protein, 475 aa, Homo sapiens [sequence omitted]

SEQ ID NO: 910849 - protein, 104 aa, Homo sapiens
MASAARLTMMWEEVTCPICLDPFVEPVSIECGHSFCQECISQVGKGGGSVCPVCRQRFLLKNLRPNRQLANMVNNLKEISQEAREGTQGERCAVHGERLHPNSS

SEQ ID NO: 910850 - protein, 249 aa, Homo sapiens [sequence omitted]

SEQ ID NO: 910851 - protein, 1189 aa, Homo sapiens
MKSEEQPMDLENRSTANVLEETTVKKEKEDEKELVKLPVIVKLEKPLPENEEKKIIKEESDSFKENVKPIKVEVKECRADPKDTKSSMEKPVAQEPERIEFGGNIKSSHEITEKSTEETEKLKNDQQAKIPLKKREIKLSDDFDSPVKGPLCKSVTPTKEFLKDEIKQEEETCKRISTITALGHEGKQLVNGEVSDERVAPNFKTEPIETKFYETKEESYSPSKDRNIITEGNGTESLNSVITSMKTGELEKETAPLRKDADSSISVLEIHSQKAQIEEPDPPEMETSLDSSEMAKDLSSKTALSSTESCTMKGEEKSPKTKKDKRPPILECLEKLEKSKKTFLDKDAQRLSPIPEEVPKSTLESEKPGSPEAAETSPPSNIIDHCEKLASEKEVVECQSTSTVGGQSVKKVDLETLKEDSEFTKVEMDNLDNAQTSGIEEPSETKGSMQKSKFKYKLVPEEETTASENTEITSERQKEGIKLTIRISSRKKKPDSPPKVLEPENKQEKTEKEEEKTNVGRTLRRSPRISRPTAKVAEIRDQKADKKRGEGEDEVEEESTALQKTDKKEILKKSEKDTNSKVSKVKPKGKVRWTGSRTRGRWKYSSNDESEGSGSEKSSAASEEEEEKESEEAILADDDEPCKKCGLPNHPELILLCDSCDSGYHTACLRPPLMIIPDGEWFCPPCQHKLLCEKLEEQLQDLDVALKKKERAERRKERLVYVGISIENIIPPQEPDFSEDQEEKKKDSKKSKANLLERRSTRTRKCISYRFDEFDEAIDEAIEDDIKEADGGGVGRGKDISTITGHRGKDISTILDEERKENKRPQRAAAARRKKRRRLNDLDSDSNLDEEESEDEFKISDGSQDEFVVSDENPDESEEDPPSNDDSDTDFCSRRLRRHPSRPMRQSRRLRRKTPKKKYSDDDEEEESEENSRDSESDFSDDFSDDFVETRRRRSRRNQKRQINYKEDSESDGSQKSLRRGKEIRRVHKRRLSSSESEESYLSKNSEDDELAKESKRSVRKRGRSTDEYSEADEEEEEEEGKPSRKRLHRIETDEEESCDNAHGDANQPARDSQPRVLPSEQESTKKPYRIESDEEEDFENVGKVGSPLDYSLVDLPSTNGQSPGKAIENLIGKPTEKSQTPKDNSTASASLASNGTSGGQEAGAPEEEEDELLRVTDLVDYVCNSEQL

SEQ ID NO: 910852 - protein, 945 aa, Homo sapiens
MKTGELEKETAPLRKDADSSISVLEIHSQKAQIEEPDPPEMETSLDSSEMAKDLSSKTALSSTESCTMKGEEKSPKTKKDKRPPILECLEKLEKSKKTFLDKDAQRLSPIPEEVPKSTLESEKPGSPEAAETSPPSNIIDHCEKLASEKEVVECQSTSTVGGQSVKKVDLETLKEDSEFTKVEMDNLDNAQTSGIEEPSETKGSMQKSKFKYKLVPEEETTASENTEITSERQKEGIKLTIRISSRKKKPDSPPKVLEPENKQEKTEKEEEKTNVGRTLRRSPRISRPTAKVAEIRDQKADKKRGEGEDEVEEESTALQKTDKKEILKKSEKDTNSKVSKVKPKGKVRWTGSRTRGRWKYSSNDESEGSGSEKSSAASEEEEEKESEEAILADDDEPCKKCGLPNHPELILLCDSCDSGYHTACLRPPLMIIPDGEWFCPPCQHKLLCEKLEEQLQDLDVALKKKERAERRKERLVYVGISIENIIPPQEPDFSEDQEEKKKDSKKSKANLLERRSTRTRKCISYRFDEFDEAIDEAIEDDIKEADGGGVGRGKDISTITGHRGKDISTILDEERKENKRPQRAAAARRKKRRRLNDLDSDSNLDEEESEDEFKISDGSQDEFVVSDENPDESEEDPPSNDDSDTDFCSRRLRRHPSRPMRQSRRLRRKTPKKKYSDDDEEEESEENSRDSESDFSDDFSDDFVETRRRRSRRNQKRQINYKEDSESDGSQKSLRRGKEIRRVHKRRLSSSESEESYLSKNSEDDELAKESKRSVRKRGRSTDEYSEADEEEEEEEGKPSRKRLHRIETDEEESCDNAHGDANQPARDSQPRVLPSEQESTKKPYRIESDEEEDFENVGKVGSPLDYSLVDLPSTNGQSPGKAIENLIGKPTEKSQTPKDNSTASASLASNGTSGGQEAGAPEEEEDELLRVTDLVDYVCNSEQL

SEQ ID NO: 910853 - protein, 1209 aa, Homo sapiens
MIKMALHGNALSEEQKESEKMKSEEQPMDLENRSTANVLEETTVKKEKEDEKELVKLPVIVKLEKPLPENEEKKIIKEESDSFKENVKPIKVEVKECRADPKDTKSSMEKPVAQEPERIEFGGNIKSSHEITEKSTEETEKLKNDQQAKIPLKKREIKLSDDFDSPVKGPLCKSVTPTKEFLKDEIKQEEETCKRISTITALGHEGKQLVNGEVSDERVAPNFKTEPIETKFYETKEESYSPSKDRNIITEGNGTESLNSVITSMKTGELEKETAPLRKDADSSISVLEIHSQKAQIEEPDPPEMETSLDSSEMAKDLSSKTALSSTESCTMKGEEKSPKTKKDKRPPILECLEKLEKSKKTFLDKDAQRLSPIPEEVPKSTLESEKPGSPEAAETSPPSNIIDHCEKLASEKEVVECQSTSTVGGQSVKKVDLETLKEDSEFTKVEMDNLDNAQTSGIEEPSETKGSMQKSKFKYKLVPEEETTASENTEITSERQKEGIKLTIRISSRKKKPDSPPKVLEPENKQEKTEKEEEKTNVGRTLRRSPRISRPTAKVAEIRDQKADKKRGEGEDEVEEESTALQKTDKKEILKKSEKDTNSKVSKVKPKGKVRWTGSRTRGRWKYSSNDESEGSGSEKSSAASEEEEEKESEEAILADDDEPCKKCGLPNHPELILLCDSCDSGYHTACLRPPLMIIPDGEWFCPPCQHKLLCEKLEEQLQDLDVALKKKERAERRKERLVYVGISIENIIPPQEPDFSEDQEEKKKDSKKSKANLLERRSTRTRKCISYRFDEFDEAIDEAIEDDIKEADGGGVGRGKDISTITGHRGKDISTILDEERKENKRPQRAAAARRKKRRRLNDLDSDSNLDEEESEDEFKISDGSQDEFVVSDENPDESEEDPPSNDDSDTDFCSRRLRRHPSRPMRQSRRLRRKTPKKKYSDDDEEEESEENSRDSESDFSDDFSDDFVETRRRRSRRNQKRQINYKEDSESDGSQKSLRRGKEIRRVHKRRLSSSESEESYLSKNSEDDELAKESKRSVRKRGRSTDEYSEADEEEEEEEGKPSRKRLHRIETDEEESCDNAHGDANQPARDSQPRVLPSEQESTKKPYRIESDEEEDFENVGKVGSPLDYSLVDLPSTNGQSPGKAIENLIGKPTEKSQTPKDNSTASASLASNGTSGGQEAGAPEEEEDELLRVTDLVDYVCNSEQL

SEQ ID NO: 910854 - protein, 548 aa, Homo sapiens
MQKCGLPNHPELILLCDSCDSGYHTACLRPPLMIIPDGEWFCPPCQHKLLCEKLEEQLQDLDVALKKKERAERRKERLVYVGISIENIIPPQEPDFSEDQEEKKKDSKKSKANLLERRSTRTRKCISYRFDEFDEAIDEAIEDDIKEADGGGVGRGKDISTITGHRGKDISTILDEERKENKRPQRAAAARRKKRRRLNDLDSDSNLDEEESEDEFKISDGSQDEFVVSDENPDESEEDPPSNDDSDTDFCSRRLRRHPSRPMRQSRRLRRKTPKKKYSDDDEEEESEENSRDSESDFSDDFSDDFVETRRRRSRRNQKRQINYKEDSESDGSQKSLRRGKEIRRVHKRRLSSSESEESYLSKNSEDDELAKESKRSVRKRGRSTDEYSEADEEEEEEEGKPSRKRLHRIETDEEESCDNAHGDANQPARDSQPRVLPSEQESTKKPYRIESDEEEDFENVGKVGSPLDYSLVDLPSTNGQSPGKAIENLIGKPTEKSQTPKDNSTASASLASNGTSGGQEAGAPEEEEDELLRVTDLVDYVCNSEQL

SEQ ID NO: 910855 - protein, 1058 aa, Homo sapiens
IRRGAHLRAPPVVCKVALPSLGTPTSPAPPSPPRSILQFKMATAAAAAAVMAPPGCPGSCPNFAVVCSFLERYGPLLDLPELPFPELERVLQAPPPDVGNGEVPKELVELHLKLMRKIGKSVTADRWEKYLIKICQEFNSTWAWEMEKKGYLEMSVECKLALLKYLCECQFDDNLKFKNIINEEDADTMRLQPIGRDKDGLMYWYQLDQDHNVRMYIEEQDDQDGSSWKCIVRNRNELAETLALLKAQIDPVLLKNSSQQDNSSRESPSLEDEETKKEEETPKQEEQKESEKMKSEEQPMDLENRSTANVLEETTVKKEKEDEKELVKLPVIVKLEKPLPENEEKKIIKEESDSFKENVKPIKVEVKECRADPKDTKSSMEKPVAQEPERIEFGGNIKSSHEITEKSTEETEKLKNDQQAKIPLKKREIKLSDDFDSPVKGPLCKSVTPTKEFLKDEIKQEEETCKRISTITALGHEGKQLVNGEVSDERVAPNFKTEPIETKFYETKEESYSPSKDRNIITEGNGTESLNSVITSMKTGELEKETAPLRKDADSSISVLEIHSQKAQIEEPDPPEMETSLDSSEMAKDLSSKTALSSTESCTMKGEEKSPKTKKDKRPPILECLEKLEKSKKTFLDKDAQRLSPIPEEVPKSTLESEKPGSPEAAETSPPSNIIDHCEKLASEKEVVECQSTSTVGGQSVKKVDLETLKEDSEFTKVEMDNLDNAQTSGIEEPSETKGSMQKSKFKYKLVPEEETTASENTEITSERQKEGIKLTIRISSRKKKPDSPPKVLEPENKQEKTEKEEEKTNVGRTLRRSPRISRPTAKVAEIRDQKADKKRGEGEDEVEEESTALQKTDKKEILKKSEKDTNSKVSKVKPKGKVRWTGSRTRGRWKYSSNDESEGSGSEKSSAASEEEEEKESEEAILADDDEPCKKCGLPNHPELILLCDSCDSGYHTACLRPPLMIIPDGEWFCPPCQHKLLCEKLEEQLQDLDVALKKKERAERRYFYMCVNVLFGNMRAELSHCMDKWIHLKQGLAYCGLWAKSSLLFVFVLPAN

SEQ ID NO: 910856 - protein, 328 aa, Homo sapiens
IRRGAHLRAPPVVCKVALPSLGTPTSPAPPSPPRSILQFKMATAAAAAAVMAPPGCPGSCPNFAVVCSFLERYGPLLDLPELPFPELERVLQAPPPDVGNGEVPKELVELHLKLMRKIGKSVTADRWEKYLIKICQEFNSTWAWEMEKKGYLEMSVECKLALLKYLCECQFDDNLKFKNIINEEDADTMRLQPIGRDKDGLMYWYQLDQDHNVRMYIEEQDDQDGSSWKCIVSSKQWLQNFLAHEKIWFDKFKYDDARKEILRADERACGKVASRQENGASVILRDIGKSQKRTSRNPGWKLRPRGSGGTSGRPRVSSASGWQAGSGE

SEQ ID NO: 910857 - protein, 1481 aa, Homo sapiens
IRRGAHLRAPPVVCKVALPSLGTPTSPAPPSPPRSILQFKMATAAAAAAVMAPPGCPGSCPNFAVVCSFLERYGPLLDLPELPFPELERVLQAPPPDVGNGEVPKELVELHLKLMRKIGKSVTADRWEKYLIKICQEFNSTWAWEMEKKGYLEMSVECKLALLKYLCECQFDDNLKFKNIINEEDADTMRLQPIGRDKDGLMYWYQLDQDHNVRMYIEEQDDQDGSSWKCIVRNRNELAETLALLKAQIDPVLLKNSSQQDNSSRESPSLEDEETKKEEETPKQEEQKESEKMKSEEQPMDLENRSTANVLEETTVKKEKEDEKELVKLPVIVKLEKPLPENEEKKIIKEESDSFKENVKPIKVEVKECRADPKDTKSSMEKPVAQEPERIEFGGNIKSSHEITEKSTEETEKLKNDQQAKIPLKKREIKLSDDFDSPVKGPLCKSVTPTKEFLKDEIKQEEETCKRISTITALGHEGKQLVNGEVSDERVAPNFKTEPIETKFYETKEESYSPSKDRNIITEGNGTESLNSVITSMKTGELEKETAPLRKDADSSISVLEIHSQKAQIEEPDPPEMETSLDSSEMAKDLSSKTALSSTESCTMKGEEKSPKTKKDKRPPILECLEKLEKSKKTFLDKDAQRLSPIPEEVPKSTLESEKPGSPEAAETSPPSNIIDHCEKLASEKEVVECQSTSTVGGQSVKKVDLETLKEDSEFTKVEMDNLDNAQTSGIEEPSETKGSMQKSKFKYKLVPEEETTASENTEITSERQKEGIKLTIRISSRKKKPDSPPKVLEPENKQEKTEKEEEKTNVGRTLRRSPRISRPTAKVAEIRDQKADKKRGEGEDEVEEESTALQKTDKKEILKKSEKDTNSKVSKVKPKGKVRWTGSRTRGRWKYSSNDESEGSGSEKSSAASEEEEEKESEEAILADDDEPCKKCGLPNHPELILLCDSCDSGYHTACLRPPLMIIPDGEWFCPPCQHKLLCEKLEEQLQDLDVALKKKERAERRKERLVYVGISIENIIPPQEPDFSEDQEEKKKDSKKSKANLLERRSTRTRKCISYRFDEFDEAIDEAIEDDIKEADGGGVGRGKDISTITGHRGKDISTILDEERKENKRPQRAAAARRKKRRRLNDLDSDSNLDEEESEDEFKISDGSQDEFVVSDENPDESEEDPPSNDDSDTDFCSRRLRRHPSRPMRQSRRLRRKTPKKKYSDDDEEEESEENSRDSESDFSDDFSDDFVETRRRRSRRNQKRQINYKEDSESDGSQKSLRRGKEIRRVHKRRLSSSESEESYLSKNSEDDELAKESKRSVRKRGRSTDEYSEADEEEEEEEGKPSRKRLHRIETDEEESCDNAHGDANQPARDSQPRVLPSEQESTKKPYRIESDEEEDFENVGKVGSPLDYSLVDLPSTNGQSPGKAIENLIGKPTEKSQTPKDNSTASASLASNGTSGGQEAGAPEEEEDELLRVTDLVDYVCNSEQL

SEQ ID NO: 910858 - protein, 1450 aa, Homo sapiens
IRRGAHLRAPPVVCKVALPSLGTPTSPAPPSPPRSILQFKMATAAAAAAVMAPPGCPGSCPNFAVVCSFLERYGPLLDLPELPFPELERVLQAPPPDVGNGEVPKELVELHLKLMRKIGKSVTADRWEKYLIKYLCECQFDDNLKFKNIINEEDADTMRLQPIGRDKDGLMYWYQLDQDHNVRMYIEEQDDQDGSSWKCIVRNRNELAETLALLKAQIDPVLLKNSSQQDNSSRESPSLEDEETKKEEETPKQEEQKESEKMKSEEQPMDLENRSTANVLEETTVKKEKEDEKELVKLPVIVKLEKPLPENEEKKIIKEESDSFKENVKPIKVEVKECRADPKDTKSSMEKPVAQEPERIEFGGNIKSSHEITEKSTEETEKLKNDQQAKIPLKKREIKLSDDFDSPVKGPLCKSVTPTKEFLKDEIKQEEETCKRISTITALGHEGKQLVNGEVSDERVAPNFKTEPIETKFYETKEESYSPSKDRNIITEGNGTESLNSVITSMKTGELEKETAPLRKDADSSISVLEIHSQKAQIEEPDPPEMETSLDSSEMAKDLSSKTALSSTESCTMKGEEKSPKTKKDKRPPILECLEKLEKSKKTFLDKDAQRLSPIPEEVPKSTLESEKPGSPEAAETSPPSNIIDHCEKLASEKEVVECQSTSTVGGQSVKKVDLETLKEDSEFTKVEMDNLDNAQTSGIEEPSETKGSMQKSKFKYKLVPEEETTASENTEITSERQKEGIKLTIRISSRKKKPDSPPKVLEPENKQEKTEKEEEKTNVGRTLRRSPRISRPTAKVAEIRDQKADKKRGEGEDEVEEESTALQKTDKKEILKKSEKDTNSKVSKVKPKGKVRWTGSRTRGRWKYSSNDESEGSGSEKSSAASEEEEEKESEEAILADDDEPCKKCGLPNHPELILLCDSCDSGYHTACLRPPLMIIPDGEWFCPPCQHKLLCEKLEEQLQDLDVALKKKERAERRKERLVYVGISIENIIPPQEPDFSEDQEEKKKDSKKSKANLLERRSTRTRKCISYRFDEFDEAIDEAIEDDIKEADGGGVGRGKDISTITGHRGKDISTILDEERKENKRPQRAAAARRKKRRRLNDLDSDSNLDEEESEDEFKISDGSQDEFVVSDENPDESEEDPPSNDDSDTDFCSRRLRRHPSRPMRQSRRLRRKTPKKKYSDDDEEEESEENSRDSESDFSDDFSDDFVETRRRRSRRNQKRQINYKEDSESDGSQKSLRRGKEIRRVHKRRLSSSESEESYLSKNSEDDELAKESKRSVRKRGRSTDEYSEADEEEEEEEGKPSRKRLHRIETDEEESCDNAHGDANQPARDSQPRVLPSEQESTKKPYRIESDEEEDFENVGKVGSPLDYSLVDLPSTNGQSPGKAIENLIGKPTEKSQTPKDNSTASASLASNGTSGGQEAGAPEEEEDELLRVTDLVDYVCNSEQL

SEQ ID NO: 910859 - protein, 417 aa, Homo sapiens
KGKLLINTYFSLPELPPPNSGVGRGKDISTITGHRGKDISTILDEERKENKRPQRAAAARRKKRRRLNDLDSDSNLDEEESEDEFKISDGSQDEFVVSDENPDESEEDPPSNDDSDTDFCSRRLRRHPSRPMRQSRRLRRKTPKKKYSDDDEEEESEENSRDSESDFSDDFSDDFVETRRRRSRRNQKRQINYKEDSESDGSQKSLRRGKEIRRVHKRRLSSSESEESYLSKNSEDDELAKESKRSVRKRGRSTDEYSEADEEEEEEEGKPSRKRLHRIETDEEESCDNAHGDANQPARDSQPRVLPSEQESTKKPYRIESDEEEDFENVGKVGSPLDYSLVDLPSTNGQSPGKAIENLIGKPTEKSQTPKDNSTASASLASNGTSGGQEAGAPEEEEDELLRVTDLVDYVCNSEQL

SEQ ID NO: 910860 - protein, 994 aa, Homo sapiens
IRRGAHLRAPPVVCKVALPSLGTPTSPAPPSPPRSILQFKMATAAAAAAVMAPPGCPGSCPNFAVVCSFLERYGPLLDLPELPFPELERVLQAPPPDVGNGEVPKELVELHLKLMRKIGKSVTADRWEKYLIKICQEFNSTWAWEMEKKGYLEMSVECKLALLKYLCECQFDDNLKFKNIINEEDADTMRLQPIGRDKDGLMYWYQLDQDHNVRMYIEEQDDQDGSSWKCIVRNRNELAETLALLKAQIDPVLLKNSSQQDNSSRESPSLEDEETKKEEETPKQEEQKESEKMKSEEQPMDLENRSTANVLEETTVKKEKEDEKELVKLPVIVKLEKPLPENEEKKIIKEESDSFKENVKPIKVEVKECRADPKDTKSSMEKPVAQEPERIEFGGNIKSSHEITEKSTEETEKLKNDQQAKIPLKKREIKLSDDFDSPVKGPLCKSVTPTKEFLKDEIKQEEETCKRISTITALGHEGKQLVNGEVSDERVAPNFKTEPIETKFYETKEESYSPSKDRNIITEGNGTESLNSVITSMKTGELEKETAPLRKDADSSISVLEIHSQKAQIEEPDPPEMETSLDSSEMAKDLSSKTALSSTESCTMKGEEKSPKTKKDKRPPILECLEKLEKSKKTFLDKDAQRLSPIPEEVPKSTLESEKPGSPEAAETSPPSNIIDHCEKLASEKEVVECQSTSTVGGQSVKKVDLETLKEDSEFTKVEMDNLDNAQTSGIEEPSETKGSMQKSKFKYKLVPEEETTASENTEITSERQKEGIKLTIRISSRKKKPDSPPKVLEPENKQEKTEKEEEKTNVGRTLRRSPRISRPTAKVAEIRDQKADKKRGEGEDEVEEESTALQKTDKKEILKKSEKDTNSKVSKVKPKGKVRWTGSRTRGRWKYSSNDESEGSGSEKSSAASEEEEEKESEEAILADDDEPCKKCGLPNHPELSTKCCIMDFHLILIATLGEEQKESEKMKSEEQPMDLENRSTANVLEETT

SEQ ID NO: 910861 - protein, 881 aa, Homo sapiens
SGVVQEDACAAHTADLPWALLAVALRVSGTLAQLTFSFPLQGPAGERGEQGAPGPSGFQGLPGPPGPPGEGGKPGDQGVPGEAGAPGLVGPRGERGFPGERGSPGAQGLQGPRGLPGTPGTDGPKGASGPAGPPGAQGPPGLQGMPGERGAAGIAGPKGDRGDVGEKGPEGAPGKDGGRGLTGPIGPPGPAGANGEKGEVGPPGPAGSAGARGAPGERGETGPPGPAGFAGPPGADGQPGAKGEQGEAGQKGDAGAPGPQGPSGAPGPQGPTGVTGPKGARGAQGPPGATGFPGAAGRVGPPGSNGNPGPPGPPGPSGKDGPKGARGDSGPPGRAGEPGLQGPAGPPGEKGEPGDDGPSGAEGPPGPQGLAGQRGIVGLPGQRGERGFPGLPGPSGEPGKQGAPGASGDRGPPGPVGPPGLTGPAGEPGREGSPGADGPPGRDGAAGVKGDRGETGAVGAPGAPGPPGSPGPAGPTGKQGDRGEAGAQGPMGPSGPAGARGIQGPQGPRGDKGEAGEPGERGLKGHRGFTGLQGLPGPPGPSGDQGASGPAGPSGPRGPPGPVGPSGKDGANGIPGPIGPPGPRGRSGETGPAGPPGNPGPPGPPGPPGPGIDMSAFAGLGPREKGPDPLQYMRADQAAGGLRQHDAEVDATLKSLNNQIESIRSPEGSRKNPARTCRDLKLCHPEWKSGDYWIDPNQGCTLDAMKVFCNMETGETCVYPNPANVPKKNWWSSKSKEKKHIWFGETINGGFHFSYGDDNLAPNTANVQMTFLRLLSTEGSQNITYHCKNSIAYLDEAAGNLKKALLIQGSNDVEIRAEGNSRFTYTALKDGCTKHTGKWGKTVIEYRSQKTSRLPIIDIAPMDIGGPEQEFGVDIGPVCFL

SEQ ID NO: 910862 - protein, 1303 aa, Homo sapiens
MIRLGAPQSLVLLTLLVAAVLRCQGQDVRQPGPKGQKGEPGDIKDIVGPKGPPGPQGPAGEQGPRGDRGDKGEKGAPGPRGRDGEPGTPGNPGPPGPPGPPGPPGLGGNFAAQMAGGFDEKAGGAQLGVMQGPMGPMGPRGPPGPAGAPGPQGFQGNPGEPGEPGVSGPMGPRGPPGPPGKPGDDGEAGKPGKAGERGPPGPQGARGFPGTPGLPGVKGHRGYPGLDGAKGEAGAPGVKGESGSPGENGSPGPMGPRGLPGERGRTGPAGAAGARGNDGQPGPAGPPGPVGPAGGPGFPGAPGAKGEAGPTGARGPEGAQGPRGEPGTPGSPGPAGASGNPGTDGIPGAKGSAGAPGIAGAPGFPGPRGPPGPQGATGPLGPKGQTGEPGIAGFKGEQGPKGEPGPAGPQGAPGPAGEEGKRGARGEPGGVGPIGPPGERGAPGNRGFPGQDGLAGPKGAPGERGPSGLAGPKGANGDPGRPGEPGLPGARGLTGRPGDAGPQGKVGPSGAPGEDGRPGPPGPQGARGQPGVMGFPGPKGANGEPGKAGEKGLPGAPGLRGLPGKDGETGAAGPPGPAGPAGERGEQGAPGPSGFQGLPGPPGPPGEGGKPGDQGVPGEAGAPGLVGPRGERGFPGERGSPGAQGLQGPRGLPGTPGTDGPKGASGPAGPPGAQGPPGLQGMPGERGAAGIAGPKGDRGDVGEKGPEGAPGKDGGRGLTGPIGPPGPAGANGEKGEVGPPGPAGSAGARGAPGERGETGPPGPAGFAGPPGADGQPGAKGEQGEAGQKGDAGAPGPQGPSGAPGPQGPTGVTGPKGARGAQGPPGATGFPGAAGRVGPPGSNGNPGPPGPPGPSGKDGPKGARGDSGPPGRAGEPGLQGPAGPPGEKGEPGDDGPSGAEGPPGPQGLAGQRGIVGLPGQRGERGFPGLPGPSGEPGKQGAPGASGDRGPPGPVGPPGLTGPAGEPGREGSPGADGPPGRDGAAGVKGDRGETGAVGAPGAPGPPGSPGPAGPTGKQGDRGEAGAQGPMGPSGPAGARGIQGPQGPRGDKGEAGEPGERGLKGHRGFTGLQGLPGPPGPSGDQGASGPAGPSGPRGPPGPVGPSGKDGANGIPGPIGPPGPRGRSGETGPAGPPGNPGPPGPPGPPGPGIDMSAFAGLGPREKGPDPLQYMRADQAAGGLRQHDAEVDATLKSLNNQIESIRSPEGSRKNPARTCRDLKLCHPEWKSGDYWIDPNQGCTLDAMKVFCNMETGETCVYPNPANVPKKNWWSSKSKEKKHIWFGETINGGFHFSYWDDILGPHLPR

SEQ ID NO: 910863 - protein, 1286 aa, Homo sapiens
MIRLGAPQSLVLLTLLVAAVLRCQGQDVRQPGPKGQKGEPGDIKDIVGPKGPPGPQGPAGEQGPRGDRGDKGEKGAPGPRGRDGEPGTPGNPGPPGPPGPPGPPGLGGNFAAQMAGGFDEKAGGAQLGVMQGPMGPMGPRGPPGPAGAPGPQGFQGNPGEPGEPGVSGPMGPRGPPGPPGKPGDDGEAGKPGKAGERGPPGPQGARGFPGTPGLPGVKGHRGYPGLDGAKGEAGAPGVKGESGSPGENGSPGPMGPRGLPGERGRTGPAGAAGARGNDGQPGPAGPPGPVGPAGGPGFPGAPGAKGEAGPTGARGPEGAQGPRGEPGTPGSPGPAGASGNPGTDGIPGAKGSAGAPGIAGAPGFPGPRGPPGPQGATGPLGPKGQTGEPGIAGFKGEQGPKGEPGPAGPQGAPGPAGEEGKRGARGEPGGVGPIGPPGERGAPGNRGFPGQDGLAGPKGAPGERGPSGLAGPKGANGDPGRPGEPGLPGARGLTGRPGDAGPQGKVGPSGAPGEDGRPGPPGPQGARGQPGVMGFPGPKGANGEPGKAGEKGLPGAPGLRGLPGKDGETGAAGPPGPAGPAGERGEQGAPGPSGFQGLPGPPGPPGEGGKPGDQGVPGEAGAPGLVGPRGERGFPGERGSPGAQGLQGPRGLPGTPGTDGPKGASGPAGPPGAQGPPGLQGMPGERGAAGIAGPKGDRGDVGEKGPEGAPGKDGGRGLTGPIGPPGPAGANGEKGEVGPPGPAGSAGARGAPGERGETGPPGPAGFAGPPGADGQPGAKGEQGEAGQKGDAGAPGPQGPSGAPGPQGPTGVTGPKGARGAQGPPGATGFPGAAGRVGPPGSNGNPGPPGPPGPSGKDGPKGARGDSGPPGRAGEPGLQGPAGPPGEKGEPGDDGPSGAEGPPGPQGLAGQRGIVGLPGQRGERGFPGLPGPSGEPGKQGAPGASGDRGPPGPVGPPGLTGPAGEPGREGSPGADGPPGRDGAAGVKGDRGETGAVGAPGAPGPPGSPGPAGPTGKQGDRGEAGAQGPMGPSGPAGARGIQGPQGPRGDKGEAGEPGERGLKGHRGFTGLQGLPGPPGPSGDQGASGPAGPSGPRGPPGPVGPSGKDGANGIPGPIGPPGPRGRSGETGPAGPPGNPGPPGPPGPPGPGIDMSAFAGLGPREKGPDPLQYMRADQAAGGLRQHDAEVDATLKSLNNQIESIRSPEGSRKNPARTCRDLKLCHPEWKSGDYWIDPNQGCTLDAMKVFCNMETGETCVYPNPANVPKKNWWSSKSKERDDIWVPNTGRS

SEQ ID NO: 910864 - protein, 1418 aa, Homo sapiens
MIRLGAPQSLVLLTLLVAAVLRCQGQDVRQPGPKGQKGEPGDIKDIVGPKGPPGPQGPAGEQGPRGDRGDKGEKGAPGPRGRDGEPGTPGNPGPPGPPGPPGPPGLGGNFAAQMAGGFDEKAGGAQLGVMQGPMGPMGPRGPPGPAGAPGPQGFQGNPGEPGEPGVSGPMGPRGPPGPPGKPGDDGEAGKPGKAGERGPPGPQGARGFPGTPGLPGVKGHRGYPGLDGAKGEAGAPGVKGESGSPGENGSPGPMGPRGLPGERGRTGPAGAAGARGNDGQPGPAGPPGPVGPAGGPGFPGAPGAKGEAGPTGARGPEGAQGPRGEPGTPGSPGPAGASGNPGTDGIPGAKGSAGAPGIAGAPGFPGPRGPPGPQGATGPLGPKGQTGEPGIAGFKGEQGPKGEPGPAGPQGAPGPAGEEGKRGARGEPGGVGPIGPPGERGAPGNRGFPGQDGLAGPKGAPGERGPSGLAGPKGANGDPGRPGEPGLPGARGLTGRPGDAGPQGKVGPSGAPGEDGRPGPPGPQGARGQPGVMGFPGPKGANGEPGKAGEKGLPGAPGLRGLPGKDGETGAAGPPGPAGPAGERGEQGAPGPSGFQGLPGPPGPPGEGGKPGDQGVPGEAGAPGLVGPRGERGFPGERGSPGAQGLQGPRGLPGTPGTDGPKGASGPAGPPGAQGPPGLQGMPGERGAAGIAGPKGDRGDVGEKGPEGAPGKDGGRGLTGPIGPPGPAGANGEKGEVGPPGPAGSAGARGAPGERGETGPPGPAGFAGPPGADGQPGAKGEQGEAGQKGDAGAPGPQGPSGAPGPQGPTGVTGPKGARGAQGPPGATGFPGAAGRVGPPGSNGNPGPPGPPGPSGKDGPKGARGDSGPPGRAGEPGLQGPAGPPGEKGEPGDDGPSGAEGPPGPQGLAGQRGIVGLPGQRGERGFPGLPGPSGEPGKQGAPGASGDRGPPGPVGPPGLTGPAGEPGREGSPGADGPPGRDGAAGVKGDRGETGAVGAPGAPGPPGSPGPAGPTGKQGDRGEAGAQGPMGPSGPAGARGIQGPQGPRGDKGEAGEPGERGLKGHRGFTGLQGLPGPPGPSGDQGASGPAGPSGPRGPPGPVGPSGKDGANGIPGPIGPPGPRGRSGETGPAGPPGNPGPPGPPGPPGPGIDMSAFAGLGPREKGPDPLQYMRADQAAGGLRQHDAEVDATLKSLNNQIESIRSPEGSRKNPARTCRDLKLCHPEWKSGDYWIDPNQGCTLDAMKVFCNMETGETCVYPNPANVPKKNWWSSKSKEKKHIWFGETINGGFHFSYGDDNLAPNTANVQMTFLRLLSTEGSQNITYHCKNSIAYLDEAAGNLKKALLIQGSNDVEIRAEGNSRFTYTALKDGCTKHTGKWGKTVIEYRSQKTSRLPIIDIAPMDIGGPEQEFGVDIGPVCFL

SEQ ID NO: 910865 - protein, 855 aa, Homo sapiens
SGVVQEDACAAHTADLPWALLAVALRVSGTLAQLTFSFPLQGPAGERGEQGAPGPSGFQGLPGPPGPPGEGGKPGDQGVPGEAGAPGLVGPRGERGFPGERGSPGAQGLQGPRGLPGTPGTDGPKGASGPAGPPGAQGPPGLQGMPGERGAAGIAGPKGDRGDVGEKGPEGAPGKDGGRGLTGPIGPPGPAGANGEKGEVGPPGPAGSAGARGAPGERGETGPPGPAGFAGPPGADGQPGAKGEQGEAGQKGDAGAPGPQGPSGAPGPQGPTGVTGPKGGNPGPPGPPGPSGKDGPKGARGDSGPPGRAGEPGLQGPAGPPGEKGEPGDDGPSGAEGPPGPQGLAGQRGIVGLPGQRGERGFPGLPGPSGEPGKQGAPGASGDRGPPGPVGPPGLTGPAGEPGREGSPGADGPPGRDGAAGVKGDRGETGAVGAPGAPGPPGSPGPAGPTGKQGDRGEAGAQGPMGPSGPAGARGIQGPQGPRGDKGEAGEPGERGLKGHRGFTGLQGLPGPPGPSGDQGASGPAGPSGPRGPPGPVGPSGKDGANGIPGPIGPPGPRGRSGETGPAGPPGNPGPPGPPGPPGPGIDMSAFAGLGPREKGPDPLQYMRADQAAGGLRQHDAEVDATLKSLNNQIESIRSPEGSRKNPARTCRDLKLCHPEWKSGDYWIDPNQGCTLDAMKVFCNMETGETCVYPNPANVPKKNWWSSKSKEKKHIWFGETINGGFHFSYGDDNLAPNTANVQMTFLRLLSTEGSQNITYHCKNSIAYLDEAAGNLKKALLIQGSNDVEIRAEGNSRFTYTALKDGCTKHTGKWGKTVIEYRSQKTSRLPIIDIAPMDIGGPEQEFGVDIGPVCFL

SEQ ID NO: 910866 - protein, 215 aa, Homo sapiens
MIRLGAPQSLVLLTLLVAAVLRCQGQDVRQPGPKGQKGEPGDIKDIVGPKGPPGPQGPAGEQGPRGDRGDKGEKGAPGPRGRDGEPGTPGNPGPPGPPGPPGPPGLGGNFAAQMAGGFDEKAGGAQLGVMQGPMGPMGPRGPPGPAGAPGPQGFQGNPGEPGEPGVSGPMGPRGPPGPPGKPGDDGEAGKPGKAGPGQGLQLCCPVQEPRAKCGI

SEQ ID NO: 910867 - protein, 266 aa, Homo sapiens [sequence omitted]

SEQ ID NO: 910868 - protein, 85 aa, Homo sapiens
RQVVLHRRLYSTRQVVLHRQVVLQNGDWTFQTLVMLETVPRSGEVYTCQVEHPSLTSPLTVEWKHGLKVQYAILEYNLPWGILES

SEQ ID NO: 910869 - protein, 266 aa, Homo sapiens [sequence omitted]

SEQ ID NO: 910870 - protein, 128 aa, Homo sapiens
MVCLKLPGGSCMAALTVTLTVLSSPLALAGDTQPRFLEQAKCECHFLNGTERVWNLIRYIYNQEEYARYNSDLGEYQAVTELGRPDAEYWNSQKDLLEAEAGRGGHLLQTQLRGCVRASQCSGESSLR

SEQ ID NO: 910871 - protein, 268 aa, Homo sapiens
ETKAGKVAASKLGQKVSAVNVVIFTVSSGILLAEVQSVLLIPEVEWNSPAPRKEQGQATKPPDSHSASWLWADSDPCSSMSTVERAHQALGAPLGKVYNLSNFRGTLSSITRVRKVQYSALDHPSSVTARYSPGPVLFSSMVCLKFPGGSCMAALTVTLMVLSSPLALAGDTRPRFLEQAKCECHFLNGTERVWNLIRYIYNQEEYARYNSDLGEYQAVTELGRPDAEYWNSQKDLLEAEAGRGGHLLQTQLRGCVRASQCSGESSLR

SEQ ID NO: 910872 - protein, 108 aa, Homo sapiens
MLETVPRSGEVYTCQVEHPSLTSPLTVEWRARSESAQSKMLSGVGGFVLGLLFLGAGLFIYFRNQKGHSGLQPTGNTFSSSLRNRFGGQAQWLTPVIPALWEAEAGES

SEQ ID NO: 910873 - protein, 157 aa, Homo sapiens
RVGPVKVPSARTPPRESGLVASLSVSSQEAALCDRIVRVPTARFLEQAKCECHFLNGTERVWNLIRYIYNQEEYARYNSDLGEYQAVTELGRPDAEYWNSQKDLLEAEAGRGGHLLQTQLRGCVRASQCSGEVSMVEGGAWVPVSGESVYVCVCVCV

SEQ ID NO: 910874 - protein, 257 aa, Homo sapiens
ETKAGKVAASKLGQKVSAVNVVIFTVSSGILLAEVQSVLLIPEVEWNSPAPRKEQGQATKPPDSHSASWLWADSDPCSSMSTVERAHQALGAPLGKVYNLSNFRGTLSSITRVRKVQYSALDHPSVRHRPVLPWSCPVLQHGVSEVPWRLLHGSSDSDTDGAELPTGFGWGHPTTFLVSRLNMSVISSTGRSGCGSWIRYFYNQEEYVRFDSDVGEYRAVTELGRPERRVLEQPEGPPGRQRRAAVDTYCRHNYGVV

SEQ ID NO: 910875 - protein, 175 aa, Homo sapiens
YPVRRRLSPTPRWTPTADTTTGLCESFTVQRRVQPKVTVYPSKTQPLQHHNLLVCSVNGFYPGSIEVRWFRNGQEEKAGVVSTGLIQNGDWTFQTLVMLETVPRSGEVYTCQVEHPSLTSPLTVEWRARSESAQSKMLSGVGGFVLGLLFLGAGLFIYFRNQKGHSGLQPTGFLS

SEQ ID NO: 910876 - protein, 228 aa, Homo sapiens
ETKAGKVAASKLGQKVSAVNVVIFTVSSGILLAEVQSVLLIPEVEWNSPAPRKEQGQATKPPDSHSASWLWADSDPCSSMSTVERAHQALGAPLGKVYNLSNFRGTLSSITRVRKVQYSALDHPSSVTARYSPGPVLFSSMVCLKFPGGSCMAALTVTLMVLSSPLALAGDTRPRFLEQAKCECHFLNGTERVWNLIRYIYNQEEYARYNSDLGEYQAVTELGPSRPW

SEQ ID NO: 910877 - protein, 266 aa, Homo sapiens [sequence omitted]

SEQ ID NO: 910878 - protein, 525 aa, Homo sapiens
MRRRRRRDGFYPAPDFRDREAEDMAGVFDIDLDQPEDAGSEDELEEGGQLNESMDHGGVGPYELGMEHCEKFEISETSVNRGPEKIRPECFELLRVLGKGGYGKVFQVRKVTGANTGKIFAMKVLKKAMIVRNAKDTAHTKAERNILEEVKHPFIVDLIYAFQTGGKLYLILEYLSGGELFMQLEREGIFMEDTACFYLAEISMALGHLHQKGIIYRDLKPENIMLNHQGHVKLTDFGLCKESIHDGTVTHTFCGTIEYMAPEILMRSGHNRAVDWWSLGALMYDMLTGAPPFTGENRKKTIDKILKCKLNLPPYLTQEARDLLKKLLKRNAASRLGAGPGDAGEVQAHPFFRHINWEELLARKVEPPFKPLLQSEEDVSQFDSKFTRQTPVDSPDDSTLSESANQVFLGFTYVAPSVLESVKEKFSFEPKIRSPRRFIGSPRTPVSPVKFSPGDFWGRGASASTANPQTPVEYPMETSGIEQMDVTMSGEASAPLPIRQPNSGPYKKQAFPMISKRPEHLRMNL

SEQ ID NO: 910879 - protein, 502 aa, Homo sapiens
MAGVFDIDLDQPEDAGSEDELEEGGQLNESMDHGGVGPYELGMEHCEKFEISETSVNRGPEKIRPECFELLRVLGKGGYGKVFQVRKVTGANTGKIFAMKVLKKAMIVRNAKDTAHTKAERNILEEVKHPFIVDLIYAFQTGGKLYLILEYLSGGELFMQLEREGIFMEDTACFYLAEISMALGHLHQKGIIYRDLKPENIMLNHQGHVKLTDFGLCKESIHDGTVTHTFCGTIEYMAPEILMRSGHNRAVDWWSLGALMYDMLTGAPPFTGENRKKTIDKILKCKLNLPPYLTQEARDLLKKLLKRNAASRLGAGPGDAGEVQAHPFFRHINWEELLARKVEPPFKPLLQSEEDVSQFDSKFTRQTPVDSPDDSTLSESANQVFLGFTYVAPSVLESVKEKFSFEPKIRSPRRFIGSPRTPVSPVKFSPGDFWGRGASASTANPQTPVEYPMETSGIEQMDVTMSGEASAPLPIRQPNSGPYKKQAFPMISKRPEHLRMNL

SEQ ID NO: 910880 - protein, 301 aa, Homo sapiens
MALGHLHQKGIIYRDLKPENIMLNHQGHVKLTDFGLCKESIHDGTVTHTFCGTIEYMAPEILMRSGHNRAVDWWSLGALMYDMLTGAPPFTGENRKKTIDKILKCKLNLPPYLTQEARDLLKKAHPFFRHINWEELLARKVEPPFKPLLQSEEDVSQFDSKFTRQTPVDSPDDSTLSESANQVFLGFTYVAPSVLESVKEKFSFEPKIRSPRRFIGSPRTPVSPVKFSPGDFWGRGASASTANPQTPVEYPMETSGIEQMDVTMSGEASAPLPIRQPNSGPYKKQAFPMISKRPEHLRMNL

SEQ ID NO: 910881 - protein, 502 aa, Homo sapiens; identical to SEQ ID NO: 910879

SEQ ID NO: 910882 - protein, 531 aa, Homo sapiens
MRRRRRRDGFYPAPDFRDREAEDMAGVFDIDLDQPEDAGSEDELEEGGQLNESMDHGGVGPYELGMEHCEKFEISETSVNRGPEKIRPECFELLRVLGKGGYGKVFQVRKVTGANTGKIFAMKVLKKMISFPLAMIVRNAKDTAHTKAERNILEEVKHPFIVDLIYAFQTGGKLYLILEYLSGGELFMQLEREGIFMEDTACFYLAEISMALGHLHQKGIIYRDLKPENIMLNHQGHVKLTDFGLCKESIHDGTVTHTFCGTIEYMAPEILMRSGHNRAVDWWSLGALMYDMLTGAPPFTGENRKKTIDKILKCKLNLPPYLTQEARDLLKKLLKRNAASRLGAGPGDAGEVQAHPFFRHINWEELLARKVEPPFKPLLQSEEDVSQFDSKFTRQTPVDSPDDSTLSESANQVFLGFTYVAPSVLESVKEKFSFEPKIRSPRRFIGSPRTPVSPVKFSPGDFWGRGASASTANPQTPVEYPMETSGIEQMDVTMSGEASAPLPIRQPNSGPYKKQAFPMISKRPEHLRMNL

SEQ ID NO: 910883 - protein, 451 aa, Homo sapiens
MRRRRRRDGFYPAPDFRDREAEDMAGVFDIDLDQPEDAGSEDELEEGGQLNESMDHGGVGPYELGMEHCEKFEISETSVNRGPEKIRPECFELLRVLGKGGYGKVFQVRKVTGANTGKIFAMKVLKKAMIVRNAKDTAHTKAERNILEEVKHPFIVDLIYAFQTGGKLYLILEYLSGGELFMQLEREGIFMEDTACFYLAEISMALGHLHQKGIIYRDLKPENIMLNHQGHVKLTDFGLCKESIHDGTVTHTFCGTIEYMAPEILMRSGHNRAVDWWSLGALMYDMLTGAPPFTGENRKKTIDKILKCKLNLPPYLTQEARDLLKKLLKRNAASRLGAGPGDAGEVQAHPFFRHINWEELLARKVEPPFKPLLQSEEDVSQFDSKFTRQTPVDSPDDSTLSESANQVFLGFTYVAPSVLESVKEKFSFEPKIRSPRRFIGSPRTPVSSSLS

SEQ ID NO: 910884 - protein, 304 aa, Homo sapiens
MRRRRRRDGFYPAPDFRDREAEDMAGVFDIDLDQPEDAGSEDELEEGGQLNESMDHGGVGPYELGMEHCEKFEISETSVNRGPEKIRPECFELLRVLGKGGYGKVFQVRKVTGANTGKIFAMKVLKKAMIVRNAKDTAHTKAERNILEEVKHPFIVDLIYAFQTGGKLYLILEYLSGGELFMQLEREGIFMEDTACFYLAEISMALGHLHQKGIIYRDLKPENIMLNHQGHVKLTDFGLCKESIHDGTVTHTFCGTIEYMAPEILMRSGHNRAVDWWSLGALMYDMLTGAVGAQLKAACIIGLC

SEQ ID NO: 910885 - protein, 95 aa, Homo sapiens
RLFFQKLRGSERTVCAPQDGREEAKIVLIRFPMQRNLVVIPKSVTPERIAENFKVFDFELSSQDMTTLLSYNRNWRVCALLSCTSHKDYPFHEEF

SEQ ID NO: 910886 - protein, 238 aa, Homo sapiens
LLCRLCILRGSRSFSFQSPPGQVTEAVKVAIDVGYRHIDCAHVYQNENEVGVAIQEKLREQVVKREELFIVSKLWCTYHEKGLVKGACQKTLSDLKLDYLDLYLIHWPTGFKPGKEFFPLDESGNVVPSDTNILDTWAAMEELVDEGLVKAIGISNFNHLQVEMILNKPGLKYKPAVNQIECHPYLTQEKVNPVLPVQRHRGDQPTAPSALLTGPGPSPKDPSLLGGSQDQGDRSQAQ

SEQ ID NO: 910887 - protein, 351 aa, Homo sapiens
MGCLLFSLKHSLSHQIQQLRNSFLPRGARASVGGGKNPLPLGPGGRSIPADPWGRPPRHPQRNQSEGSFAQRRANRRRPFCRPHGLFKGTRRGQGRTVLGGGLGSAAAMASRLLLNNGAKMPILGLGTWKSPPGQVTEAVKVAIDVGYRHIDCAHVYQNENEVGVAIQEKLREQVVKREELFIVSKLWCTYHEKGLVKGACQKTLSDLKLDYLDLYLIHWPTGFKPGKEFFPLDESGNVVPSDTNILDTWAAMEELVDEGLVKAIGISNFNHLQVEMILNKPGLKYKPAVNQIECHPYLTQEKVNPVLPVQRHRGDQPTAPSALLTGPGPSPKDPSLLGGSQDQGDRSQAQ

SEQ ID NO: 910888 - protein, 243 aa, Homo sapiens
MASRLLLNNGAKMPILGLGTWKSPPGQVTEAVKVAIDVGYRHIDCAHVYQNENEVGVAIQEKLREQVVKREELFIVSKLWCTYHEKGLVKGACQKTLSDLKLDYLDLYLIHWPTGFKPGKEFFPLDESGNVVPSDTNILDTWAAMEELVDEGLVKAIGISNFNHLQVEMILNKPGLKYKPAVNQIECHPYLTQEKVNPVLPVQRHRGDQPTAPSALLTGPGPSPKDPSLLGGSQDQGDRSQAQ

SEQ ID NO: 910889 - protein, 243 aa, Homo sapiens; identical to SEQ ID NO: 910888

SEQ ID NO: 910890 - protein, 243 aa, Homo sapiens; identical to SEQ ID NO: 910888

SEQ ID NO: 910891 - protein, 243 aa, Homo sapiens; identical to SEQ ID NO: 910888

SEQ ID NO: 910892 - protein, 273 aa, Homo sapiens
LATAPGDYGNIATEPQLSDVSHAVRGSAAAMASRLLLNNGAKMPILGLGTWKSPPGQVTEAVKVAIDVGYRHIDCAHVYQNENEVGVAIQEKLREQVVKREELFIVSKLWCTYHEKGLVKGACQKTLSDLKLDYLDLYLIHWPTGFKPGKEFFPLDESGNVVPSDTNILDTWAAMEELVDEGLVKAIGISNFNHLQVEMILNKPGLKYKPAVNQIECHPYLTQEKVNPVLPVQRHRGDQPTAPSALLTGPGPSPKDPSLLGGSQDQGDRSQAQ

SEQ ID NO: 910893 - protein, 243 aa, Homo sapiens; identical to SEQ ID NO: 910888

SEQ ID NO: 910894 - protein, 243 aa, Homo sapiens; identical to SEQ ID NO: 910888

SEQ ID NO: 910895 - protein, 196 aa, Homo sapiens
MGFGERRLLCLSSQEAALWLAMMTCALSLAELWCTYHEKGLVKGACQKTLSDLKLDYLDLYLIHWPTGFKPGKEFFPLDESGNVVPSDTNILDTWAAMEELVDEGLVKAIGISNFNHLQVEMILNKPGLKYKPAVNQIECHPYLTQEKVNPVLPVQRHRGDQPTAPSALLTGPGPSPKDPSLLGGSQDQGDRSQAQ

SEQ ID NO: 910896 - protein, 243 aa, Homo sapiens; identical to SEQ ID NO: 910888

SEQ ID NO: 910897 - protein, 351 aa, Homo sapiens; identical to SEQ ID NO: 910887

SEQ ID NO: 910898 - protein, 178 aa, Homo sapiens
MASRLLLNNGAKMPILGLGTWKSPPGQVTEAVKVAIDVGYRHIDCAHVYQNENEVGVAIQEKLREQVVKREELFIVSKAMEELVDEGLVKAIGISNFNHLQVEMILNKPGLKYKPAVNQIECHPYLTQEKVNPVLPVQRHRGDQPTAPSALLTGPGPSPKDPSLLGGSQDQGDRSQAQ

SEQ ID NO: 910899 - protein, 391 aa, Homo sapiens
MGCLLFSLKHSLSHQIQQLRNSFLPRGARASVGGGKNPLPLGPGGRSIPADPWGRPPRHPQRNQSEGSFAQRRANRRRPFCRPHGLFKGTRRGQGRTVLGGGLGSAAAMASRLLLNNGAKMPILGLGTWKSPPGQVTEAVKVAIDVGYRHIDCAHVYQNENEVGVAIQEKLREQVVKREELFIVSKLWCTYHEKGLVKGACQKTLSDLKLDYLDLYLIHWPTGFKPGKEFFPLDESGNVVPSDTNILDTWAAMEELVDEGLVKAIGISNFNHLQVEMILNKPGLKYKPAVNQIECHPYLTQEKVNPVLPVQRHRGDQPTAPSALLTGPGPSSRTLYSWERFRGIKETSKAEARSKSNRTRVPASRYPNATRTTSGEEPTRLRQPERHCSET

SEQ ID NO: 910900 - protein, 119 aa, Homo sapiens
MTTIPDRGGPVFGQGYTSSCAPLLEPPNKLSCQALGQARRTLLSWEDPRIKAIAAKHNKTTAQIPKSVTPERIAENFKVFDFELSSQDMTTLLSYNRNWRVCALLSCTSHKDYPFHEEF

SEQ ID NO: 910901 - protein, 243 aa, Homo sapiens; identical to SEQ ID NO: 910888

SEQ ID NO: 910902 - protein, 93 aa, Homo sapiens
MPVVPATREVLGQQSKTSSLKTNKQTNYQGACQKTLSDLKLDYLDLYLIHWPTGFKPGKEFFPLDESGNVVPSDTNILDTWAGKTAPGWTLFS

SEQ ID NO: 910903 - protein, 267 aa, Homo sapiens
MARGGTRRGQGRTVLGGGLGSAAAMASRLLLNNGAKMPILGLGTWKSPPGQVTEAVKVAIDVGYRHIDCAHVYQNENEVGVAIQEKLREQVVKREELFIVSKLWCTYHEKGLVKGACQKTLSDLKLDYLDLYLIHWPTGFKPGKEFFPLDESGNVVPSDTNILDTWAAMEELVDEGLVKAIGISNFNHLQVEMILNKPGLKYKPAVNQIECHPYLTQEKVNPVLPVQRHRGDQPTAPSALLTGPGPSPKDPSLLGGSQDQGDRSQAQ

SEQ ID NO: 910904 - protein, 243 aa, Homo sapiens; identical to SEQ ID NO: 910888

SEQ ID NO: 910905 - protein, 243 aa, Homo sapiens; identical to SEQ ID NO: 910888

SEQ ID NO: 910906 - protein, 243 aa, Homo sapiens; identical to SEQ ID NO: 910888

SEQ ID NO: 910907 - protein, 243 aa, Homo sapiens; identical to SEQ ID NO: 910888

SEQ ID NO: 910908 - protein, 309 aa, Homo sapiens
MGCLLFSLKHSLSHQIQQLRNSFLPRGARASVGGGKNPLPLGPGGRSIPADPWGRPPRHPQRNQSEGSFAQRRANRRRPFCRPHGLFKSPPGQVTEAVKVAIDVGYRHIDCAHVYQNENEVGVAIQEKLREQVVKREELFIVSKLWCTYHEKGLVKGACQKTLSDLKLDYLDLYLIHWPTGFKPGKEFFPLDESGNVVPSDTNILDTWAAMEELVDEGLVKAIGISNFNHLQVEMILNKPGLKYKPAVNQIECHPYLTQEKVNPVLPVQRHRGDQPTAPSALLTGPGPSPKDPSLLGGSQDQGDRSQAQ

SEQ ID NO: 910909 - protein, 243 aa, Homo sapiens; identical to SEQ ID NO: 910888

SEQ ID NO: 910910 - protein, 208 aa, Homo sapiens
MASRLLLNNGAKMPILGLGTWKSPPGQVTEAVKVAIDVGYRHIDCAHVYQNENEVGVAIQEKLREQVVKREELFIVSKLWCTYHEKGLVKGACQKTLSDLKLDYLDLYLIHWPTGFKPGKEFFPLDESGNVVPSDTNILDTWAAMEELVDEGLVKAIGISNFNHLQVEMILNKPGLKYKPAVNQRRKLIQYCQSKGIVVTSLQPPRLS

SEQ ID NO: 910911 - protein, 202 aa, Homo sapiens
MASRLLLNNGAKMPILGLGTWKSPPGQVTEAVKVAIDVGYRHIDCAHVYQNENEVGVAIQEKLREQVVKREELFIVSKLWCTYHEKGLVKGACQKTLSDLKLDYLDLYLIHWPTGFKPGKEFFPLDESGNVVPSDTNILDTWAIECHPYLTQEKVNPVLPVQRHRGDQPTAPSALLTGPGPSPKDPSLLGGSQDQGDRSQAQ

SEQ ID NO: 910912 - protein, 113 aa, Homo sapiens
MGTRRGQGRTVLGGGLGSAAAMASRLLLNNGAKMPILGLGTWKSPPGQVTEAVKVAIDVGYRHIDCAHVYQNENEVGVAIQEKLREQAGESYWHLQLQPSPGGDDLKQTWLEV

SEQ ID NO: 910913 - protein, 154 aa, Homo sapiens
MASRLLLNNGAKMPILGLGTWKSPPGQVTEAVKVAIDVGYRHIDCAHVYQNENEVGVAIQEKLREQVVKREELFIVSKLWCTYHEKGLVKGACQKTLSDLKLDYLDLYLIHWPTGFKPGKEFFPLDESGNVVPSDTNILDTWAGKTAPGWTLFS

SEQ ID NO: 910914 - protein, 897 aa, Homo sapiens
MVLAQGLLSMALLALCWERSLAGAEETIPLQTLRCYNDYTSHITCRWADTQDAQRLVNVTLIRRVNEDLLEPVSCDLSDDMPWSACPHPRCVPRRCVIPCQSFVVTDVDYFSFQPDRPLGTRLTVTLTQHVQPPEPRDLQISTDQDHFLLTWSVALGSPQSHWLSPGDLEFEVVYKRLQDSWEDAAILLSNTSQATLGPEHLMPSSTYVARVRTRLAPGSRLSGRPSKWSPEVCWDSQPGDEAQPQNLECFFDGAAVLSCSWEVRKEVASSVSFGLFYKPSPDAGEEECSPVLREGLGSLHTRHHCQIPVPDPATHGQYIVSVQPRRAEKHIKSSVNIQMAPPSLNVTKDGDSYSLRWETMKMRYEHIDHTFEIQYRKDTATWKDSKTETLQNAHSMALPALEPSTRYWARVRVRTSRTGYNGIWSEWSEARSWDTESVLPMWVLALIVIFLTIAVLLALRFCGIYGYRLRRKWEEKIPNPSKSHLFQNGSAELWPPGSMSAFTSGSPPHQGPWGSRFPELEGVFPVGFGDSEVSPLTIEDPKHVCDPPSGPDTTPAASDLPTEQPPSPQPGPPAASHTPEKQASSFDFNGPYLGPPHSRSLPDILGQPEPPQEGGSQKSPPPGSLEYLCLPAGGQVQLVPLAQAMGPGQAVEVERRPSQGAAGSPSLESGGGPAPPALGPRVGGQDQKDSPVAIPMSSGDTEDPGVASGYVSSADLVFTPNSGASSVSLVPSLGLPSDQTPSLCPGLASGPPGAPGPVKSGFEGYVELPPIEGRSPRSPRNNPVPPEAKSPVLNPGERPADVSPTSPQPEGLLVLQQVGDYCFLPGLGPGPLSLRSKPSSPGPGPEIKNLDQAFQVKKPPGQAVPQVPVIQLFKALKQQDYLSLPPWEVNKPGEVC

SEQ ID NO: 910915 - protein, 897 aa, Homo sapiens; identical to SEQ ID NO: 910914

SEQ ID NO: 910916 - protein, 739 aa, Homo sapiens
VLEVGFHLREDAQLSPLTVASGLLGDAAILLSNTSQATLGPEHLMPSSTYVARVRTRLAPGSRLSGRPSKWSPEVCWDSQPGDEAQPQNLECFFDGAAVLSCSWEVRKEVASSVSFGLFYKPSPDAGEEECSPVLREGLGSLHTRHHCQIPVPDPATHGQYIVSVQPRRAEKHIKSSVNIQMAPPSLNVTKDGDSYSLRWETMKMRYEHIDHTFEIQYRKDTATWKDSKTETLQNAHSMALPALEPSTRYWARVRVRTSRTGYNGIWSEWSEARSWDTESVLPMWVLALIVIFLTIAVLLALRFCGIYGYRLRRKWEEKIPNPSKSHLFQNGSAELWPPGSMSAFTSGSPPHQGPWGSRFPELEGVFPVGFGDSEVSPLTIEDPKHVCDPPSGPDTTPAASDLPTEQPPSPQPGPPAASHTPEKQASSFDFNGPYLGPPHSRSLPDILGQPEPPQEGGSQKSPPPGSLEYLCLPAGGQVQLVPLAQAMGPGQAVEVERRPSQGAAGSPSLESGGGPAPPALGPRVGGQDQKDSPVAIPMSSGDTEDPGVASGYVSSADLVFTPNSGASSVSLVPSLGLPSDQTPSLCPGLASGPPGAPGPVKSGFEGYVELPPIEGRSPRSPRNNPVPPEAKSPVLNPGERPADVSPTSPQPEGLLVLQQVGDYCFLPGLGPGPLSLRSKPSSPGPGPEIKNLDQAFQVKKPPGQAVPQVPVIQLFKALKQQDYLSLPPWEVNKPGEVC

SEQ ID NO: 910917 - protein, 74 aa, Homo sapiens
AFYGVRVTCALQSARLSIAFMLKPYSFADEGLRLTEETGLAQGPSAAGGRGGLEPPVSTQKAMQALTAPQRSSP

SEQ ID NO: 910918 - protein, 897 aa, Homo sapiens; identical to SEQ ID NO: 910914

SEQ ID NO: 910919 - protein, 427 aa, Homo sapiens
MAGAYGERGQAKREHLFQNGSAELWPPGSMSAFTSGSPPHQGPWGSRFPELEGVFPVGFGDSEVSPLTIEDPKHVCDPPSGPDTTPAASDLPTEQPPSPQPGPPAASHTPEKQASSFDFNGPYLGPPHSRSLPDILGQPEPPQEGGSQKSPPPGSLEYLCLPAGGQVQLVPLAQAMGPGQAVEVERRPSQGAAGSPSLESGGGPAPPALGPRVGGQDQKDSPVAIPMSSGDTEDPGVASGYVSSADLVFTPNSGASSVSLVPSLGLPSDQTPSLCPGLASGPPGAPGPVKSGFEGYVELPPIEGRSPRSPRNNPVPPEAKSPVLNPGERPADVSPTSPQPEGLLVLQQVGDYCFLPGLGPGPLSLRSKPSSPGPGPEIKNLDQAFQVKKPPGQAVPQVPVIQLFKALKQQDYLSLPPWEVNKPGEVC

SEQ ID NO: 910920 - protein, 2341 aa, Homo sapiens
MGSQTLQILRQGVWAALSGGWYYDPHQATFVNALHLYLWLFLLGLPFTLYMALPSTMIIVAVYCPVIAAVFIVLKMVNYRLHRALDAGEVVDRTANEFTDQRTKAEQGNCSTRRKDSNGPSDPGGGIEMSEFIREATPPVGCSSRNSYAGLDPSNQIGSGSSRLGTAATIKGDTDTAKTSDDISLSLGQSSSLCKEGSEEQDLAADRKLFRLVSNDSFISIQPSLSSCGQDLPRDFSDKVNLPSHNHHHHVDQSLSSACDTEVASLVPLHSHSYRKDHRPRGVPRTSSSAVAFPDTSLNDFPLYQQRRGLDPVSELESSKPLSGSKESLVENSGLSGEFQLAGDLKINTSQPPTKSGKSKPLKAEKSMDSLRSLSTRSSGSTESYCSGTDRDTNSTVSSYKSEQTSSTHIESILSEHEESPKAGTKSGRKKECCAGPEEKNSCASDKRTSSEKIAMEASTNSGVHEAKDPTPSDEMHNQRGLSTSASEEANKNPHANEFTSQGDRPPGNTAENKEEKSDKSAVSVDSKVRKDVGGKQKEGDVRPKSSSVIHRTASAHKSGRRRTGKKRASSFDSSRHRDYVCFRGVSGTKPHSAIFCHDEDSSDQSDLSRASSVQSAHQFSSDSSSSTTSHSCQSPEGRYSALKTKHTHKERGTDSEHTHKAHLVPEGTSKKRATRRTSSTNSAKTRARVLSLDSGTVACLNDSNRLMAPESIKPLTTSKSDLEAKEGEVLDELSLLGRASQLETVTRSRNSLPNQVAFPEGEEQDAVSGAAQASEEAVSFRRERSTFRRQAVRRRHNAGSNPTPPTLLIGSPLSLQDGQQGQQSTAQVKVQSRPPSQAAVLSASASLLVRNGSVHLEASHDNASAVGGSSLHDELGKFSSTLYETGGCDMSLVNFEPAARRASNICDTDSHVSSSTSVRFYPHDVLSLPQIRLNRLLTIDTDLLEQQDIDLSPDLAATYGPTEEAAQKVKHYYRFWILPQLWIGINFDRLTLLALFDRNREILENVLAVILAILVAFLGSILLIQGFFRDIWVFQFCLVIASCQYSLLKSVQPDSSSPRHGHNRIIAYSRPVYFCICCGLIWLLDYGSRNLTATKFKLYGITFTNPLVFISARDLVIVFTLCFPIVFFIGLLPQVNTFVMYLCEQLDIHIFGGNATTSLLAALYSFICSIVAVALLYGLCYGALKDSWDGQHIPVLFSIFCGLLVAVSYHLSRQSSDPSVLFSLVQSKIFPKTEEKNPEDPLSEVKDPLPEKLRNSVSERLQSDLVVCIVIGVLYFAIHVSTVFTVLQPALKYVLYTLVGFVGFVTHYVLPQVRKQLPWHCFSHPLLKTLEYNQYEVRNAATMMWFEKLHVWLLFVEKNIIYPLIVLNELSSSAETIASPKKLNTELGALMITVAGLKLLRSSFSSPTYQYVTVIFTVLFFKFDYEAFSETMLLDLFFMSILFNKLWELLYKLQFVYTYIAPWQITWGSAFHAFAQPFAVPHSAMLFIQAAVSAFFSTPLNPFLGSAIFITSYVRPVKFWERDYNTKRVDHSNTRLASQLDRNPGSDDNNLNSIFYEHLTRSLQHSLCGDLLLGRWGNYSTGDCFILASDYLNALVHLIEIGNGLVTFQLRGLEFRGTYCQQREVEAITEGVEEDEGFCCCEPGHIPHMLSFNAAFSQRWLAWEVIVTKYILEGYSITDNSAASMLQVFDLRKVLTTYYVKGIIYYVTTSSKLEEWLANETMQEGLRLCADRNYVDVDPTFNPNIDEDYDHRLAGISRESFCVIYLNWIEYCSSRRAKPVDVDKDSSLVTLCYGLCVLGRRALGTASHHMSSNLESFLYGLHALFKGDFRISSIRDEWIFADMELLRKVVVPGIRMSIKLHQDHFTSPDEYDDPTVLYEAIVSHEKNLVIAHEGDPAWRSAVLANSPSLLALRHVMDDGTNEYKIIMLNRRYLSFRVIKVNKECVRGLWAGQQQELVFLRNRNPERGSIQNAKQALRNMINSSCDQPIGYPIFVSPLTTSYSDSHEQLKDILGGPISLGNIRNFIVSTWHRLRKGCGAGCNSGGNIEDSDTGGGTSCTGNNATTANNPHSNVTQGSIGNPGQGSGTGLHPPVTSYPPTLGTSHSSHSVQSGLVRQSPARASVASQSSYCYSSRHSSLRMSTTGFVPCRRSSTSQISLRNLPSSIQSRLSMVNQMEPSGQSGLACVQHGLPSSSSSSQSIPACKHHTLVGFLATEGGQSSATDAQPGNTLSPANNSHSKKAEVIYRVQIVDPSQILEGINLSKRKELQWPDEGIRLKAGRNSWKDWSPQEGMEGHVIHRWVPCSRDPGTRSHIDKAVLLVQIDDKYVTVIETGVLELGAEV

SEQ ID NO: 910921 - protein, 2341 aa, Homo sapiens; identical to SEQ ID NO: 910920

SEQ ID NO: 910922 - protein, 2341 aa, Homo sapiens
MGSQTLQILRQGVWAALSGGWYYDPHQATFVNALHLYLWLFLLGLPFTLYMALPSTMIIVAVYCPVIAAVFIVLKMVNYRLHRALDAGEVVDRTANEFTDQRTKAEQGNCSTRRKDSNGPSDPGGGIEMSEFIREATPPVGCSSRNSYAGLDPSNQIGSGSSRLGTAATIKGDTDTAKTSDDISLSLGQSSSLCKEGSEEQDLAADRKLFRLVSNDSFISIQPSLSSCGQDLPRDFSDKVNLPSHNHHHHVDQSLSSACDTEVASLVPLHSHSYRKDHRPRGVPRTSSSAVAFPDTSLNDFPLYQQRRGLDPVSELESSKPLSGSKESLVENSGLSGEFQLAGDLKINTSQPPTKSGKSKPLKAEKSMDSLRSLSTRSSGSTESYCSGTDRDTNSTVSSYKSEQTSSTHIESILSEHEESPKAGTKSGRKKECCAGPEEKNSCASDKRTSSEKIAMEASTNSGVHEAKDPTPSDEMHNQRGLSTSASEEANKNPHANEFTSQGDRPPGNTAENKEEKSDKSAVSVDSKVRKDVGGKQKEGDVRPKSSSVIHRTASAHKSGRRRTGKKRASSFDSSRHRDYVCFRGVSGTKPHSAIFCHDEDSSDQSDLSRASSVQSAHQFSSDSSSSTTSHSCQSPEGRYSALKTKHTHKERGTDSEHTHKAHLVPEGTSKKRATRRTSSTNSAKTRARVLSLDSGTVACLNDSNRLMAPESIKPLTTSKSDLEAKEGEVLDELSLLGRASQLETVTRSRNSLPNQVAFPEGEEQDAVSGAAQASEEAVSFRRERSTFRRQAVRRRHNAGSNPTPPTLLIGSPLSLQDGQQGQQSTAQVKVQSRPPSQAAVLSASASLLVRNGSVHLEASHDNASAVGGSSLHDELGKFSSTLYETGGCDMSLVNFEPAARRASNICDTDSHVSSSTSVRFYPHDVLSLPQIRLNRLLTIDTDLLEQQDIDLSPDLAATYGPTEEAAQKVKHYYRFWILPQLWIGINFDRLTLLALFDRNREILENVLAVILAILVAFLGSILLIQGFFRDIWVFQFCLVIASCQYSLLKSVQPDSSSPRHGHNRIIAYSRPVYFCICCGLIWLLDYGSRNLTATKFKLYGITFTNPLVFISARDLVIVFTLCFPIVFFIGLLPQVNTFVMYLCEQLDIHIFGGNATTSLLAALYSFICSIVAVALLYGLCYGALKDSWDGQHIPVLFSIFCGLLVAVSYHLSRQSSDPSVLFSLVQSKIFPKTEEKNPEDPLSEVKDPLPEKLRNSVSERLQSDLVVCIVIGVLYFAIHVSTVFTVLQPALKYVLYTLVGFVGFVTHYVLPQVRKQLPWHCFSHPLLKTLEYNQYEVRNAATMMWFEKLHVWLLFVEKNIIYPLIVLNELSSSAETIASPKKLNTELGALMITVAGLKLLRSSFSSPTYQYVTVIFTVLFFKFDYEAFSETMLLDLFFMSILFNKLWELLYKLQFVYTYIAPWQITWGSAFHAFAQPFAVPHSAMLFIQAAVSAFFSTPLNPFLGSAIFITSYVRPVKFWERDYNTKRVDHSNTRLASQLDRNPGSDDNNLNSIFYEHLTRSLQHSLCGDLLLGRWGNYSTGDCFILASDYLNALVHLIEIGNGLVTFQLRGLEFRGTYCQQREVEAITEGVEEDEGFCCCEPGHIPHMLSFNAAFSQRWLAWEVIVTKYILEGYSITDNSAASMLQVFDLRKVLTTYYVKGIIYYVTTSSKLEEWLANETMQEGLRLCADRNYVDVDPTFNPNIDEDYDHRLAGISRESFCVIYLNWIEYCSSRRAKPVDVDKDSSLVTLCYGLCVLGRRALGTASHHMSSNLESFLYGLHALFKGDFRISSIRDEWIFADMELLRKVVVPGIRMSIKLHQDHFTSPDEYDDPTVLYEAIVSHEKNLVIAHEGDPAWRSAVLANSPSLLALRHVMDDGTNEYKIIMLNRRYLSFRVIKVNKECVRGLWAGQQQELVFLRNRNPERGSIQNAKQALRNMINSSCDQPIGYPIFVSPLTTSYSDSHEQLKDILGGPISLGNIRNFIVSTWHRLRKGCGAGCNSGGNIEDSDTGGGTSCTGNNATTANNPHSNVTQGSIGNPGQGSGTGLHPPVTSYPPTLGTSHSSHSVQSGLVRQSPARASVASQSSYCYSSRHSSLRMSTTGFVPCRRSSTSQISLRNLPSSIQSRLSMVNQMEPSGQSGLACVQHGLPSSSSSSQSIPACKHHTLVGFLATEGGQSSATDAQPGNTLSPANNSHSRKAEVIYRVQIVDPSQILEGINLSKRKELQWPDEGIRLKAGRNSWKDWSPQEGMEGHVIHRWVPCSRDPGTRSHIDKAVLLVQIDDKYVTVIETGVLELGAEV

SEQ ID NO: 910923 - protein, 866 aa, Homo sapiens
MGSQTLQILRQGVWAALSGGWYYDPHQATFVNALHLYLWLFLLGLPFTLYMALPSTMIIVAVYCPVIAAVFIVLKMVNYRLHRALDAGEVVDRTANEFTDQRTKAEQGNCSTRRKDSNGPSDPGGGIEMSEFIREATPPVGCSSRNSYAGLDPSNQIGSGSSRLGTAATIKGDTDTAKTSDDISLSLGQSSSLCKEGSEEQDLAADRKLFRLVSNDSFISIQPSLSSCGQDLPRDFSDKVNLPSHNHHHHVDQSLSSACDTEVASLVPLHSHSYRKDHRPRGVPRTSSSAVAFPDTSLNDFPLYQQRRGLDPVSELESSKPLSGSKESLVENSGLSGEFQLAGDLKINTSQPPTKSGKSKPLKAEKSMDSLRSLSTRSSGSTESYCSGTDRDTNSTVSSYKSEQTSSTHIESILSEHEESPKAGTKSGRKKECCAGPEEKNSCASDKRTSSEKIAMEASTNSGVHEAKDPTPSDEMHNQRGLSTSASEEANKNPHANEFTSQGDRPPGNTAENKEEKSDKSAVSVDSKVRKDVGGKQKEGDVRPKSSSVIHRTASAHKSGRRRTGKKRASSFDSSRHRDYVCFRGVSGTKPHSAIFCHDEDSSDQSDLSRASSVQSAHQFSSDSSSSTTSHSCQSPEGRYSALKTKHTHKERGTDSEHTHKAHLVPEGTSKKRATRRTSSTNSAKTRARVLSLDSGTVACLNDSNRLMAPESIKPLTTSKSDLEAKEGEVLDELSLLGRASQLETVTRSRNSLPNQVAFPEGEEQDAVSGAAQASEEAVSFRRERSTFRRQAVRRRHNAGSNPTPPTLLIGSPLSLQDGQQGQQSTAQVKVQSRPPSQAAVLSASASLLVSSLLRCMRLVAVICHL

SEQ ID NO: 910924 - protein, 218 aa, Homo sapiens
MGSQTLQILRQGVWAALSGGWYYDPHQATFVNALHLYLWLFLLGLPFTLYMALPSTMIIVAVYCPVIAAVFIVLKMVNYRLHRALDAGEVVDRTANEFTDQRTKAEQGNCSTRRKDSNGPSDPGGGIEMSEFIREATPPVGCSSRNSYAGLDPSNQIGSGSSRLGTAATIKGDTDTAKTSDDISLSLGQSSSLCKEGSEEQGKNVILYHDVIYCGDQS

SEQ ID NO: 910925 - protein, 2341 aa, Homo sapiens; identical to SEQ ID NO: 910922

SEQ ID NO: 910926 - protein, 2341 aa, Homo sapiens; identical to SEQ ID NO: 910922

SEQ ID NO: 910927 - protein, 760 aa, Homo sapiens
MDSLRSLSTRSSGSTESYCSGTDRDTNSTVSSYKSEQTSSTHIESILSEHEESPKAGTKSGRKKECCAGPEEKNSCASDKRTSSEKIAMEASTNSGVHEAKDPTPSDEMHNQRGLSTSASEEANKNPHANEFTSQGDRPPGNTAENKEEKSDKSAVSVDSKVRKDVGGKQKEGDVRPKSSSVIHRTASAHKSGRRRTGKKRASSFDSSRHRDYVCFRGVSGTKPHSAIFCHDEDSSDQSDLSRASSVQSAHQFSSDSSSSTTSHSCQSPEGRYSALKTKHTHKERGTDSEHTHKAHLVPEGTSKKRATRRTSSTNSAKTRARVLSLDSGTVACLNDSNRLMAPESIKPLTTSKSDLEAKEGEVLDELSLLGRASQLETVTRSRNSLPNQVAFPEGEEQDAVSGAAQASEEAVSFRRERSTFRRQAVRRRHNAGSNPTPPTLLIGSPLSLQDGQQGQQSTAQVKVQSRPPSQAAVLSASASLLVRNGSVHLEASHDNASAVGGSSLHDELGKFSSTLYETGGCDMSLVNFEPAARRASNICDTDSHVSSSTSVRFYPHDVLSLPQIRLNRLLTIDTDLLEQQDIDLSPDLAATYGPTEEAAQKVKHYYRFWILPQLWIGINFDRLTLLALFDRNREILENVLAVILAILVAFLGSILLIQGFFRDIWVFQFCLVIASCQYSLLKSVQPDSSSPRHGHNRIIAYSRPVYFCICCGLIWLLDYGSRNLTATKFKLYGITFTNPLVFISARDLVIGEYICNVPL

SEQ ID NO: 910928 - protein, 2341 aa, Homo sapiens; identical to SEQ ID NO: 910920

SEQ ID NO: 910929 - protein, 580 aa, Homo sapiens
MAGTVRTACLVVAMLLSLDFPGQAQPPPPPPDATCHQVRSFFQRLQPGLKWVPETPVPGSDLQVCLPKGPTCCSRKMEEKYQLTARLNMEQLLQSASMELKFLIIQNAAVFQEAFEIVVRHAKNYTNAMFKNNYPSLTPQAFEFVGEFFTDVSLYILGSDINVDDMVNELFDSLFPVIYTQLMNPGLPDSALDINECLRGARRDLKVFGNFPKLIMTQVSKSLQVTRIFLQALNLGIEVINTTDHLKFSKDCGRMLTRMWYCSYCQGLMMVKPCGGYCNVVMQGCMAGVVEIDKYWREYILSLEELVNGMYRIYDMENVLLGLFSTIHDSIQYVQKNAGKLTTTIGKLCAHSQQRQYRSAYYPEDLFIDKKVLKVAHVEHEETLSSRRRELIQKLKSFISFYSALPGYICSHSPVAENDTLCWNGQELVERYSQKAARNGMKNQFNLHELKMKGPEPVVSQIIDKLKHINQLLRTMSMPKGRVLDKNLDEEGFESGDCGDDEDECIGGSGDGMIKVKNQLRFLAELAYDLDVDDAPGNSQQATPKDNEISTFHNLGNVHSPLKLLTSMAISVVCFFFLVH

SEQ ID NO: 910930 - protein, 580 aa, Homo sapiens; identical to SEQ ID NO: 910929

SEQ ID NO: 910931 - protein, 562 aa, Homo sapiens
MAGTVRTACLVVAMLLSLDFPGQAQPPPPPPDATCHQVRSFFQRLQPGLKWVPETPVPGSDLQVCLPKGPTCCSRKMEDMELKFLIIQNAAVFQEAFEIVVRHAKNYTNAMFKNNYPSLTPQAFEFVGEFFTDVSLYILGSDINVDDMVNELFDSLFPVIYTQLMNPGLPDSALDINECLRGARRDLKVFGNFPKLIMTQVSKSLQVTRIFLQALNLGIEVINTTDHLKFSKDCGRMLTRMWYCSYCQGLMMVKPCGGYCNVVMQGCMAGVVEIDKYWREYILSLEELVNGMYRIYDMENVLLGLFSTIHDSIQYVQKNAGKLTTTIGKLCAHSQQRQYRSAYYPEDLFIDKKVLKVAHVEHEETLSSRRRELIQKLKSFISFYSALPGYICSHSPVAENDTLCWNGQELVERYSQKAARNGMKNQFNLHELKMKGPEPVVSQIIDKLKHINQLLRTMSMPKGRVLDKNLDEEGFESGDCGDDEDECIGGSGDGMIKVKNQLRFLAELAYDLDVDDAPGNSQQATPKDNEISTFHNLGNVHSPLKLLTSMAISVVCFFFLVH

SEQ ID NO: 910932 - protein, 573 aa, Homo sapiens
MAGTVRTACLVVAMLLSLDFPGQAQPPPPPPDATCHQVRSFFQRLQPGLKWVPETPVPGSDLQVCLPKGPTCCSRKMEEKYQLTARLNMEQLLQSASMELKFLIIQNAAVFQEAFEIVVRHAKNYTNAMFKNNYPSLTPQAFEFVGEFFTDVSLYILGSDINVDDMVNELFDSLFPVIYTQLMNPGLPDSALDINECLRGARRDLKVFGNFPKLIMTQVSKSLQVTRIFLQALNLGIEVINTTDHLKFSKDCGRMLTRMWYCSYCQGLMMVKPCGGYCNVVMQGCMAGVVEIDKYWREYILSLEELVNGMYRIYDMENVLLGLFSTIHDSIQYVQKNAGKLTTTIGKLCAHSQQRQYRSAYYPEDLFIDKKVLKVAHVEHEETLSSRRRELIQKLKSFISFYSALPGYICSHSPVAENDTLCWNGQELVERNGMKNQFNLHELKMKGPEPVVSQIIDKLKHINQLLRTMSMPKGRVLDKNLDEEGFESGDCGDDEDECIGGSGDGMIKVKNQLRFLAELAYDLDVDDAPGNSQQATPKDNEISTFHNLGNVHSPLKLLTSMAISVVCFFFLVH

SEQ ID NO: 910933 - protein, 105 aa, Homo sapiens
LCQYICSVFNPSVEREGFESGDCGDDEDECIGGSGDGMIKVKNQLRFLAELAYDLDVDDAPGNSQQATPKDNEISTFHNLGNVHSPLKLLTSMAISVVCFFFLVH

SEQ ID NO: 910934 - protein, 108 aa, Homo sapiens
MAPLHSSLGDRARLHLVSSLQEKRRDVQGRDECIGGSGDGMIKVKNQLRFLAELAYDLDVDDAPGNSQQATPKDNEISTFHNLGNVHSPLKLLTSMAISVVCFFFLVH

SEQ ID NO: 910935 - protein, 551 aa, Homo sapiens
MAGTVRTACLVVAMLLSLDFPGQAQPPPPPPDATCHQVRSFFQRLQPGLKWVPETPVPGSDLQVCLPKGPTCCSRKMEEKYQLTARLNMEQLLQSASMELKFLIIQNAAVFQEAFEIVVRHAKNYTNAMFKNNYPSLTPQAFEFVGEFFTDVSLYILGSDINVDDMVNELFDSLFPVIYTQLMNPGLPDSALDINECLRGARRDLKVFGNFPKLIMTQVSKSLQVTRIFLQALNLGIEVINTTDHLKFSKDCGRMLTRMWYCSYCQGLMMVKPCGGYCNVVMQGCMAGVVEIDKYWREYILSLEELVNGMYRIYDMENVLLGLFSTIHDSIQYVQKNAGKLTTTIGKLCAHSQQRQYRSAYYPEDLFIDKKVLKVAHVEHEETLSSRRRELIQKLKSFISFYSALPGYICSHSPVAENDTLCWNGQELVERYSQKAARNGMKNQFNLHELKMKGPEPVVSQIIDKLKHINQLWDPCLMPKGGVLDPGKEGCEVETAVMMRCLLGYELDVDERLEPVAATSRAAREGRVQRGEVMARGSGSREGVGRAGWWG

SEQ ID NO: 910936 - protein, 580 aa, Homo sapiens; identical to SEQ ID NO: 910929

SEQ ID NO: 910937 - protein, 486 aa, Homo sapiens
MLLKKDGRKIPTNSTIEHGTAASVCKYGAQVLNYSECCGFPSLTPQAFEFVGEFFTDVSLYILGSDINVDDMVNELFDSLFPVIYTQLMNPGLPDSALDINECLRGARRDLKVFGNFPKLIMTQVSKSLQVTRIFLQALNLGIEVINTTDHLKFSKDCGRMLTRMWYCSYCQGLMMVKPCGGYCNVVMQGCMAGVVEIDKYWREYILSLEELVNGMYRIYDMENVLLGLFSTIHDSIQYVQKNAGKLTTTIGKLCAHSQQRQYRSAYYPEDLFIDKKVLKVAHVEHEETLSSRRRELIQKLKSFISFYSALPGYICSHSPVAENDTLCWNGQELVERYSQKAARNGMKNQFNLHELKMKGPEPVVSQIIDKLKHINQLLRTMSMPKGRVLDKNLDEEGFESGDCGDDEDECIGGSGDGMIKVKNQLRFLAELAYDLDVDDAPGNSQQATPKDNEISTFHNLGNVHSPLKLLTSMAISVVCFFFLVH

SEQ ID NO: 910938 - protein, 510 aa, Homo sapiens
MAGTVRTACLVVAMLLSLDFPGQAQPPPPPPDATCHQVRSFFQRLQPGLKWVPETPVPGSDLQVCLPKGPTCCSRKMEEKYQLTARLNMEQLLQSASMELKFLIIQNAAVFQEAFEIVVRHAKNYTNAMFKNNYPSLTPQAFEFVGEFFTDVSLYILGSDINVDDMVNELFDSLFPVIYTQLMNPGLPDSALDINECLRGARRDLKVFGNFPKLIMTQVSKSLQVTRIFLQALNLGIEVINTTDHLKFSKDCGRMLTRMWYCSYCQGLMMVKPCGGYCNVVMQGCMAGVVEIDKYWREYILSLEELVNGMYRIYDMENVLLGLFSTIHDSIQYVQKNAGKLTTTIGKLCAHSQQRQYRSAYYPEDLFIDKKVLKVAHVEHEETLSSRRRELIQKLKSFISFYSALPGYICSHSPVAENDTLCWNGQELVERYSQKAARNGMKNQFNLHELKMKGPEPVVSQIIDKLKHINQLLRTMSMPKGRVLDKNLDEEGFESGDCGDDEDECIGGSG

SEQ ID NO: 910939 - protein, 529 aa, Homo sapiens
MAGTVRTACLVVAMLLSLDFPGQAQPPPPPPDATCHQVRSFFQRLQPGLKWVPETPVPGSDLQVCLPKGPTCCSRKMEEKYQLTARLNMEQLLQSASMELKFLIIQNAAVFQEAFEIVVRHAKNYTNAMFKNNYPSLTPQAFEFVGEFFTDVSLYILGSDINVDDMVNELFDSLFPVIYTQLMNPGLPDSALDINECLRGARRDLKVFGNFPKLIMTQVSKSLQVTRIFLQALNLGIEVINTTDHLKFSKDCGRMLTRMWYCSYCQGLMMVKPCGGYCNVVMQGCMAGVVEIDKYWREYILSLEELVNGMYRIYDMENVLLGLFSTIHDSIQYVQKNAGKLTTTIGKLCAHSQQRQYRSAYYPEDLFIDKKVLKVAHVEHEETLSSRRRELIQKLKSFISFYSALPGYICSHSPVAENDTLCWNGQELVERYSQKAARNGMKNQFNLHELKMKGPEPVVSQIIDKLKHINQLLRTMSMPKGRVLDKNLDEEGFESGDCGDDEDECIGGSFNFFNGSQNSVTNFWSSCFH

SEQ ID NO: 910940 - protein, 200 aa, Homo sapiens; identical to SEQ ID NO: 826041

SEQ ID NO: 910941 - protein, 140 aa, Homo sapiens
MAQQRALPQSKETLLQSYNKRLKDDIKSIMDNFTEIIKTAKIEDETQVSRATQGEQDNYEMHVRAANIVRAGESLMKLVSDLKQFLILNDFPSVNEAIDQRNQQLRTLQEECDRKLITLRDEISIDLYELEEEYYSSRYK

SEQ ID NO: 910942 - protein, 140 aa, Homo sapiens; identical to SEQ ID NO: 910941

SEQ ID NO: 910943 - protein, 140 aa, Homo sapiens; identical to SEQ ID NO: 910941

SEQ ID NO: 910944 - protein, 131 aa, Homo sapiens; identical to SEQ ID NO: 826044

SEQ ID NO: 910945 - protein, 341 aa, Homo sapiens
MVGEMETKEKPKPTPDYLMQLMNDKKLMSSLPNFCGIFNHLERLLDEEISRVRKDMYNDTLNGSTEKRSAELPDAVGPIVQLQEKLYVPVKEYPDFNFVGRILGPRGLTAKQLEAETGCKIMVRGKGSMRDKKKEEQNRGKPNWEHLNEDLHVLITVEDAQNRAEIKLKRAVEEVKKLLVPAAEGEDSLKKMQLMELAILNGTYRDANIKSPALAFSLAATAQAAPRIITGPAPVLPPAALRTPTPAGPTIMPLIRQIQTAVMPNGTPHPTAAIVPPGPEAGLIYTPYEYPYTLAPATSILEYPIEPSGVLGAVATKVRRHDMRVHPYQRIVTADRAATGN

SEQ ID NO: 910946 - protein, 652 aa, Homo sapiens
MVIYKGVYSSILTAEVYYTVCFTNHLIHCSSYLLTQSLKPQSVGFKNCFETFLSDETLEVVLRLANNLSVLNMALFEVVLLQERHFSEYVTSKAEICLDLIELMKYCNLGIVMNGYNRLRPKMFEMNAILIDAYIHDILWLILKLLCLNVFLETFVVNEHLKSILINLLLMFFPPLGMFSNFVLVIAIELGAVATKVRRHDMRVHPYQRIVTADRGSLVLQFLSIRNALGVHKICNTTPDEKNVIAYLHTVFFPFLNLFVIIDRFKGWVFCFGLVFSPFIFELIKSSIIMYYDLFLLKHKLVNLGSYEILMLPQLFSLITFAKIYLLKVRNLGLVLQNELNGWCFNERSKGIYASCVLLEKTEDLVSIFLYNKIFEPLYKHEGAHVKYLAKINKVRTVKITFMYVGFFYINESVNSLLFLHSLAKMDPLILSFAAKIYYLKVNCLLKFCGGMRSSCVNIIFDYTCDWKISLHFLLYNFYNLCPVYALGPFYKLFLLIEEWYFRFIDIELFSKFFHHKIGISSMVVKKDFLQVSIMAHCFLQIKLIKVSNISGGKSAGFVLQLYIFYEFMKDLPALCDYLEYLMINTRHSCCPHQKYHAFPKDIVNICLAKSIKNVEDFETNVFITNSDCSVNKIDPSSVVVYEDGIPCKCSV

SEQ ID NO: 910947 - protein, 315 aa, Homo sapiens
METKEKPKPTPDYLMQLMNDKKLMSSLPNFCGIFNHLERLLDEEISRVRKDMYNDTLNGSTEKRSAELPDAVGPIVQLQEKLYVPVKEYPDFNFVGRILGPRGLTAKQLEAETGCKIMVRGKGSMRDKKKEEQNRGKPNWEHLNEDLHVLITVEDAQNRAEIKLKRAVEEVKKLLVPAAEGEDSLKKMQLMELAILNGTYRDANIKSPALAFSLAATAQAAPRIITGPAPVLPPAALRTPTPAGPTIMPLIRQIQTAVMPNGTPHPTAAIVPPGPEAGLIYTPYEYPYTLAPATSILEYPIEPSGVLGMAFPTKG

SEQ ID NO: 910948 - protein, 341 aa, Homo sapiens [sequence omitted]

SEQ ID NO: 910949 - protein, 341 aa, Homo sapiens; identical to SEQ ID NO: 910945

SEQ ID NO: 910950 - protein, 325 aa, Homo sapiens
MVGEMETKEKPKPTPDYLMQLMNDKKLMSSLPNFCGIFNHLERLLDEEISRVRKDMYNDTLNGSTEKRSAELPDAVGPIVQLQEKLYVPVKEYPDFNFVGRILGPRGLTAKQLEAETGCKIMVRGKGSMRDKKKEEQNRGKPNWEHLNEDLHVLITVEDAQNRAEIKLKRAVEEVKKLLVPAAEGEDSLKKMQLMELAILNGTYRDANIKSPALAFSLAATAQAAPRIITGPAPVLPPAALRTPTPAGPTIMPLIRQIQTAVMPNGTPHPTAAIVPPGPEAGLIYTPYEYPYTLAPATSILEYPIEPSGVLEWIEMPVMPDISAH

SEQ ID NO: 910951 - protein, 341 aa, Homo sapiens; identical to SEQ ID NO: 910945

SEQ ID NO: 910952 - protein, 551 aa, Homo sapiens
MKYCNLGIVMNGYNRLRPKMFEMNAILIDAYIHDILWLILKLLCLNVFLETFVVNEHLKSILINLLLMFFPPLGMFSNFVLVIAIYLGAVATKVRRHDMRVHPYQRIVTADRGSLVLQFLSIRNALGVHKICNTTPDEKNVIAYLHTVFFPFLNLFVIIDRFKGWVFCFGLVFSPFIFELIKSSIIMYYDLFLLKHKLVNLGSYEILMLPQLFSLITFAKIYLLKVLKFGVGMQNELNGWCFNERSKGIYASCVLLEKTEDLVSIFLYNKIFEPLYKHEGAHVKYLAKINKVRTVKITFMYVGFFYINYERQFPFILTFSCQNGSFDFVSFAAKIYYLKVNCLLKFCGGMRSSCVNIIFDYTCDLENKSSFFSFTTFIICVLYDALGPFYKLFLLIEEWYFRFIDIELFSKFFHHKIGISSMVVKKDFLQVSIMAHCFLQIKLIKVSNISGGKSAGFVLQLYIFYEFMKDLPALCDYLEYLMINTRHSCCPHQKSHAFPKDIVNICLAKSIKNVEDFYTNVFITNSDCSVNKIDPSSVVVYEDGIPCKCSV

SEQ ID NO: 910953 - protein, 258 aa, Homo sapiens
MVGEMETKEKPKPTPDYLMQLMNDKKLMSSLPNFCGIFNHLERLLDEEISRVRKDMYNDTLNGSTEKRSAELPDAVGPIVQLQEKLYVPVKEYPDFNFVGRILGPRGLTAKQLEAETGCKIMVRGKGSMRDKKKEEQNRGKPNWEHLNEDLHVLITVEDAQNRAEIKLKRAVEEVKKLLVPAAEGEDSLKKMQLMELAILNGTYRDANIKSPALAAAMKKSLSAPLHPEFEEVYRFGAESRKLLLREPVDAMPNRITR

SEQ ID NO: 910954 - protein, 967 aa, Homo sapiens
MFKFFFSINTLSCGPVHAPFPRTPLCCTHSICSRGVMTLDFLQGWGSYHQLLFQHFQRKISLILPRGIVLVYDYLIYNEYRGDGPVYCLEIARGTAVKLVSHCKASCLLFVGKFLLIEDLIIRLVKIKTKICRFLIGIHKVNNNKCPMKKSIMVNFISCFATYAVKHDIDHLENSENYFKFLSYNKFATQITCMLFMSHLTLNYFKITVPFKTDADMCVGSSEEIGISIKSSLMIIFNSLPFIFRYGFPNERLRIQELVLTETLIRSEFNKCLVSAASGGKKLSLAVSDLLALFAHRYKVEIMLLIWFSLKYYTVMVIYKGVYSSILTAEVYYTVCFTNHLIHCSSYLLTQSLKPQSVGFKNCFETFLSDETLEVVLRLANNLSVLNMALFEVVLLQERHFSEYVTSKAEICLDLIELMKYCNLGIVMNGYNRLRPKMFEMNAILIDAYIHDILWLILKLLCLNVFLETFVVNEHLKSILINLLLMFFPPLGMFSNFVLVIAIYLGAVATKVRRHDMRVHPYQRIVTADRGSLVLQFLSIRNALGVHKICNTTPDEKNVIAYLHTVFFPFLNLFVIIDRFKGWVFCFGLVFSPFIFELIKSSIIMYYDLFLLKHKLVNLGSYEILMLPQLFSLITFAKIYLLKVLKFGVGMQNELNGWCFNERSKGIYASCVLLEKTEDLVSIFLYNKIFEPLYKHEGAHVKYLAKINKVRTVKITFMYVGFFYIIRASIPFYSYILLPKWILSFLSFAAKIYYLKVNCLLKFCGGMRSSCVNIIFDYTCDWKISLHFLLYNFYNLCPVYALGPFYKLFLLIEEWYFRFIDIELFSKFFHHKIGISSMVVKKDFLQVSIMAHCFLQIKLIKVSNISGGKSAGFVLQLYIFYEFMKDLPALCDYLEYLMINTRHSCCPHQKSHAFPKDIVNICLAKSIKNVEDFETNVFITNSDCSVNKIDPSSVVVYEDGIPCKCSV

SEQ ID NO: 910955 - protein, 319 aa, Homo sapiens
MVGEMETKEKPKPTPDYLMQLMNDKKLMSSLPNFCGIFNHLERLLDEEISRVRKDMYNDTLNGSTEKRSAELPDAVGPIVQLQEKLYVPVKEYPDFNFVGRILGPRGLTAKQLEAETGCKIMVRGKGSMRDKKKEEQNRGKPNWEHLNEDLHVLITVEDAQNRAEIKLKRAVEEVKKLLVPAAEGEDSLKKMQLMELAILNGTYRDANIKSPALAFSLAATAQAAPRIITGPAPVLPPAALRTPTPAGPTIMPLIRQIQTAVMPNGTPHPTAAIVPPGPEAGLIYTPYEYPYTLAPATSILEYPIEPSGVLGMAFPTKG

SEQ ID NO: 910956 - protein, 361 aa, Homo sapiens
MLSLSSLRRNSGRNSGGAWNMVGEMETKEKPKPTPDYLMQLMNDKKLMSSLPNFCGIFNHLERLLDEEISRVRKDMYNDTLNGSTEKRSAELPDAVGPIVQLQEKLYVPVKEYPDFNFVGRILGPRGLTAKQLEAETGCKIMVRGKGSMRDKKKEEQNRGKPNWEHLNEDLHVLITVEDAQNRAEIKLKRAVEEVKKLLVPAAEGEDSLKKMQLMELAILNGTYRDANIKSPALAFSLAATAQAAPRIITGPAPVLPPAALRTPTPAGPTIMPLIRQIQTAVMPNGTPHPTAAIVPPGPEAGLIYTPYEYPYTLAPATSILEYPIEPSGVLGAVATKVRRHDMRVHPYQRIVTADRAATGN

SEQ ID NO: 910957 - protein, 551 aa, Homo sapiens; identical to SEQ ID NO: 910952

SEQ ID NO: 910958 - protein, 354 aa, Homo sapiens
MVGEMETKEKPKPTPDYLMQLMNDKKLMSSLPNFCGIFNHLERLLDEEISRVRKDMYNDTLNGSTEKRSAELPDAVGPIVQLQEKLYVPVKEYPDFNFVGRILGPRGLTAKQLEAETGCKIMVRGKGSMRDKKKEEQNRGKPNWEHLNEDLHVLITVEDAQNRAEIKLKRAVEEVKKLLVPAAEGEDSLKKMQLMELAILNGTYRDANIKSPALAFSLAATAQAAPRIITGPAPVLPPAALRTPTPAGPTIMPLIRQIQTAVMPNGTPHPTAAIVPPGPEAGLIYTPYEYPYTLAPATSILEYPIEPSGVLGAVATKVRRHDMRVHPYQRIVTADRGRPPGNLNFGTFGTLEIF

SEQ ID NO: 910959 - protein, 160 aa, Homo sapiens
MVGEMETKEKPKPTPDYLMQLMNDKKLMSSLPNFCGIFNHLERLLDEEISRVRKDMYNDTLNGSTEKRSAELPDAVGPIVQLQEKLYVPVKEYPDFNFVGRILGPRGLTAKQLEAETGCKIMVRGKGSMRDKKKEDAKSELAHCEHNEDYIVLSSESRYR

SEQ ID NO: 910960 - protein, 347 aa, Homo sapiens [sequence omitted]

SEQ ID NO: 910961 - protein, 112 aa, Homo sapiens
MWKGGRSHPFLPCSSRRAGSGGQLDSILPHQSPAWGPWGCKDLSSGVPSFLTSSILWKSAVFAEDNGLKIHLCSYKRDDLVLFYDCTSFVLTFGPSPWFLTQGFLNPLEFSA

SEQ ID NO: 910962 - protein, 446 aa, Homo sapiens
CAPLADGGEPADAERVLRPAVGAASSPGSATSRGSGGGPGPRGMALRSAQGDGPTSGHWDGGAEKADFNAKRKKKVAEIHQALNSDPTDVAALRRMAISEGGLLTDEIRRKVWPKLLNVNANDPPPISGKNLRQMSKDYQQVLLDVRRSLRRFPPGMPEEQREGLQEELIDIILLILERNPQLHYYQGYHDIVVTFLLVVGERLATSLVEKLSTHHLRDFMDPTMDNTKHILNYLMPIIDQVNPELHDFMQSAEVGTIFALSWLITWFGHVLSDFRHVVRLYDFFLACHPLMPIYFAAVIVLYREQEVLDCDCDMASVHHLLSQIPQDLPYETLISRAGDLFVQFPPSELAREAAAQQQAERTAASTFKDFELASAQQRPDMVLRQRFRGLLRPEDRTKDVLTKPRTNRFVKLAVMGLTVALGAAALAVVKSALEWAPKFQLQLFP

SEQ ID NO: 910963 - protein, 422 aa, Homo sapiens
CAPLADGGEPADAERVLRPAVGAASSPGSATSRGSGGGPGPRGMALRSAQGDGPTSGHWDGGAEKADFNAKRKKKVAEIHQALNSDPTDVAALRRMAISEGGLLTDEIRRKVWPKLLNVNANDPPPISGKNLRQMSKDYQQVLLDVRRSLRRFPPGMPEEQREGLQEELIDIILLILERNPQLHYYQGYHDIVVTFLLVVGERLATSLVEKLSTHHLRDFMDPTMDNTKHILNYLMPIIDQVNPELHDFMQRHVVRLYDFFLACHPLMPIYFAAVIVLYREQEVLDCDCDMASVHHLLSQIPQDLPYETLISRAGDLFVQFPPSELAREAAAQQQAERTAASTFKDFELASAQQRPDMVLRQRFRGLLRPEDRTKDVLTKPRTNRFVKLAVMGLTVALGAAALAVVKSALEWAPKFQLQLFP

SEQ ID NO: 910964 - protein, 72 aa, Homo sapiens
SWSALRSRPGLPSPGSWLSRIADDPLPSVSWPALSSARYFYSFSYSFFQCLQTTLLIKGTFITIFRIYTPHM

SEQ ID NO: 910965 - protein, 446 aa, Homo sapiens; identical to SEQ ID NO: 910962

SEQ ID NO: 910966 - protein, 446 aa, Homo sapiens; identical to SEQ ID NO: 910962

SEQ ID NO: 910967 - protein, 178 aa, Homo sapiens
CAPLADGGEPADAERVLRPAVGAASSPGSATSRGSGGGPGPRGMALRSAQGDGPTSGHWDGGAEKADFNAKRKKKVAEIHQALNSDPTDVAALRRMAISEGGLLTDEIRRKVWPKLLNVNANDPPPISGKNLRQMSKDYQQVLLDVRRSLRRFPPGEKLSRSCHIWKDCICSRSYHVT

SEQ ID NO: 910968 - protein, 446 aa, Homo sapiens; identical to SEQ ID NO: 910962

SEQ ID NO: 910969 - protein, 446 aa, Homo sapiens; identical to SEQ ID NO: 910962

SEQ ID NO: 910970 - protein, 134 aa, Homo sapiens
MVCGLLVSLDWLGDLGQYLQSCCFCFICKNYDPHTPAAAQGTVIFYTCVDVFVHSSWFITPITLCYNVGTLQASENGISVCDLLLPHFTCSTPDFNLTVAHKTLIPERVLPHTRKEERCTERPRSIWTDRPCWV

SEQ ID NO: 910971 - protein, 446 aa, Homo sapiens; identical to SEQ ID NO: 910962

SEQ ID NO: 910972 - protein, 211 aa, Homo sapiens
YTGVVLSRRQTDPRLRRGSAVPLGASASPSPASPASSASSPAAGTRDPSVCPTPDPARDMSTPARRRLMRDFKRLQEDPPAGVSGAPSENNIMVWNAVIFGPEGTPFEDGTFKLTIEFTEEYPNKPPTVRFVSKMFHPNVYADGSICLDILQNRWSPTYDVSSILTSIQSLLDEPNPNSPANSQAAQLYQENKREYEKRVSAIVEQSWRDC

SEQ ID NO: 910973 - protein, 181 aa, Homo sapiens
YTGVVLSRRQTDPRLRRGSAVPLGASASPSPASPASSASSPAAGTRDPSVCPTPDPARDMSTPARRRLMRDFKRLQEDPPAGVSGAPSENNIMVWNAVIFGPEGTPFEDVYADGSICLDILQNRWSPTYDVSSILTSIQSLLDEPNPNSPANSQAAQLYQENKREYEKRVSAIVEQSWRDC

SEQ ID NO: 910974 - protein, 144 aa, Homo sapiens
YTGVVLSRRQTDPRLRRGSAVPLGASASPSPASPASSASSPAAGTRDPSVCPTPDPARDMSTPARRRLMRDFKRLQEDPPAGVSGAPSENNIMVWNAVIFGPEGTPFEDGTFKLTIEFTEEYPNKPPTVRFVSKMFHPNGKYHF

SEQ ID NO: 910975 - protein, 196 aa, Homo sapiens
YTGVVLSRRQTDPRLRRGSAVPLGASASPSPASPASSASSPAAGTRDPSVCPTPDPARDMSTPARRRLMRDFKRLQEDPPAGVSGAPSENNIMVWNAVIFGPEGTPFEDGTFKLTIEFTEEYPNIYADGSICLDILQNRWSPTYDVSSILTSIQSLLDEPNPNSPANSQAAQLYQENKREYEKRVSAIVEQSWRDC

SEQ ID NO: 910976 - protein, 211 aa, Homo sapiens; identical to SEQ ID NO: 910972

SEQ ID NO: 910977 - protein, 101 aa, Homo sapiens
YTGVVLSRRQTDPRLRRGSAVPLGASASPSPASPASSASSPAAGTRDPSVCPTPDPARDMSTPARRRLMRDFKRLQEDPPAGVSGAPSENNIMVWNAVIFG

SEQ ID NO: 910978 - protein, 211 aa, Homo sapiens; identical to SEQ ID NO: 910972

SEQ ID NO: 910979 - protein, 101 aa, Homo sapiens; identical to SEQ ID NO: 910977

SEQ ID NO: 910980 - protein, 128 aa, Homo sapiens
LIRLSENNIMVWNAVIFGPEGTPFEDGTFKLTIEFTEEYPNKPPTVRFVSKMFHPNVYADGSICLDILQNRWSPTYDVSSILTSIQSLLDEPNPNSPANSQAAQLYQENKREYEKRVSAIVEQSWRDC

SEQ ID NO: 910981 - protein, 211 aa, Homo sapiens; identical to SEQ ID NO: 910972

SEQ ID NO: 910982 - protein, 144 aa, Homo sapiens; identical to SEQ ID NO: 910974

SEQ ID NO: 910983 - protein, 151 aa, Homo sapiens
YTGVVLSRRQTDPRLRRGSAVPLGASASPSPASPASSASSPAAGTRDPSVCPTPDPARDMSTPARRRLMRDFKRLQEDPPAGVSGAPSENNIMVWNAVIFGPEGTPFEDGKREFLYPLFRSLVIWGKGSQSSWKCLLLRNLPLPSLCLLKA

SEQ ID NO: 910984 - protein, 476 aa, Homo sapiens
MGPRGAAGAERGYKRPRAPRARPPRSGRALGKAWTDAAQRPGTFRAWTSRARAMLRVRCLRGGSRGAEAVHYIGSRLGRTLTGWVQRTFQSTQAATASSRNSCAADDKATEPLPKDCPVSSYNEWDPLEEVIVGRAENACVPPFTIEVKANTYEKYWPFYQKQGGHYFPKDHLKKAVAEIEEMCNILKTEGVTVRRPDPIDWSLKYKTPDFESTGLYSAMPRDILIVVGNEIIEAPMAWRSRFFEYRAYRSIIKDYFHRGAKWTTAPKPTMADELYNQDYPIHSVEDRHKLAAQGKFVTTEFEPCFDAADFIRAGRDIFAQRSQVTNYLGIEWMRRHLAPDYRVHIISFKDPNPMHIDATFNIIGPGIVLSNPDRPCHQIDLFKKAGWTIITPPTPIIPDDHPLWMSSKWLSMNVLMLDEKRVMVDANEVPIQKMFEKLGITTIKVNIRNANSLGGGFHCWTCDVRRRGTLQSYLD

SEQ ID NO: 910985 - protein, 559 aa, Homo sapiens
DKFNPVSDLEGSNFEVIGNIHQYSNLLVDDTDRISPDDIGNDIHEFLHGGDEVMAVEYENGGHGYVEHASIGGVIVHVFYADDKEEEDEIMLDNFVELKNKYADELGNRGRKCDEMKFTSEKVNELIGVDEAFKVPNKLMSIMMNVNNVSKRLKHFWKLSVIHHSIGSMNIFQSTQAATASSRNSCAADDKATEPLPKDCPVSSYNEWDPLEEVIVGRAENACVPPFTIEVKANTYEKYWPFYQKQGGHYFPKDHLKKAVAEIEEMCNILKTEGVTVRRPDPIDWSLKYKTPDFESTGLYSAMPRDILIVVGNEIIEAPMAWRSRFFEYRAYRSIIKDYFHRGAKWTTAPKPTMADELYNQDYPIHSVEDRHKLAAQGKFVTTEFEPCFDAADFIRAGRDIFAQRSQVTNYLGIEWMRRHLAPDYRVHIISFKDPNPMHIDATFNIIGPGIVLSNPDRPCHQIDLFKKAGWTIITPPTPIIPDDHPLWMSSKWLSMNVLMLDEKRVMVDANEVPIQKMFEKLGITTIKVNIRNANSLGGGFHCWTCDVRRRGTLQSYLD

SEQ ID NO: 910986 - protein, 458 aa, Homo sapiens
MGPRGAAGAERGYKRPRAPRARPPRSGRALGKAWTDAAQRPGTFRAWTSRARAMLRVRCLRGGSRGAEAVHYIGSRLGRTLTGWVQRTFQSTQAATASSRNSCAADDKATEPLPKDCPVSSYNEWDPLEEVIVGRAENACVPPFTIEVKANTYEKYWPFYQKQGGHYFPKDHLKKAVAEIEEMCNILKTEGVTVRRPDPIDWSLKYKTPDFESTGLYSAMPRDILIVVGNEIIEAPMAWRSRFFEYRAYRSIIKDYFHRGAKWTTAPKPTMADELYNQDYPIHSVEDRHKLAAQGTGRDIFAQRSQVTNYLGIEWMRRHLAPDYRVHIISFKDPNPMHIDATFNIIGPGIVLSNPDRPCHQIDLFKKAGWTIITPPTPIIPDDHPLWMSSKWLSMNVLMLDEKRVMVDANEVPIQKMFEKLGITTIKVNIRNANSLGGGFHCWTCDVRRRGTLQSYLD

SEQ ID NO: 910987 - protein, 240 aa, Homo sapiens
MAWRSRFFEYRAYRSIIKDYFHRGAKWTTAPKPTMADELYNQDYPIHSVEDRHKLAAQGKFVTTEFEPCFDAADFIRAGRDIFAQRSQVTNYLGIEWMRRHLAPDYRVHIISFKDPNPMHIDATFNIIGPGIVLSNPDRPCHQIDLFKKAGWTIITPPTPIIPDDHPLWMSSKWLSMNVLMLDEKRVMVDANEVPIQKMFEKLGITTIKVNIRNANSLGGGFHCWTCDVRRRGTLQSYLD

SEQ ID NO: 910988 - protein, 458 aa, Homo sapiens
MGPRGAAGAERGYKRPRAPRARPPRSGRALGKAWTDAAQRPGTFRAWTSRARAMLRVRCLRGGSRGAEAVHYIGSRLGRTLTGWVQRTFQSTQAATASSRNSCAADDKATEPLPKDCPVSSYNEWDPLEEVIVGRAENACVPPFTIEVKANTYEKYWPFYQKQGGHYFPKDHLKKAVAEIEEMCNILKTEGVTVRRPDPIDWSLKYKTPDFESTGLYSAMPRDILIVVGNEIIEAPMAWRSRFFEYRAYRSIIKDYFHRGAKWTTAPKPTMADELYNQDYPIHSVEDRHKLAAQGKFVTTEFEPCFDAADFIRAGRDIFAQRSQVTNYLGIEWMRRHLAPDYRVHIISFKDPNPMHIDATFNIIGPGIVLSNPDRPCHQIDLFKKAGWTIITPPTPIIPDDHPLWMSSKWLSMNVLMLDEKRVMVDANEVPIPNSLGGGFHCWTCDVRRRGTLQSYLD

SEQ ID NO: 910989 - protein, 504 aa, Homo sapiens
RAFLRRSGLGPGPDVQQKPSVAPLAKKGQASEARASGRGASRQFLIRGATPAPPPVPGSQWGRGGRPGRSAATKGLRAPRARPPRSGRALGKAWTDAAQRPGTFRAWTSRARAMLRVRCLRGGSRGAEAVHYIGSRLGRTLTGWVQRTFQSTQAATASSRNSCAADDKATEPLPKDCPVSSYNEWDPLEEVIVGRAENACVPPFTIEVKANTYEKYWPFYQKQGGHYFPKDHLKKAVAEIEEMCNILKTEGVTVRRPDPIDWSLKYKTPDFESTGLYSAMPRDILIVVGNEIIEAPMAWRSRFFEYRAYRSIIKDYFHRGAKWTTAPKPTMADELYNQDYPIHSVEDRHKLAAQGKFVTTEFEPCFDAADFIRAGRDIFAQRSQVTNYLGIEWMRRHLAPDYRVHIISFKDPNPMHIDATFNIIGPGIVLSNPDRPCHQIDLFKKAGWTIITPPTPIIPDDHPLWMSSKWLSMNVLMLDEKRVMVDANEVPIQKMFEKLGMYNK

SEQ ID NO: 910990 - protein, 390 aa, Homo sapiens
RAFLRRSGLGPGPDVQQKPSVAPLAKKGQASEARASGRGASRQFLIRGATPAPPPVPGSQWGRGGRPGRSAATKGLRAPRARPPRSGRALGKAWTDAAQRPGTFRAWTSRARAMLRVRCLRGGSRGAEAVHYIGSRLGRTLTGWVQRTFQSTQAATASSRNSCAADDKATEPLPKDCPVSSYNEWDPLEEVIVGRAENACVPPFTIEVKANTYEKYWPFYQKQGGHYFPKDHLKKAVAEIEEMCNILKTEGVTVRRPDPIDWSLKYKTPDFESTGLYSAMPRDILIVVGNEIIEAPMAWRSRFFEYRAYRSIIKDYFHRGAKWTTAPKPTMADELYNQDYPIHSVEDRHKLAAQGKFVTTEFEPCFDAADFIRAGRDIFAQRSQVTNYLG

SEQ ID NO: 910991 - protein, 254 aa, Homo sapiens
MGPRGAAGAERGYKRPRAPRARPPRSGRALGKAWTDAAQRPGTFRAWTSRARAMLRVRCLRGGSRGAEAVHYIGSRLGRTLTGWVQRTFQSTQAATASSRNSCAADDKATEPLPKDCPVSSYNEWDPLEEVIVGRAENACVPPFTIEVKANTYEKYWPFYQKQGGHYFPKDHLKKAVAEIEEMCNILKTEGVTVRRPDPIDWSLKYKTPDFESTGLYSAMPRDILIVVGNEIIEAPMAWRSRFFEYRAYRSIIA

SEQ ID NO: 910992 - protein, 257 aa, Homo sapiens
MPRDILIVVGNEIIEAPMAWRSRFFEYRAYRSIIKDYFHRGAKWTTAPKPTMADELYNQDYPIHSVEDRHKLAAQGKFVTTEFEPCFDAADFIRAGRDIFAQRSQVTNYLGIEWMRRHLAPDYRVHIISFKDPNPMHIDATFNIIGPGIVLSNPDRPCHQIDLFKKAGWTIITPPTPIIPDDHPLWMSSKWLSMNVLMLDEKRVMVDANEVPIQKMFEKLGITTIKVNIRNANSLGGGFHCWTCDVRRRGTLQSYLD

SEQ ID NO: 910993 - protein, 294 aa, Homo sapiens
MCNILKTEGVTVRRPDPIDWSLKYKTPDFESTGLYSAMPRDILIVVGNEIIEAPMAWRSRFFEYRAYRSIIKDYFHRGAKWTTAPKPTMADELYNQDYPIHSVEDRHKLAAQGKFVTTEFEPCFDAADFIRAGRDIFAQRSQVTNYLGIEWMRRHLAPDYRVHIISFKDPNPMHIDATFNIIGPGIVLSNPDRPCHQIDLFKKAGWTIITPPTPIIPDDHPLWMSSKWLSMNVLMLDEKRVMVDANEVPIQKMFEKLGITTIKVNIRNANSLGGGFHCWTCDVRRRGTLQSYLD

SEQ ID NO: 910994 - protein, 476 aa, Homo sapiens; identical to SEQ ID NO: 910984

SEQ ID NO: 910995 - protein, 504 aa, Homo sapiens; identical to SEQ ID NO: 910989

SEQ ID NO: 910996 - protein, 523 aa, Homo sapiens
MAGVSYAAPWWVSLLHRLPHFDLSWEATSSQFRPEDTDYQQALLLLGAAALACLALDLLFLLFYSFWLCCRRRKSEEHLDADCCCTAWCVIIATLVCSAGIAVGFYGNGETSDGIHRATYSLRHANRTVAGVQDRVWDTAVGLNHTAEPSLQTLERQLAGRPEPLRAVQRLQGLLETLLGYTAAIPFWRNTAVSLEVLAEQVDLYDWYRWLGYLGLLLLDVIICLLVLVGLIRSSKGILVGVCLLGVLALVISWGALGLELAVSVGSSDFCVDPDAYVTKMVEEYSVLSGDILQYYLACSPRAANPFQQKLSGSHKALVEMQDVVAELLRTVPWEQPATKDPLLRVQEVLNGTEVNLQHLTALVDCRSLHLDYVQALTGFCYDGVEGLIYLALFSFVTALMFSSIVCSVPHTWQQKRGPDEDGEEEAAPGPRQAHDSLYRVHMPSLYSCGSSYGSETSIPAAAHTVSNAPVTEYMSQNANFQNPRCENTPLIGRESPPPSYTSSMRAKYLATSQPRPDSSGSH

SEQ ID NO: 910997 - protein, 245 aa, Homo sapiens
VLLVSPRWRVLGRERRADPAAPMDLVSSLEQKLSGSHKALVEMQDVVAELLRTVPWEQPATKDPLLRVQEVLNGTEVNLQHLTALVDCRSLHLDYVQALTGFCYDGVEGLIYLALFSFVTALMFSSIVCSVPHTWQQKRGPDEDGEEEAAPGPRQAHDSLYRVHMPSLYSCGSSYGSETSIPAAAHTVSNAPVTEYMSQNANFQNPRCENTPLIGRESPPPSYTSSMRAKYLATSQPRPDSSGSH

SEQ ID NO: 910998 - protein, 192 aa, Homo sapiens
AVRAPQDPLLRVQEVLNGTEVNLQHLTALVDCRSLHLDYVQALTGFCYDGVEGLIYLALFSFVTALMFSSIVCSVPHTWQQKRGPDEDGEEEAAPGPRQAHDSLYRVHMPSLYSCGSSYGSETSIPAAAHTVSNAPVTEYMSQNANFQNPRCENTPLIGRESPPPSRYLAALDSGSHAGWQFKPMDSARTLW

SEQ ID NO: 910999 - protein, 207 aa, Homo sapiens
MAGVSYAAPWWVSLLHRLPHFDLSWEATSSQFRPEDTDYQQALLLLGAAALACLALDLLFLLFYSFWLCCRRRKSEEHLDADCCCTAWCVIIATLVCSAGIAVGFYGNGETSDGIHRATYSLRHAHPQAHPSCRLPEAPSSRASLRCPSFTLSLSTCPAGGPSPPWTAGATWSPGRSPATQCWPPSWCQTPFPHPETGQLCLVRSLH

SEQ ID NO: 911000 - protein, 523 aa, Homo sapiens; identical to SEQ ID NO: 910996

SEQ ID NO: 911001 - protein, 148 aa, Homo sapiens
ASYVIRSRPGLNQPRAWHCAWVKAGPCSGAGRQPQQFTDAWLFLPEQPAATWTGNVLIPSLGPGSALAFLCEPLLSLCWCLGPKRGNMGGQSGEGSPWAWGPKPGRLSSPGMTKPQWRGLCFRPRLADILSPPRRPRHSQPAQSFLWA

SEQ ID NO: 911002 - protein, 523 aa, Homo sapiens; identical to SEQ ID NO: 910996

SEQ ID NO: 911003 - protein, 526 aa, Homo sapiens
MAGVSYAAPWWVSLLHRLPHFDLSWEATSSQFRPEDTDYQQALLLLGAAALACLALDLLFLLFYSFWLCCRRRKSEEHLDADCCCTAWCVIIATLVCSAGIAVGFYGNGETSDGIHRATYSLRHANRTVAGVQDRVWDTAVGLNHTAEPSLQTLERQLAGRPEPLRAVQRLQGLLETLLGYTAAIPFWRNTAVSLEVLAEQVDLYDWYRWLGYLGLLLLDVIICLLVLVGLIRSSKGILVGVCLLGVLALVISWGALGLELAVSVGSSDFCVDPDAYVTKMVEEYSVLSGDILQYYLACSPRAANPFQQKLSGSHKALVEMQDVVAELLRTVPWEQPATKDPLLRVQEVLNGTEVNLQHLTALVDCRSLHLDYVQALTGFCYDGVEGLIYLALFSFVTALMFSSIVCSVPHTWQQKRGPDEDGEEEAAPGPRQAHDSLYRVHMPSLYSCGSSYGSETSIPAAAHTVSNAPVTEYMSQNANFQNPRCENTPLIGRESPPPSRYLAALDSGSHAGWQFKPMDSARTLW

SEQ ID NO: 911004 - protein, 121 aa, Homo sapiens
MPKCRWCGHGRLCVRPSSEETSPVLSLESSGAAPPSASARPRAQGPPASGPSLAPPYRLCQGTLYCPILPPGLLAQPSEDHAEGAPGCVRHAGALLMPPPCLPPVHLQHESQIPRHEPASP

SEQ ID NO: 911005 - protein, 130 aa, Homo sapiens
LQAQGQHMPGCRGHRALPRATPQPCPLLTSQCPRHPCQAREVLLWPRVYWDPIGSNLIWDRVRLQAPALWLAGCFQSWWGFGGCILGAAGQSGESGLTVGGGIPHGCRLWLWGCRGLEKEGVAQGRDQEP

SEQ ID NO: 911006 - protein, 244 aa, Homo sapiens
ALSVGVLEISVLAHVLSDRGVADGVGRGRDAGLTAVAAATAVQAGHVDAVEAVVRLPRPWSDPLLRVQEVLNGTEVNLQHLTALVDCRSLHLDYVQALTGFCYDGVEGLIYLALFSFVTALMFSSIVCSVPHTWQQKRGPDEDGEEEAAPGPRQAHDSLYRVHMPSLYSCGSSYGSETSIPAAAHTVSNAPVTEYMSQNANFQNPRCENTPLIGRESPPPSYTSSMRAKYLATSQPRPDSSGSH

SEQ ID NO: 911007 - protein, 191 aa, Homo sapiens [sequence omitted]

SEQ ID NO: 911008 - protein, 523 aa, Homo sapiens; identical to SEQ ID NO: 910996

SEQ ID NO: 911009 - protein, 523 aa, Homo sapiens; identical to SEQ ID NO: 910996

SEQ ID NO: 911010 - protein, 523 aa, Homo sapiens; identical to SEQ ID NO: 910996

SEQ ID NO: 911011 - protein, 307 aa, Homo sapiens
MAGVSYAAPWWVSLLHRLPHFDLSWEATSSQFRPEDTDYQQALLLLGAAALACLALDLLFLLFYSFWLCCRRRKSEEHLDADCCCTAWCVIIATLVCSAGIAVGFYGNGETSDGIHRATYSLRHANRTVAGVQDRVWDTAVGLNHTAEPSLQTLERQLAGRPEPLRAVQRLQGLLETLLGYTAAIPFWRNTAVSLEVLAEQVDLYDWYRWLGYLGLLLLDVIICLLVLVGLIRSSKGILVGVCLLGVLALVISWGALGLELAVSVGSSDFCVDPDAYVTKMVEEYSVLSGASCSTTMPTTPCRTDPQ

SEQ ID NO: 911012 - protein, 282 aa, Homo sapiens
MRPQDGIGEEVLKMSTEEIIQRTRLLDSEIKIMKSEVLRVTHELQAMKDKIKENSEKIKVNKTLPYLVSNVIELLDVDPNDQEEDGANIDLDSQRKGKCAVIKTSTRQTYFLPVIGLVDAEKLKPGDLVGVNKDSYLILETLPTEYDSRVKAMEVDERPTEQYSDIGGLDKQIQELVEAIVLPMNHKEKFENLGIQPPKGVLMYGPPGTGKTLLARACAAQTKATFLKLAGPQLVQMFIGDGAKLVRDAFALAKEKAPSIIFIDELDAIGTKRKLEVKGGRV

SEQ ID NO: 911013 - protein, 504 aa, Homo sapiens
CGQGLVFGIGEADSLLRSTAGAGRVKSRDLWGEVFHWSREGFKKDGINLPLRLPPGPIFCPLLQEMNLLPNIESPVTRQEKMATVWDEAEQDGIGEEVLKMSTEEIIQRTRLLDSEIKIMKSEVLRVTHELQAMKDKIKENSEKIKVNKTLPYLVSNVIELLDVDPNDQEEDGANIDLDSQRKGKCAVIKTSTRQTYFLPVIGLVDAEKLKPGDLVGVNKDSYLILETLPTEYDSRVKAMEVDERPTEQYSDIGGLDKQIQELVEAIVLPMNHKEKFENLGIQPPKGVLMYGPPGTGKTLLARACAAQTKATFLKLAGPQLVQMFIGDGAKLVRDAFALAKEKAPSIIFIDELDAIGTKRFDSEKAGDREVQRTMLELLNQLDGFQPNTQVKVIAATNRVDILDPALLRSGRLDRKIEFPMPNEEARARIMQIHSRKMNVSPDVNYEELARCTDDFNGAQCKAVCVEAGMIALRRGATELTHEDYMEGILEVQAKKKANLQYYA

SEQ ID NO: 911014 - protein, 423 aa, Homo sapiens
MATVWDEAEQDGIGEEVLKMSTEEIIQRTRLLDSEIKIMKSEVLRVTHELQAMKDKIKENSEKIKVNKTLPYLVSNVIELLDVDPNDQEEDGANIDLDSQRKGKCAVIKTSTRQTYFLPVIGLVDAEKLKPGDLVGVNKDSYLILETLPTEYDSRVKAMEVDERPTEQYSDIGGLDKQIQELVEAIVLPMNHKEKFENLGIQPPKGVLMYGPPGTGKTLLARACAAQTKATFLKLAGPQLVQMFIGDGAKLVRDAFALAKEKAPSIIFIDELDAIGTKRFDSEKAGDREVQRTMLELLNQLDGFQPNTQVKVIAATNRVDILDPALLRSGRLDRKIEFPMPNEEARARIMQIHSRKMNVSPDVNYEELARCTDDFNGAQCKAVCVEAGMIALRRGATELTHEDYMEGILEVQAKKKANLQYYA

SEQ ID NO: 911015 - protein, 487 aa, Homo sapiens
CGQGLVFGIGEADSLLRSTAGAGRVKSRDLWGEVFHWSREGFKKDGINLPLRLPPGPIFCPLLQEMNLLPNIESPVTRQEKMATVWDEAEQDGIGEEVLKMSTEEIIQRTRLLDSEIKIMKSEVLRVTHELQAMKDKIKENSEKIKVNKTLPYLVSNVIELLDVDPNDQEEDGANIDLDSQRKGKCAVIKTSTRQTYFLPVIGLVDAEKLKPGDLVGVNKDSYLILETLPTEYDSRVKAMEVDERPTEQYSDIGGLDKQIQELVEAIVLPMNHKEKFENLGIQPPKGVLMYGPPGTGKTLLARACAAQTKATFLKLAGPQLVQMFIGDGAKLVRDAFALAKEKAPSIIFIDELDAIGTKRFDSEKAGDREVQRTMLELLNQLDGFQPNTQVKVIAATNRVDILDPALLRSGRLDRKIEFPMPNEEARARIMQIHSRKMNVSPDVNYEELARCTDDFNGAQCKAVCVEAGMIALRRGATELTHESSGR

SEQ ID NO: 911016 - protein, 408 aa, Homo sapiens
CGQGLVFGIGEADSLLRSTAGAGRVKSRDLWGEVFHWSREGFKKDGINLPLRLPPGPIFCPLLQEMNLLPNIESPVTRQEKMATVWDEAEQDGIGEEVLKMSTEEIIQRTRLLDSEIKIMKSEVLRVTHELQAMKDKIKENSEKIKVNKTLPYLVSNVIELLDVDPNDQEEDGANIDLDSQRKGKCAVIKTSTRQTYFLPVIGLVDAEKLKPGDLVGVNKDSYLILETLPTEYDSRVKAMEVDERPTEQYSDIGGLDKQIQELVEAIVLPMNHKEKFENLGIQPPKGVLMYGPPGTGKTLLARACAAQTKATFLKLAGPQLVQMFIGDGAKLVRDAFALAKEKAPSIIFIDELDAIGTKRFDSEKAGDREVQRTMLELLNQLDGFQPNTQVKVIAASSVVDSSPGVSR

SEQ ID NO: 911017 - protein, 373 aa, Homo sapiens
CGQGLVFGIGEADSLLRSTAGAGRVKSRDLWGEVFHWSREGFKKDGINLPLRLPPGPIFCPLLQEMNLLPNIESPVTRQEKMATVWDEAEQDGIGEEVLKMSTEEIIQRTRLLDSEIKIMKSEVLRVTHELQAMKDKIKENSEKIKVNKTLPYLVSNVIELLDVDPNDQEEDGANIDLDSQRKGKCAVIKTSTRQTYFLPVIGLVDAEKLKPGDLVGVNKDSYLILETLPTEYDSRVKAMEVDERPTEQYSDIGGLDKQIQELVEAIVLPMNHKEKFENLGIQPPKGVLMYGPPGTGKTLLARACAAQTKATFLKLAGPQLVQMFIGDGAKLVRDAFALAKEKAPSIIFIDELDAIGTKRTPPSSARAALTAR

SEQ ID NO: 911018 - protein, 369 aa, Homo sapiens
CGQGLVFGIGEADSLLRSTAGAGRVKSRDLWGEVFHWSREGFKKDGINLPLRLPPGPIFCPLLQEMNLLPNIESPVTRQEKMATVWDEAEQDGIGEEVLKMSTEEIIQRTRLLDSEIKIMKSEVLRVTHELQAMKDKIKENSEKIKVNKTLPYLVSNVIELLDVDPNDQEEDGANIDLDSQRKGKCAVIKTSTRQTYFLPVIGLVDAEKLKPGDLVGVNKDSYLILETLPTEYDSRVKAMEVDERPTEQYSDIGGLDKQIQELVEAIVLPMNHKEKFENLGIQPPKGVLMYGPPGTGKTLLARACAAQTKATFLKLAGPQLVQMFIGDGAKLVRDAFALAKEKAPSIIFIDELDAIGTKRKLEVKGGRV

SEQ ID NO: 911019 - protein, 426 aa, Homo sapiens
PVVLAISGRMRPQDGIGEEVLKMSTEEIIQRTRLLDSEIKIMKSEVLRVTHELQAMKDKIKENSEKIKVNKTLPYLVSNVIELLDVDPNDQEEDGANIDLDSQRKGKCAVIKTSTRQTYFLPVIGLVDAEKLKPGDLVGVNKDSYLILETLPTEYDSRVKAMEVDERPTEQYSDIGGLDKQIQELVEAIVLPMNHKEKFENLGIQPPKGVLMYGPPGTGKTLLARACAAQTKATFLKLAGPQLVQMFIGDGAKLVRDAFALAKEKAPSIIFIDELDAIGTKRFDSEKAGDREVQRTMLELLNQLDGFQPNTQVKVIAATNRVDILDPALLRSGRLDRKIEFPMPNEEARARIMQIHSRKMNVSPDVNYEELARCTDDFNGAQCKAVCVEAGMIALRRGATELTHEDYMEGILEVQAKKKANLQYYA

SEQ ID NO: 911020 - protein, 417 aa, Homo sapiens
MRPQDGIGEEVLKMSTEEIIQRTRLLDSEIKIMKSEVLRVTHELQAMKDKIKENSEKIKVNKTLPYLVSNVIELLDVDPNDQEEDGANIDLDSQRKGKCAVIKTSTRQTYFLPVIGLVDAEKLKPGDLVGVNKDSYLILETLPTEYDSRVKAMEVDERPTEQYSDIGGLDKQIQELVEAIVLPMNHKEKFENLGIQPPKGVLMYGPPGTGKTLLARACAAQTKATFLKLAGPQLVQMFIGDGAKLVRDAFALAKEKAPSIIFIDELDAIGTKRFDSEKAGDREVQRTMLELLNQLDGFQPNTQVKVIAATNRVDILDPALLRSGRLDRKIEFPMPNEEARARIMQIHSRKMNVSPDVNYEELARCTDDFNGAQCKAVCVEAGMIALRRGATELTHEDYMEGILEVQAKKKANLQYYA

SEQ ID NO: 911021 - protein, 426 aa, Homo sapiens
HAYAHAVGGMRPQDGIGEEVLKMSTEEIIQRTRLLDSEIKIMKSEVLRVTHELQAMKDKIKENSEKIKVNKTLPYLVSNVIELLDVDPNDQEEDGANIDLDSQRKGKCAVIKTSTRQTYFLPVIGLVDAEKLKPGDLVGVNKDSYLILETLPTEYDSRVKAMEVDERPTEQYSDIGGLDKQIQELVEAIVLPMNHKEKFENLGIQPPKGVLMYGPPGTGKTLLARACAAQTKATFLKLAGPQLVQMFIGDGAKLVRDAFALAKEKAPSIIFIDELDAIGTKRFDSEKAGDREVQRTMLELLNQLDGFQPNTQVKVIAATNRVDILDPALLRSGRLDRKIEFPMPNEEARARIMQIHSRKMNVSPDVNYEELARCTDDFNGAQCKAVCVEAGMIALRRGATELTHEDYMEGILEVQAKKKANLQYYA

SEQ ID NO: 911022 - protein, 405 aa, Homo sapiens
HAYAHAVGGMRPQDGIGEEVLKMSTEEIIQRTRLLDSEIKIMKSEVLRVTHELQAMKDKIKENSEKIKVNKTLPYLVSNVIELLDVDPNDQEEDGANIDLDSQRKGKCAVIKTSTRQTYFLPVIGLVDAEKLKPGDLVGVNKDSYLILETLPTEYDSRVKAMEVDERPTEQYSDIGGLDKQIQELVEAIVLPMNHKEKFENLGIQPPKGVLMYGPPGTGKTLLARACAAQTKLVRDAFALAKEKAPSIIFIDELDAIGTKRFDSEKAGDREVQRTMLELLNQLDGFQPNTQVKVIAATNRVDILDPALLRSGRLDRKIEFPMPNEEARARIMQIHSRKMNVSPDVNYEELARCTDDFNGAQCKAVCVEAGMIALRRGATELTHEDYMEGILEVQAKKKANLQYYA

SEQ ID NO: 911023 - protein, 149 aa, Homo sapiens
DIKKPAEDEWGKTPDAMKAAMALEKKLNQALLDLHALGSARTDPHLCDDPALLRSGRLDRKIEFPMPNEEARARIMQIHSRKMNVSPDVNYEELARCTDDFNGAQCKAVCVEAGMIALRRGATELTHEDYMEGILEVQAKKKANLQYYA

SEQ ID NO: 911024 - protein, 332 aa, Homo sapiens
PVVLAISGRMRPQDGIGEEVLKMSTEEIIQRTRLLDSEIKIMKSEVLRVTHELQAMKDKIKENSEKIKVNKTLPYLVSNVIELLDVDPNDQEEDGANIDLDSQRKGKCAVIKTSTRQTYFLPVIGLVDAEKLKPGDLVGVNKDSYLILETLPTEYDSRVKAMEVDERPTEQYSDIGGLDKQIQELVEAIVLPMNHKEKFENLGIQPPKGVLMYGPPGTGKTLLARACAAQTKATFLKLAGPQLVQMFIGDGAKLVRDAFALAKEKAPSIIFIDELDAIGTKRFDSEKAGDREVQRTMLELLNQLDGFQPNTQVKVLQHKQGGHLDPPPRSAA

SEQ ID NO: 911025 - protein, 504 aa, Homo sapiens; identical to SEQ ID NO: 911013

SEQ ID NO: 911026 - protein, 504 aa, Homo sapiens; identical to SEQ ID NO: 911013

SEQ ID NO: 911027 - protein, 430 aa, Homo sapiens
CGQGLVFGIGEADSLLRSTAGAGRVKSRDLWGEVFHWSREGFKKDGINLPLRLPPGPIFCPLLQEMNLLPNIESPVTRQEKMATVWDEAEQDGIGEEVLKMSTEEIIQRTRLLDSEIKIMKSEVLRVTHELQAMKDKIKENSEKIKVNKTLPYLVSNVIELLDVDPNDQEEDGANIDLDSQRKGKCAVIKTSTRQTYFLPVIGLVDAEKLKPGDLVGVNKDSYLILETLPTEYDSRVKAMEVDERPTEQYSDIGGLDKQIQELVEAIVLPMNHKEKFENLGIQPPKGVLMYGPPGTGKTLLARACAAQTKATFLKLAGPQLVQMFIGDGAKLVRDAFALAKEKAPSIIFIDELDAIGTKRFDSEKAGDREVQRTMLELLNQLDGFQPNTQVKVLQHNRVDIWTRLLVGRLTQMSPSHEEPANRTSEIVAE

SEQ ID NO: 911028 - protein, 413 aa, Homo sapiens
CGQGLVFGIGEADSLLRSTAGAGRVKSRDLWGEVFHWSREGFKKDGINLPLRLPPGPIFCPLLQEMNLLPNIESPVTRQEKMATVWDEAEQDGIGEEVLKMSTEEIIQRTRLLDSEIKIMKSEVLRVTHELQAMKDKIKENSEKIKVNKTLPYLVSNVIELLDVDPNDQEEDGANIDLDSQRKGKCAVIKTSTRQTYFLPVIGLVDAEKLKPGDLVGVNKDSYLILETLPTEYDSRVKAMEVDERPTEQYSDIGGLDKQIQELVEAIVLPMNHKEKFENLGIQPPKGVLMYGPPGTGKTLLARACAAQTKATFLKLAGPQLVQMFIGDGAKLVRDAFALAKEKAPSIIFIDELDAIGTKRLFVPAVGHDRTAQGCHGAHPRGLHGRHPGGAGQEESQPTILRLGHTGQPQSHG

SEQ ID NO: 911029 - protein, 483 aa, Homo sapiens
CGQGLVFGIGEADSLLRSTAGAGRVKSRDLWGEVFHWSREGFKKDGINLPLRLPPGPIFCPLLQEMNLLPNIESPVTRQEKMATVWDEAEQDGIGEEVLKMSTEEIIQRTRLLDSEIKIMKSEVLRVTHELQAMKDKIKENSEKIKVNKTLPYLVSNVIELLDVDPNDQEEDGANIDLDSQRKGKCAVIKTSTRQTYFLPVIGLVDAEKLKPGDLVGVNKDSYLILETLPTEYDSRVKAMEVDERPTEQYSDIGGLDKQIQELVEAIVLPMNHKEKFENLGIQPPKGVLMYGPPGTGKTLLARACAAQTKLVRDAFALAKEKAPSIIFIDELDAIGTKRFDSEKAGDREVQRTMLELLNQLDGFQPNTQVKVIAATNRVDILDPALLRSGRLDRKIEFPMPNEEARARIMQIHSRKMNVSPDVNYEELARCTDDFNGAQCKAVCVEAGMIALRRGATELTHEDYMEGILEVQAKKKANLQYYA

SEQ ID NO: 911030 - protein, 451 aa, Homo sapiens
MATVWDEAEVGTGRAGGPGTGARRETPLTRGKEVAGQQDGIGEEVLKMSTEEIIQRTRLLDSEIKIMKSEVLRVTHELQAMKDKIKENSEKIKVNKTLPYLVSNVIELLDVDPNDQEEDGANIDLDSQRKGKCAVIKTSTRQTYFLPVIGLVDAEKLKPGDLVGVNKDSYLILETLPTEYDSRVKAMEVDERPTEQYSDIGGLDKQIQELVEAIVLPMNHKEKFENLGIQPPKGVLMYGPPGTGKTLLARACAAQTKATFLKLAGPQLVQMFIGDGAKLVRDAFALAKEKAPSIIFIDELDAIGTKRFDSEKAGDREVQRTMLELLNQLDGFQPNTQVKVIAATNRVDILDPALLRSGRLDRKIEFPMPNEEARARIMQIHSRKMNVSPDVNYEELARCTDDFNGAQCKAVCVEAGMIALRRGATELTHEDYMEGILEVQAKKKANLQYYA

SEQ ID NO: 911031 - protein, 483 aa, Homo sapiens
CGQGLVFGIGEADSLLRSTAGAGRVKSRDLWGEVFHWSREGFKKDGINLPLRLPPGPIFCPLLQEMNLLPNIESPVTRQEKMATVWDEAEQDGIGEEVLKMSTEEIIQRTRLLDSEIKIMKSEVLRVTHELQAMKDKIKENSEKIKVNKTLPYLVSNVIELLDVDPNDQEEDGANIDLDSQRKGKCAVIKTSTRQGVNKDSYLILETLPTEYDSRVKAMEVDERPTEQYSDIGGLDKQIQELVEAIVLPMNHKEKFENLGIQPPKGVLMYGPPGTGKTLLARACAAQTKATFLKLAGPQLVQMFIGDGAKLVRDAFALAKEKAPSIIFIDELDAIGTKRFDSEKAGDREVQRTMLELLNQLDGFQPNTQVKVIAATNRVDILDPALLRSGRLDRKIEFPMPNEEARARIMQIHSRKMNVSPDVNYEELARCTDDFNGAQCKAVCVEAGMIALRRGATELTHEDYMEGILEVQAKKKANLQYYA

SEQ ID NO: 911032 - protein, 266 aa, Homo sapiens
CGQGLVFGIGEADSLLRSTAGAGRVKSRDLWGEVFHWSREGFKKDGINLPLRLPPGPIFCPLLQEMNLLPNIESPVTRQEKMATVWDEAEQDGIGEEVLKMSTEEIIQRTRLLDSEIKIMKSEVLRVTHELQAMKDKIKENSEKIKVNKTLPYLVSNVIELLDVDPNDQEEDGANIDLDSQRKGKCAVIKTSTRQTYFLPVIGLVDAEKLKPGDLVGVNKDSYLILETLPTEYDSRVKPEGHKARTYRTWGGNHRPRACRRPGLMG

SEQ ID NO: 911033 - protein, 219 aa, Homo sapiens
SGLPAGPPSGRRDGSRLQSARPPRAGAESRSAPATRRPGALERTRGAMRRQPAKVAALLLGLLLECTEAKKHCWYFEGLYPTYYICRSYEDCCGSRCCVRALSIQRLWYFWFLLMMGVLFCCGAGFFIRRRMYPPPLIEEPAFNVSYTRQPPNPGPGAQQPGPPYYTDPGGPGMNPVGNSMAMAFQVPPNSPQGSVACPPPPAYCNTPPPPYEQVVKAK

SEQ ID NO: 911034 - protein, 219 aa, Homo sapiens; identical to SEQ ID NO: 911033

SEQ ID NO: 911035 - protein, 219 aa, Homo sapiens; identical to SEQ ID NO: 911033

SEQ ID NO: 911036 - protein, 219 aa, Homo sapiens; identical to SEQ ID NO: 911033

SEQ ID NO: 911037 - protein, 219 aa, Homo sapiens; identical to SEQ ID NO: 911033

SEQ ID NO: 911038 - protein, 215 aa, Homo sapiens
SGLPAGPPSGRRDGSRLQSARPPRAGAESRSAPATRRPGALERTRGAMRRQPAKVAALLLGLLLECTEAKKHCWYFEGLYPTYYICRSYEDCCGSRCCVRALSIQRLWYFWFLLMMGVLFCCGAGFFIRRRMYPPPLIEEPAFNVSYTRQPPNPGPGAQQPGPPYYTDPGGPGMNPVGNSMAMAFQVPPNSPQGSVACPPPPAYCNTPPPPYELG

SEQ ID NO: 911039 - protein, 219 aa, Homo sapiens; identical to SEQ ID NO: 911033

SEQ ID NO: 911040 - protein, 219 aa, Homo sapiens; identical to SEQ ID NO: 911033

SEQ ID NO: 911041 - protein, 219 aa, Homo sapiens; identical to SEQ ID NO: 911033

SEQ ID NO: 911042 - protein, 219 aa, Homo sapiens; identical to SEQ ID NO: 911033

SEQ ID NO: 911043 - protein, 44 aa, Homo sapiens
GAGFFIRRRMYPPPLIEEPAFNVSYTRQPPNPGPGQPALSLSLL

SEQ ID NO: 911044 - protein, 72 aa, Homo sapiens
  misc_feature (1)..(1): Xaa can be any naturally occurring amino acid
  misc_feature (7)..(7): Xaa can be any naturally occurring amino acid
XHPGRCXLNLFRLPKWPQEKGPQAPHCICANGRQTVSWAVTPKSLGNVNFTVSAEALESLASFPLKPNSENA

SEQ ID NO: 911045 - protein, 155 aa, Homo sapiens
PLFSFPLYSLSYVWFQVSVQLEASPAFLAVPVEKEQAPHCICANGRQTVSWAVTPKSLGNVNFTVSAEALESQELCGTEVPSVPEHGRKDTVIKPLLVEPEGLEKETTFNSLLCPSGGEVSEELSLKLPPNVVEESARASVSVLGESPAPSGSGH

SEQ ID NO: 911046 - protein, 688 aa, Homo sapiens
MGKNKLLHPSLVLLLLVLLPTDASVSGKPQYMVLVPSLLHTETTEKGCVLLSYLNETVTVSASLESVRGNRSLFTDLEAENDVLHCVAFAVPKSSSNEEVMFLTVQVKGPTQEFKKRTTVMVKNEDSLVFVQTDKSIYKPGQTVKFRVVSMDENFHPLNELIPLVYIQDPKGNRIAQWQSFQLEGGLKQFSFPLSSEPFQGSYKVVVQKKSGGRTEHPFTVEEFVLPKFEVQVTVPKIITILEEEMNVSVCGLYTYGKPVPGHVTVSICRKYSDASDCHGEDSQAFCEKFSGQLNSHGCFYQQVKTKVFQLKRKEYEMKLHTEAQIQEEGTVVELTGRQSSEITRTITKLSFVKVDSHFRQGIPFFGQVRLVDGKGVPIPNKVIFIRGNEANYYSNATTDEHGLVQFSINTTNVMGTSLTVRVNYKDRSPCYGYQWVSEEHEEAHHTAYLVFSPSKSFVHLEPMSHELPCGHTQTVQAHYILNGGTLLGLKKLSFYYLIMAKGGIVRTGTHGLLVKQEDMKGHFSISIPVKSDIAPVARLLIYAVLPTGDVIGDSAKYDVENCLANKVDLSFSPSQSLPASHAHLRVTAAPQSVCALRAVDQSVLLMKPDAELSASSVYNLLPEKDLTGFPGPLNDQDDEDCINRHNVYINGITYTPVSSTNEKDMYSFLEDMGLKAFTNSKIRKPKM

SEQ ID NO: 911047 - protein, 1364 aa, Homo sapiens
MGKNKLLHPSLVLLLLVLLPTDASVSGKPQYMVLVPSLLHTETTEKGCVLLSYLNETVTVSASLESVRGNRSLFTDLEAENDVLHCVAFAVPKSSSNEEVMFLTVQVKGPTQEFKKRTTVMVKNEDSLVFVQTDKSIYKPGQTVKFRVVSMDENFHPLNELIPLVYIQDPKGNRIAQWQSFQLEGGLKQFSFPLSSEPFQGSYKVVVQKKSGGRTEHPFTVEEFVLPKFEVQVTVPKIITILEEEMNVSVCGLYTYGKPVPGHVTVSICRKYSDASDCHGEDSQAFCEKFSGQLNSHGCFYQQVKTKVFQLKRKEYEMKLHTEAQIQEEGTVVELTGRQSSEITRTITKLSFVKVDSHFRQGIPFFGQVRLVDGKGVPIPNKVIFIRGNEANYYSNATTDEHGLVQFSINTTNVMGTSLTVRVNYKDRSPCYGYQWVSEEHEEAHHTAYLVFSPSKSFVHLEPMSHELPCGHTQTVQAHYILNGGTLLGLKKLSFYYLIMAKGGIVRTGTHGLLVKQEDMKGHFSISIPVKSDIAPVARLLIYAVLPTGDVIGDSAKYDVAASHAHLRVTAAPQSVCALRAVDQSVLLMKPDAELSASSVYNLLPEKDLTGFPGPLNDQDDEDCINRHNVYINGITYTPVSSTNEKDMYSFLEDMGLKAFTNSKIRKPKMCPQLQQYEMHGPEGLRVGFYESDVMGRGHARLVHVEEPHTETVRKYFPETWIWDLVVVNSAGVAEVGVTVPDTITEWKAGAFCLSEDAGLGISSTASLRAFQPFFVELTMPYSVIRGEAFTLKATVLNYLPKCIRVSVQLEASPAFLAVPVEKEQAPHCICANGRQTVSWAVTPKSLGNVNFTVSAEALESQELCGTEVPSVPEHGRKDTVIKPLLVEPEGLEKETTFNSLLCPSGGEVSEELSLKLPPNVVEESARASVSVLGDILGSAMQNTQNLLQMPYGCGEQNMVLFAPNIYVLDYLNETQQLTPEIKSKAIGYLNTGYQRQLNYKHYDGSYSTFGERYGRNQGNTWLTAFVLKTFAQARAYIFIDEAHITQALIWLSQRQKDNGCFRSSGSLLNNAIKGGVEDEVTLSAYITIALLEIPLTVTHPVVRNALFCLESAWKTAQEGDHGSHVYTKALLAYAFALAGNQDKRKEVLKSLNEEAVKKDNSVHWERPQKPKAPVGHFYEPQAPSAEVEMTSYVLLAYLTAQPAPTSEDLTSATNIVKWITKQQNAQGGFSSTQDTVVALHALSKYGAATFTRTGKAAQVTIQSSGTFSSKFQVDNNNRLLLQQVSLPELPGEYSMKVTGEGCVYLQTSLKYNILPEKEEFPFALGVQTLPQTCDEPKAPHQLPNLPKCQLHREAALPSQHGDR

SEQ ID NO: 911048 - protein, 875 aa, Homo sapiens
MDARIAGEARKTLKGHFSISIPVKSDIAPVARLLIYAVLPTGDVIGDSAKYDVENCLANKVDLSFSPSQSLPASHAHLRVTAAPQSVCALRAVDQSVLLMKPDAELSASSVYNLLPEKDLTGFPGPLNDQDDEDCINRHNVYINGITYTPVSSTNEKDMYSFLEDMGLKAFTNSKIRKPKMCPQLQQYEMHGPEGLRVGFYESDVMGRGHARLVHVEEPHTETVRKYFPETWIWDLVVVNSAGVAEVGVTVPDTITEWKAGAFCLSEDAGLGISSTASLRAFQPFFVELTMPYSVIRGEAFTLKATVLNYLPKCIRVSVQLEASPAFLAVPVEKEQAPHCICANGRQTVSWAVTPKSLGNVNFTVSAEALESQELCGTEVPSVPEHGRKDTVIKPLLVEPEGLEKETTFNSLLCPSGGEVSEELSLKLPPNVVEESARASVSVLGDILGSAMQNTQNLLQMPYGCGEQNMVLFAPNIYVLDYLNETQQLTPEIKSKAIGYLNTGYQRQLNYKHYDGSYSTFGERYGRNQGNTWLTAFVLKTFAQARAYIFIDEAHITQALIWLSQRQKDNGCFRSSGSLLNNAIKGGVEDEVTLSAYITIALLEIPLTVTHPVVRNALFCLESAWKTAQEGDHGSHVYTKALLAYAFALAGNQDKRKEVLKSLNEEAVKKDNSVHWERPQKPKAPVGHFYEPQAPSAEVEMTSYVLLAYLTAQPAPTSEDLTSATNIVKWITKQQNAQGGFSSTQDTVVALHALSKYGAATFTRTGKAAQVTIQSSGTFSSKFQVDNNNRLLLQQVSLPELPGEYSMKVTGEGCVYLQTSLKYNILPEKEEFPFALGVQTLPQTCDEPKAPHQLPNLPKCQLHREAALPSQHGDR

SEQ ID NO: 911049 - protein, 798 aa, Homo sapiens
MALLQLNQSVCALRAVDQSVLLMKPDAELSASSVYNLLPEKDLTGFPGPLNDQDDEDCINRHNVYINGITYTPVSSTNEKDMYSFLEDMGLKAFTNSKIRKPKMCPQLQQYEMHGPEGLRVGFYESDVMGRGHARLVHVEEPHTETVRKYFPETWIWDLVVVNSAGVAEVGVTVPDTITEWKAGAFCLSEDAGLGISSTASLRAFQPFFVELTMPYSVIRGEAFTLKATVLNYLPKCIRVSVQLEASPAFLAVPVEKEQAPHCICANGRQTVSWAVTPKSLGNVNFTVSAEALESQELCGTEVPSVPEHGRKDTVIKPLLVEPEGLEKETTFNSLLCPSGGEVSEELSLKLPPNVVEESARASVSVLGDILGSAMQNTQNLLQMPYGCGEQNMVLFAPNIYVLDYLNETQQLTPEIKSKAIGYLNTGYQRQLNYKHYDGSYSTFGERYGRNQGNTWLTAFVLKTFAQARAYIFIDEAHITQALIWLSQRQKDNGCFRSSGSLLNNAIKGGVEDEVTLSAYITIALLEIPLTVTHPVVRNALFCLESAWKTAQEGDHGSHVYTKALLAYAFALAGNQDKRKEVLKSLNEEAVKKDNSVHWERPQKPKAPVGHFYEPQAPSAEVEMTSYVLLAYLTAQPAPTSEDLTSATNIVKWITKQQNAQGGFSSTQDTVVALHALSKYGAATFTRTGKAAQVTIQSSGTFSSKFQVDNNNRLLLQQVSLPELPGEYSMKVTGEGCVYLQTSLKYNILPEKEEFPFALGVQTLPQTCDEPKAPHQLPNLPKCQLHREAALPSQHGDR

SEQ ID NO: 911050 - protein, 639 aa, Homo sapiens
VVIAEFQRDPMLYHMTLTITEWKAGAFCLSEDAGLGISSTASLRAFQPFFVELTMPYSVIRGEAFTLKATVLNYLPKCIRVSVQLEASPAFLAVPVEKEQAPHCICANGRQTVSWAVTPKSLGNVNFTVSAEALESQELCGTEVPSVPEHGRKDTVIKPLLVEPEGLEKETTFNSLLCPSGGEVSEELSLKLPPNVVEESARASVSVLGDILGSAMQNTQNLLQMPYGCGEQNMVLFAPNIYVLDYLNETQQLTPEIKSKAIGYLNTGYQRQLNYKHYDGSYSTFGERYGRNQGNTWLTAFVLKTFAQARAYIFIDEAHITQALIWLSQRQKDNGCFRSSGSLLNNAIKGGVEDEVTLSAYITIALLEIPLTVTHPVVRNALFCLESAWKTAQEGDHGSHVYTKALLAYAFALAGNQDKRKEVLKSLNEEAVKKDNSVHWERPQKPKAPVGHFYEPQAPSAEVEMTSYVLLAYLTAQPAPTSEDLTSATNIVKWITKQQNAQGGFSSTQDTVVALHALSKYGAATFTRTGKAAQVTIQSSGTFSSKFQVDNNNRLLLQQVSLPELPGEYSMKVTGEGCVYLQTSLKYNILPEKEEFPFALGVQTLPQTCDEPKAPHQLPNLPKCQLHREAALPSQHGDR

SEQ ID NO: 911051 - protein, 1382 aa, Homo sapiens
MGKNKLLHPSLVLLLLVLLPTDASVSGKPQYMVLVPSLLHTETTEKGCVLLSYLNETVTVSASLESVRGNRSLFTDLEAENDVLHCVAFAVPKSSSNEEVMFLTVQVKGPTQEFKKRTTVMVKNEDSLVFVQTDKSIYKPGQTVKFRVVSMDENFHPLNELIPLVYIQDPKGNRIAQWQSFQLEGGLKQFSFPLSSEPFQGSYKVVVQKKSGGRTEHPFTVEEFVLPKFEVQVTVPKIITILEEEMNVSVCGLYTYGKPVPGHVTVSICRKYSDASDCHGEDSQAFCEKFSGQLNSHGCFYQQVKTKVFQLKRKEYEMKLHTEAQIQEEGTVVELTGRQSSEITRTITKLSFVKVDSHFRQGIPFFGQVRLVDGKGVPIPNKVIFIRGNEANYYSNATTDEHGLVQFSINTTNVMGTSLTVRVNYKDRSPCYGYQWVSEEHEEAHHTAYLVFSPSKSFVHLEPMSHELPCGHTQTVQAHYILNGGTLLGLKKLSFYYLIMAKGGIVRTGTHGLLVKQEDMKGHFSISIPVKSDIAPVARLLIYAVLPTGDVIGDSAKYDVENCLANKVDLSFSPSQSLPASHAHLRVTAAPQSVCALRAVDQSVLLMKPDAELSASSVYNLLPEKDLTGFPGPLNDQDDEDCINRHNVYINGITYTPVSSTNEKDMYSFLEDMGLKAFTNSKIRKPKMCPQLQQYEMHGPEGLRVGFYESDVMGRGHARLVHVEEPHTETVRKYFPETWIWDLVVVNSAGVAEVGVTVPDTITEWKAGAFCLSEDAGLGISSTASLRAFQPFFVELTMPYSVIRGEAFTLKATVLNYLPKCIRVSVQLEASPAFLAVPVEKEQAPHCICANGRQTVSWAVTPKSLGNVNFTVSAEALESQELCGTEVPSVPEHGRKDTVIKPLLVEPEGLEKETTFNSLLCPSGGEVSEELSLKLPPNVVEESARASVSVLGDILGSAMQNTQNLLQMPYGCGEQNMVLFAPNIYVLDYLNETQQLTPEIKSKAIGYLNTGYQRQLNYKHYDGSYSTFGERYGRNQGNTWLTAFVLKTFAQARAYIFIDEAHITQALIWLSQRQKDNGCFRSSGSLLNNAIKGGVEDEVTLSAYITIALLEIPLTVTHPVVRNALFCLESAWKTAQEGDHGSHVYTKALLAYAFALAGNQDKRKEVLKSLNEEAVKKDNSVHWERPQKPKAPVGHFYEPQAPSAEVEMTSYVLLAYLTAQPAPTSEDLTSATNIVKWITKQQNAQGGFSSTQDTVVALHALSKYGAATFTRTGKAAQVTIQSSGTFSSKFQVDNNNRLLLQQVSLPELPGEYSMKVTGEGCVYLQTSLKYNILPEKEEFPFALGVQTLPQTCDEPKAPHQLPNLPKCQLHREAALPSQHGDR

SEQ ID NO: 911052 - protein, 401 aa, Homo sapiens
  misc_feature (1)..(1): Xaa can be any naturally occurring amino acid
  misc_feature (3)..(3): Xaa can be any naturally occurring amino acid
XGXVCFIDEDVGSSLGKSLQNKAVSQVLPGYQRQLNYKHYDGSYSTFGERYGRNQGNTWLTAFVLKTFAQARAYIFIDEAHITQALIWLSQRQKDNGCFRSSGSLLNNAIKGGVEDEVTLSAYITIALLEIPLTVTHPVVRNALFCLESAWKTAQEGDHGSHVYTKALLAYAFALAGNQDKRKEVLKSLNEEAVKKDNSVHWERPQKPKAPVGHFYEPQAPSAEVEMTSYVLLAYLTAQPAPTSEDLTSATNIVKWITKQQNAQGGFSSTQDTVVALHALSKYGAATFTRTGKAAQVTIQSSGTFSSKFQVDNNNRLLLQQVSLPELPGEYSMKVTGEGCVYLQTSLKYNILPEKEEFPFALGVQTLPQTCDEPKAPHQLPNLPKCQLHREAALPSQHGDR

SEQ ID NO: 911053 - protein, 351 aa, Homo sapiens
EGGARGGTGTGRSSPSGRGQARAYIFIDEAHITQALIWLSQRQKDNGCFRSSGSLLNNAIKGGVEDEVTLSAYITIALLEIPLTVTHPVVRNALFCLESAWKTAQEGDHGSHVYTKALLAYAFALAGNQDKRKEVLKSLNEEAVKKDNSVHWERPQKPKAPVGHFYEPQAPSAEVEMTSYVLLAYLTAQPAPTSEDLTSATNIVKWITKQQNAQGGFSSTQDTVVALHALSKYGAATFTRTGKAAQVTIQSSGTFSSKFQVDNNNRLLLQQVSLPELPGEYSMKVTGEGCVYLQTSLKYNILPEKEEFPFALGVQTLPQTCDEPKAPHQLPNLPKCQLHREAALPSQHGDR

SEQ ID NO: 911054 - protein, 1382 aa, Homo sapiens; identical to SEQ ID NO: 911051

SEQ ID NO: 911055 - protein, 322 aa, Homo sapiens
MLLLALNRFLLPPRHSGGSPCSVQIWSSHIYQDWEGCTGDYPAFRDIFQQIPSGQQQHPVVRNALFCLESAWKTAQEGDHGSHVYTKALLAYAFALAGNQDKRKEVLKSLNEEAVKKDNSVHWERPQKPKAPVGHFYEPQAPSAEVEMTSYVLLAYLTAQPAPTSEDLTSATNIVKWITKQQNAQGGFSSTQDTVVALHALSKYGAATFTRTGKAAQVTIQSSGTFSSKFQVDNNNRLLLQQVSLPELPGEYSMKVTGEGCVYLQTSLKYNILPEKEEFPFALGVQTLPQTCDEPKAPHQLPNLPKCQLHREAALPSQHGDR

SEQ ID NO: 911056 - protein, 1382 aa, Homo sapiens; identical to SEQ ID NO: 911051

SEQ ID NO: 911057 - protein, 1382 aa, Homo sapiens; identical to SEQ ID NO: 911051

SEQ ID NO: 911058 - protein, 1382 aa, Homo sapiens; identical to SEQ ID NO: 911051

SEQ ID NO: 911059 - protein, 1382 aa, Homo sapiens; identical to SEQ ID NO: 911051

SEQ ID NO: 911060 - protein, 1382 aa, Homo sapiens; identical to SEQ ID NO: 911051

SEQ ID NO: 911061 - protein, 1374 aa, Homo sapiens
MGKNKLLHPSLVLLLLVLLPTDASVSGKPQYMVLVPSLLHTETTEKGCVLLSYLNETVTVSASLESVRGNRSLFTDLEAENDVLHCVAFAVPKSSSNEEVMFLTVQVKGPTQEFKKRTTVMVKNEDSLVFVQTDKSIYKPGQTVKFRVVSMDENFHPLNELIPLVYIQDPKGNRIAQWQSFQLEGGLKQFSFPLSSEPFQGSYKVVVQKKSGGRTEHPFTVEEFVLPKFEVQVTVPKIITILEEEMNVSVCGLYTYGKPVPGHVTVSICRKYSDASDCHGEDSQAFCEKFSGQLNSHGCFYQQVKTKVFQLKRKEYEMKLHTEAQIQEEGTVVELTGRQSSEITRTITKLSFVKVDSHFRQGIPFFGQVRLVDGKGVPIPNKVIFIRGNEANYYSNATTDEHGLVQFSINTTNVMGTSLTVRVNYKDRSPCYGYQWVSEEHEEAHHTAYLVFSPSKSFVHLEPMSHELPCGHTQTVQAHYILNGGTLLGLKKLSFYYLIMAKGGIVRTGTHGLLVKQEDMKGHFSISIPVKSDIAPVARLLIYAVLPTGDVIGDSAKYDVENCLANKVDLSFSPSQSLPASHAHLRVTAAPQSVCALRAVDQSVLLMKPDAELSASSVYNLLPEKDLTGFPGPLNDQDDEDCINRHNVYINGITYTPVSSTNEKDMYSFLEDMGLKAFTNSKIRKPKMCPQLQQYEMHGPEGLRVGFYESDVMGRGHARLVHVEEPHTETVRKYFPETWIWDLVVVNSAGVAEVGVTVPDTITEWKAGAFCLSEDAGLGISSTASLRAFQPFFVELTMPYSVIRGEAFTLKATVLNYLPKCIRVSVQLEASPAFLAVPVEKEQAPHCICANGRQTVSWAVTPKSLGNVNFTVSAEALESQELCGTEVPSVPEHGRKDTVIKPLLVEPEGLEKETTFNSLLCPSGGEVSEELSLKLPPNVVEESARASVSVLGDILGSAMQNTQNLLQMPYGCGEQNMVLFAPNIYVLDYLNETQQLTPEIKSKAIGYLNTGYQRQLNYKHYDGSYSTFGERYGRNQGNTWLTAFVLKTFAQARAYIFIDEAHITQALIWLSQRQKDNGCFRSSGSLLNNAIKGGVEDEVTLSAYITIALLEIPLTVTHPVVRNALFCLESAWKTAQEGDHGSHVYTKALLAYAFALAGNQDKRKEVLKSLNEEAVKKDNSVHWERPQKPKAPVGHFYEPQAPSAEVEMTSYVLLAYLTAQPAPTSEDLTSATNIVKWITKQQNAQGGFSSTQDTVVALHALSKYGAATFTRTGKAAQVTIQSSGTFSSKFQVDNNNRLLLQQVSLPELPGEYSMKVTGEGCVYLQTSLKYNILPEKEEFPFALGVQTLPQTCDEPKAPHQLPNLPKCQLHREPL

SEQ ID NO: 911062 - protein, 1331 aa, Homo sapiens
MGKNKLLHPSLVLLLLVLLPTDASVSGKPQYMVLVPSLLHTETTEKGCVLLSYLNETVTVSASLESVRGNRSLFTDLEAENDVLHCVAFAVPKSSSNEEVMFLTVQVKGPTQEFKKRTTVMVKNEDSLVFVQTDKSIYKPGQTVKFRVVSMDENFHPLNELIPLVYIQDPKGNRIAQWQSFQLEGGLKQFSFPLSSEPFQGSYKVVVQKKSGGRTEHPFTVEEFVLPKFEVQVTVPKIITILEEEMNVSVCGLYTYGKPVPGHVTVSICRKYSDASDCHGEDSQAFCEKFSGQLNSHGCFYQQVKTKVFQLKRKEYEMKLHTEAQIQEEGTVVELTGRQSSEITRTITKLSFVKVDSHFRQGIPFFGQVRLVDGKGVPIPNKVIFIRGNEANYYSNATTDEHGLVQFSINTTNVMGTSLTVRVNYKDRSPCYGYQWVSEEHEEAHHTAYLVFSPSKSFVHLEPMSHELPCGHTQTVQAHYILNGGTLLGLKKLSFYYLIMAKGGIVRTGTHGLLVKQEDMKGHFSISIPVKSDIAPVARLLIYAVLPTGDVIGDSAKYDVENCLANKVDLSFSPSQSLPASHAHLRVTAAPQSVCALRAVDQSVLLMKPDAELSASSVYNLLPEKDLTGFPGPLNDQDDEDCINRHNVYINGITYTPVSSTNEKDMYSFLEDMGLKAFTNSKIRKPKMCPQLQQYEMHGPEGLRVGFYESDVMGRGHARLVHVEEPHTETVRKYFPETWIWDLVVVNSAGVAEVGVTVPDTITEWKAGAFCLSEDAGLGISSTASLRAFQPFFVELTMPYSVIRGEAFTLKATVLNYLPKCIRVSVQLEASPAFLAVPVEKEQAPHCICANGRQTVSWAVTPKSLGNVNFTVSAEALESQELCGTEVPSVPEHGRKDTVIKPLLVEPEGLEKETTFNSLLCPSGGEVSEELSLKLPPNVVEESARASVSVLGDILGSAMQNTQNLLQMPYGCGEQNMVLFAPNIYVLDYLNETQQLTPEIKSKAIGYLNTGYQRQLNYKHYDGSYSTFGERYGRNQGNTWLTAFVLKTFAQARAYIFIDEAHITQALIWLSQRQKDNGCFRSSGSLLNNAIKGGVEDEVTLSAYITIALLEIPLTVTHPVVRNALFCLESAWKTAQEGDHGSHVYTKALLAYAFALAGNQDKRKEVLKSLNEEAVKKDNSVHWERPQKPKAPVGHFYEPQAPSAEVEMTSYVLLAYLTAQPAPTSEDLTSATNIVKWITKQQNAQGGFSSTQDTVVALHALSKYGAATFTRTGKAAQVTIQSSGTFSSKFQVDNNNRLLLQQVSLPELPGEYSMKVTGEGCVYLQVRLLGR

SEQ ID NO: 911063 - protein, 1125 aa, Homo sapiens
MGKNKLLHPSLVLLLLVLLPTDASVSGKPQYMVLVPSLLHTETTEKGCVLLSYLNETVTVSASLESVRGNRSLFTDLEAENDVLHCVAFAVPKSSSNEEVMFLTVQVKGPTQEFKKRTTVMVKNEDSLVFVQTDKSIYKPGQTVKFRVVSMDENFHPLNELIPLVYIQDPKGNRIAQWQSFQLEGGLKQFSFPLSSEPFQGSYKVVVQKKSGGRTEHPFTVEEFVLPKFEVQVTVPKIITILEEEMNVSVCGLYTYGKPVPGHVTVSICRKYSDASDCHGEDSQAFCEKFSGQLNSHGCFYQQVKTKVFQLKRKEYEMKLHTEAQIQEEGTVVELTGRQSSEITRTITKLSFVKVDSHFRQGIPFFGQVRLVDGKGVPIPNKVIFIRGNEANYYSNATTDEHGLVQFSINTTNVMGTSLTVRVNYKDRSPCYGYQWVSEEHEEAHHTAYLVFSPSKSFVHLEPMSHELPCGHTQTVQAHYILNGGTLLGLKKLSFYYLIMAKGGIVRTGTHGLLVKQEDMKGHFSISIPVKSDIAPVARLLIYAVLPTGDVIGDSAKYDVENCLANKVDLSFSPSQSLPASHAHLRVTAAPQSVCALRAVDQSVLLMKPDAELSASSVYNLLPEKDLTGFPGPLNDQDDEDCINRHNVYINGITYTPVSSTNEKDMYSFLEDMGLKAFTNSKIRKPKMCPQLQQYEMHGPEGLRVGFYESDVMGRGHARLVHVEEPHTETVRKYFPETWIWDLVVVNSAGVAEVGVTVPDTITEWKAGAFCLSEDAGLGISSTASLRAFQPFFVELTMPYSVIRGEAFTLKATVLNYLPKCIRVSVQLEASPAFLAVPVEKEQAPHCICANGRQTVSWAVTPKSLGNVNFTVSAEALESQELCGTEVPSVPEHGRKDTVIKPLLVEPEGLEKETTFNSLLCPSGGEVSEELSLKLPPNVVEESARASVSVLGDILGSAMQNTQNLLQMPYGCGEQNMVLFAPNIYVLDYLNETQQLTPEIKSKAIGYLNTGYQRQLNYKHYDGSYSTFGERYGRNQGNTWLTAFVLKTFAQARAYIFIDEAHITQALIWLSQRQKDNGCFRSSGSLLNNAIKGGVEDEVTLSAYITIALLEIPLTVTVGTTPFLC

SEQ ID NO: 911064 - protein, 976 aa, Homo sapiens
MGKNKLLHPSLVLLLLVLLPTDASVSGKPQYMVLVPSLLHTETTEKGCVLLSYLNETVTVSASLESVRGNRSLFTDLEAENDVLHCVAFAVPKSSSNEEVMFLTVQVKGPTQEFKKRTTVMVKNEDSLVFVQTDKSIYKPGQTVKFRVVSMDENFHPLNELIPLVYIQDPKGNRIAQWQSFQLEGGLKQFSFPLSSEPFQGSYKVVVQKKSGGRTEHPFTVEEFVLPKFEVQVTVPKIITILEEEMNVSVCGLYTYGKPVPGHVTVSICRKYSDASDCHGEDSQAFCEKFSGQLNSHGCFYQQVKTKVFQLKRKEYEMKLHTEAQIQEEGTVVELTGRQSSEITRTITKLSFVKVDSHFRQGIPFFGQVRLVDGKGVPIPNKVIFIRGNEANYYSNATTDEHGLVQFSINTTNVMGTSLTVRVNYKDRSPCYGYQWVSEEHEEAHHTAYLVFSPSKSFVHLEPMSHELPCGHTQTVQAHYILNGGTLLGLKKLSFYYLIMAKGGIVRTGTHGLLVKQEDMKGHFSISIPVKSDIAPVARLLIYAVLPTGDVIGDSAKYDVENCLANKVDLSFSPSQSLPASHAHLRVTAAPQSVCALRAVDQSVLLMKPDAELSASSVYNLLPEKDLTGFPGPLNDQDDEDCINRHNVYINGITYTPVSSTNEKDMYSFLEDMGLKAFTNSKIRKPKMCPQLQQYEMHGPEGLRVGFYESDVMGRGHARLVHVEEPHTETVRKYFPETWIWDLVVVNSAGVAEVGVTVPDTITEWKAGAFCLSEDAGLGISSTASLRAFQPFFVELTMPYSVIRGEAFTLKATVLNYLPKCIRVSVQLEASPAFLAVPVEKEQAPHCICANGRQTVSWAVTPKSLGNVNFTVSAEALESQELCGTEVPSVPEHGRKDTVIKPLLVEPEGLEKETTFNSLLCPSGGEVSEELSLKLPPNVVEESARASVSVLGDILGSAMPHLLTSMYWIIYAQQLL

SEQ ID NO: 911065 - protein, 720 aa, Homo sapiens
MGKNKLLHPSLVLLLLVLLPTDASVSGKPQYMVLVPSLLHTETTEKGCVLLSYLNETVTVSASLESVRGNRSLFTDLEAENDVLHCVAFAVPKSSSNEEVMFLTVQVKGPTQEFKKRTTVMVKNEDSLVFVQTDKSIYKPGQTVKFRVVSMDENFHPLNELIPLVYIQDPKGNRIAQWQSFQLEGGLKQFSFPLSSEPFQGSYKVVVQKKSGGRTEHPFTVEEFVLPKFEVQVTVPKIITILEEEMNVSVCGLYTYGKPVPGHVTVSICRKYSDASDCHGEDSQAFCEKFSGQLNSHGCFYQQVKTKVFQLKRKEYEMKLHTEAQIQEEGTVVELTGRQSSEITRTITKLSFVKVDSHFRQGIPFFGQVRLVDGKGVPIPNKVIFIRGNEANYYSNATTDEHGLVQFSINTTNVMGTSLTVRVNYKDRSPCYGYQWVSEEHEEAHHTAYLVFSPSKSFVHLEPMSHELPCGHTQTVQAHYILNGGTLLGLKKLSFYYLIMAKGGIVRTGTHGLLVKQEDMKGHFSISIPVKSDIAPVARLLIYAVLPTGDVIGDSAKYDVENCLANKVDLSFSPSQSLPASHAHLRVTAAPQSVCALRAVDQSVLLMKPDAELSASSVYNLLPEKDLTGFPGPLNDQDDEDCINRHNVYINGITYTPVSSTNEKDMYSFLEDMGLKAFTNSKIRKPKMCPQLQQYEMHGPEGLRVGFYGKQKINKYILPN

SEQ ID NO: 911066 - protein, 688 aa, Homo sapiens; identical to SEQ ID NO: 911046

SEQ ID NO: 911067 - protein, 190 aa, Homo sapiens
MGKNKLLHPSLVLLLLVLLPTDASVSGKPQYMVLVPSLLHTETTEKGCVLLSYLNETVTVSASLESVRGNRSLFTDLEAENDVLHCVAFAVPKSSSNEEVMFLTVQVKGPTQEFKKRTTVMVKNEDSLVFVQTDKSIYKPGQTVKFRVVSMDENFHPLNELIPLVYIQDPKGNRIAHGRVSSRGAKWAEL

SEQ ID NO: 911068 - protein, 68 aa, Homo sapiens
ASSHSLCAPVKGHFSISIPVKSDIAPVARLLIYAVLPTGDVIGDSAKYDVENCLANKVCVLDHKIFNM

SEQ ID NO: 911069 - protein, 114 aa, Homo sapiens
GEAFSRNFSPHARPDNIFEYDGYRPAVQSGDVHCAATQSLEKQKDSIRWKLAQEAQLLPRGHLPEIRPIRPLQLRPGPQISLSVSYTGEPLCPPNMAIVDVKMVSGFIPPEAQQ

SEQ ID NO: 911070 - protein, 86 aa, Homo sapiens
REREREREREREREREREREVGYNTVCSPPAPSFCNMGKNKLLHPSLVLLLLVLLPTDASVSGKPIADFSLYHSFFFPMILSSSYL

SEQ ID NO: 911071 - protein, 1382 aa, Homo sapiens; identical to SEQ ID NO: 911051

SEQ ID NO: 911072 - protein, 1364 aa, Homo sapiens
MGKNKLLHPSLVLLLLVLLPTDASVSGKPQYMVLVPSLLHTETTEKGCVLLSYLNETVTVSASLESVRGNRSLFTDLEAENDVLHCVAFAVPKSSSNEEVMFLTVQVKGPTQEFKKRTTVMVKNEDSLVFVQTDKSIYKPGQTVKFRVVSMDENFHPLNELIPLVYIQDPKGNRIAQWQSFQLEGGLKQFSFPLSSEPFQGSYKVVVQKKSGGRTEHPFTVEEFVLPKFEVQVTVPKIITILEEEMNVSVCGLYTYGKPVPGHVTVSICRKYSDASDCHGEDSQAFCEKFSGQLNSHGCFYQQVKTKVFQLKRKEYEMKLHTEAQIQEEGTVVELTGRQSSEITRTITKLSFVKVDSHFRQGIPFFGQVRLVDGKGVPIPNKVIFIRGNEANYYSNATTDEHGLVQFSINTTNVMGTSLTVRVNYKDRSPCYGYQWVSEEHEEAHHTAYLVFSPSKSFVHLEPMSHELPCGHTQTVQAHYILNGGTLLGLKKLSFYYLIMAKGGIVRTGTHGLLVKQEDMKGHFSISIPVKSDIAPVARLLIYAVLPTGDVIGDSAKYDVENCLANKVDLSFSPSQSLPASHAHLRVTAAPQSVCALRAVDQSVLLMKPDAELSASSVYNLLPEKDLTGFPGPLNDQDDEDCINRHNVYINGITYTPVSSTNEKDMYSFLEDMGLKAFTNSKIRKPKMCPQLQQYEMHGPEGLRVGFYESDVMGRGHARLVHVEEPHTETVRKYFPETWIWDLVVVNSAGVAEVGVTVPDTITEWKAGAFCLSEDAGLGISSTASLRAFQPFFVELTMPYSVIRGEAFTLKATVLNYLPKCIRVSVQLEASPAFLAVPVEKEQAPHCICANGRQTVSWAVTPKSLGNVNFTVSAEALESQELCGTEVPSVPEHGRKDTVIKPLLVEPEGLEKETTFNSLLCPSGGEVSEELSLKLPPNVVEESARASVSVLGDILGSAMQNTPPNIYVLDYLNETQQLTPEIKSKAIGYLNTGYQRQLNYKHYDGSYSTFGERYGRNQGNTWLTAFVLKTFAQARAYIFIDEAHITQALIWLSQRQKDNGCFRSSGSLLNNAIKGGVEDEVTLSAYITIALLEIPLTVTHPVVRNALFCLESAWKTAQEGDHGSHVYTKALLAYAFALAGNQDKRKEVLKSLNEEAVKKDNSVHWERPQKPKAPVGHFYEPQAPSAEVEMTSYVLLAYLTAQPAPTSEDLTSATNIVKWITKQQNAQGGFSSTQDTVVALHALSKYGAATFTRTGKAAQVTIQSSGTFSSKFQVDNNNRLLLQQVSLPELPGEYSMKVTGEGCVYLQTSLKYNILPEKEEFPFALGVQTLPQTCDEPKAPHQLPNLPKCQLHREAALPSQHGDR

SEQ ID NO: 911073 - protein, 891 aa, Homo sapiens
RLFSYSFLVNRTPQTSQAKGFSPVWVLMGEAVCLPQEDIVSDIAPVARLLIYAVLPTGDVIGDSAKYDVENCLANKVDLSFSPSQSLPASHAHLRVTAAPQSVCALRAVDQSVLLMKPDAELSASSVYNLLPEKDLTGFPGPLNDQDDEDCINRHNVYINGITYTPVSSTNEKDMYSFLEDMGLKAFTNSKIRKPKMCPQLQQYEMHGPEGLRVGFYESDVMGRGHARLVHVEEPHTETVRKYFPETWIWDLVVVNSAGVAEVGVTVPDTITEWKAGAFCLSEDAGLGISSTASLRAFQPFFVELTMPYSVIRGEAFTLKATVLNYLPKCIRVSVQLEASPAFLAVPVEKEQAPHCICANGRQTVSWAVTPKSLGNVNFTVSAEALESQELCGTEVPSVPEHGRKDTVIKPLLVEPEGLEKETTFNSLLCPSGGEVSEELSLKLPPNVVEESARASVSVLGDILGSAMQNTQNLLQMPYGCGEQNMVLFAPNIYVLDYLNETQQLTPEIKSKAIGYLNTGYQRQLNYKHYDGSYSTFGERYGRNQGNTWLTAFVLKTFAQARAYIFIDEAHITQALIWLSQRQKDNGCFRSSGSLLNNAIKGGVEDEVTLSAYITIALLEIPLTVTHPVVRNALFCLESAWKTAQEGDHGSHVYTKALLAYAFALAGNQDKRKEVLKSLNEEAVKKDNSVHWERPQKPKAPVGHFYEPQAPSAEVEMTSYVLLAYLTAQPAPTSEDLTSATNIVKWITKQQNAQGGFSSTQDTVVALHALSKYGAATFTRTGKAAQVTIQSSGTFSSKFQVDNNNRLLLQQVSLPELPGEYSMKVTGEGCVYLQTSLKYNILPEKEEFPFALGVQTLPQTCDEPKAPHQLPNLPKCQLHREAALPSQHGDR

SEQ ID NO: 911074 - protein, 585 aa, Homo sapiens
MPYSVIRGEAFTLKATVLNYLPKCIRVSVQLEASPAFLAVPVEKEQAPHCICANGRQTVSWAVTPKSLGNVNFTVSAEALESQELCGTEVPSVPEHGRKDTVIKPLLVEPEGLEKETTFNSLLCPSGGEVSEELSLKLPPNVVEESARASVSVLGDILGSAMQNTQNLLQMPYGCGEQNMVLFAPNIYVLDYLNETQQLTPEIKSKAIGYLNTGYQRQLNYKHYDGSYSTFGERYGRNQGNTWLTAFVLKTFAQARAYIFIDEAHITQALIWLSQRQKDNGCFRSSGSLLNNAIKGGVEDEVTLSAYITIALLEIPLTVTHPVVRNALFCLESAWKTAQEGDHGSHVYTKALLAYAFALAGNQDKRKEVLKSLNEEAVKKDNSVHWERPQKPKAPVGHFYEPQAPSAEVEMTSYVLLAYLTAQPAPTSEDLTSATNIVKWITKQQNAQGGFSSTQDTVVALHALSKYGAATFTRTGKAAQVTIQSSGTFSSKFQVDNNNRLLLQQVSLPELPGEYSMKVTGEGCVYLQTSLKYNILPEKEEFPFALGVQTLPQTCDEPKAPHQLPNLPKCQLHREAALPSQHGDR

SEQ ID NO: 911075 - protein, 1382 aa, Homo sapiens; identical to SEQ ID NO: 911051

SEQ ID NO: 911076 - protein, 355 aa, Homo sapiens
  misc_feature (1)..(1): Xaa can be any naturally occurring amino acid
  misc_feature (6)..(6): Xaa can be any naturally occurring amino acid
XRGGGXRRGGGDRGAAVGAARGEQARAYIFIDEAHITQALIWLSQRQKDNGCFRSSGSLLNNAIKGGVEDEVTLSAYITIALLEIPLTVTHPVVRNALFCLESAWKTAQEGDHGSHVYTKALLAYAFALAGNQDKRKEVLKSLNEEAVKKDNSVHWERPQKPKAPVGHFYEPQAPSAEVEMTSYVLLAYLTAQPAPTSEDLTSATNIVKWITKQQNAQGGFSSTQDTVVALHALSKYGAATFTRTGKAAQVTIQSSGTFSSKFQVDNNNRLLLQQVSLPELPGEYSMKVTGEGCVYLQTSLKYNILPEKEEFPFALGVQTLPQTCDEPKAPHQLPNLPKCQLHREAALPSQHGDR

SEQ ID NO: 911077 - protein, 1382 aa, Homo sapiens; identical to SEQ ID NO: 911051

SEQ ID NO: 911078 - protein, 1382 aa, Homo sapiens; identical to SEQ ID NO: 911051

SEQ ID NO: 911079 - protein, 1382 aa, Homo sapiens; identical to SEQ ID NO: 911051

SEQ ID NO: 911080 - protein, 1382 aa, Homo sapiens; identical to SEQ ID NO: 911051

SEQ ID NO: 911081 - protein, 1382 aa, Homo sapiens; identical to SEQ ID NO: 911051

SEQ ID NO: 911082 - protein, 1366 aa, Homo sapiens
MGKNKLLHPSLVLLLLVLLPTDASVSGKPQYMVLVPSLLHTETTEKGCVLLSYLNETVTVSASLESVRGNRSLFTDLEAENDVLHCVAFAVPKSSSNEEVMFLTVQVKGPTQEFKKRTTVMVKNEDSLVFVQTDKSIYKPGQTVKFRVVSMDENFHPLNELIPLVYIQDPKGNRIAQWQSFQLEGGLKQFSFPLSSEPFQGSYKVVVQKKSGGRTEHPFTVEEFVLPKFEVQVTVPKIITILEEEMNVSVCGLYTYGKPVPGHVTVSICRKYSDASDCHGEDSQAFCEKFSGQLNSHGCFYQQVKTKVFQLKRKEYEMKLHTEAQIQEEGTVVELTGRQSSEITRTITKLSFVKVDSHFRQGIPFFGQVRLVDGKGVPIPNKVIFIRGNEANYYSNATTDEHGLVQFSINTTNVMGTSLTVRVNYKDRSPCYGYQWVSEEHEEAHHTAYLVFSPSKSFVHLEPMSHELPCGHTQTVQAHYILNGGTLLGLKKLSFYYLIMAKGGIVRTGTHGLLVKQEDMKGHFSISIPVKSDIAPVARLLIYAVLPTGDVIGDSAKYDVENCLANKVDLSFSPSQSLPASHAHLRVTAAPQSVCALRAVDQSVLLMKPDAELSASSVYNLLPEKDLTGFPGPLNDQDDEDCINRHNVYINGITYTPVSSTNEKDMYSFLEDMGLKAFTNSKIRKPKMCPQLQQYEMHGPEGLRVGFYESDVMGRGHARLVHVEEPHTETVRKYFPETWIWDLVVVNSAGVAEVGVTVPDTITEWKAGAFCLSEDAGLGISSTASLRAFQPFFVELTMPYSVIRGEAFTLKATVLNYLPKCIRVSVQLEASPAFLAVPVEKEQAPHCICANGRQTVSWAVTPKSLGNVNFTVSAEALESQELCGTEVPSVPEHGRKDTVIKPLLVEPEGLEKETTFNSLLCPSGGEVSEELSLKLPPNVVEESARASVSVLGDILGSAMQNTQNLLQMPYGCGEQNMVLFAPNIYVLDYLNETQQLTPEIKSKAIGYLNTGYQRQLNYKHYDGSYSTFGERYGRNQGNTWLTAFVLKTFAQARAYIFIDEAHITQALIWLSQRQKDNGCFRSSGSLLNNAIKGGVEDEVTLSAYITIALLEIPLTVTHPVVRNALFCLESAWKTAQEGDHGSHVYTKALLAYAFALAGNQDKRKEVLKSLNEEAVKKDNSVHWERPQKPKAPVGHFYEPQAPSAEVEMTSYVLLAYLTAQPAPTSEDLTSATNIVKWITKQQNAQGGFSSTQDTVVALHALSKYGAATFTRTGKAAQVTIQSSGTFSSKFQVDNNNRLLLQQVSLPELPGEYSMKVTGEGCVYLQKTLILSSPGVLSYTGEPLCPPNMAIVDVKMVSGFIPPEAQQ

SEQ ID NO: 911083 - protein, 1331 aa, Homo sapiens; identical to SEQ ID NO: 911062

SEQ ID NO: 911084 - protein, 1101 aa, Homo sapiens
MGKNKLLHPSLVLLLLVLLPTDASVSGKPQYMVLVPSLLHTETTEKGCVLLSYLNETVTVSASLESVRGNRSLFTDLEAENDVLHCVAFAVPKSSSNEEVMFLTVQVKGPTQEFKKRTTVMVKNEDSLVFVQTDKSIYKPGQTVKFRVVSMDENFHPLNELIPLVYIQDPKGNRIAQWQSFQLEGGLKQFSFPLSSEPFQGSYKVVVQKKSGGRTEHPFTVEEFVLPKFEVQVTVPKIITILEEEMNVSVCGLYTYGKPVPGHVTVSICRKYSDASDCHGEDSQAFCEKFSGQLNSHGCFYQQVKTKVFQLKRKEYEMKLHTEAQIQEEGTVVELTGRQSSEITRTITKLSFVKVDSHFRQGIPFFGQVRLVDGKGVPIPNKVIFIRGNEANYYSNATTDEHGLVQFSINTTNVMGTSLTVRVNYKDRSPCYGYQWVSEEHEEAHHTAYLVFSPSKSFVHLEPMSHELPCGHTQTVQAHYILNGGTLLGLKKLSFYYLIMAKGGIVRTGTHGLLVKQEDMKGHFSISIPVKSDIAPVARLLIYAVLPTGDVIGDSAKYDVENCLANKVDLSFSPSQSLPASHAHLRVTAAPQSVCALRAVDQSVLLMKPDAELSASSVYNLLPEKDLTGFPGPLNDQDDEDCINRHNVYINGITYTPVSSTNEKDMYSFLEDMGLKAFTNSKIRKPKMCPQLQQYEMHGPEGLRVGFYESDVMGRGHARLVHVEEPHTETVRKYFPETWIWDLVVVNSAGVAEVGVTVPDTITEWKAGAFCLSEDAGLGISSTASLRAFQPFFVELTMPYSVIRGEAFTLKATVLNYLPKCIRVSVQLEASPAFLAVPVEKEQAPHCICANGRQTVSWAVTPKSLGNVNFTVSAEALESQELCGTEVPSVPEHGRKDTVIKPLLVEPEGLEKETTFNSLLCPSGGEVSEELSLKLPPNVVEESARASVSVLGDILGSAMQNTQNLLQMPYGCGEQNMVLFAPNIYVLDYLNETQQLTPEIKSKAIGYLNTGYQRQLNYKHYDGSYSTFGERYGRNQGNTWLTAFVLKTFAQARAYIFIFYSSLYGIVGSDPELLKQPLSFCLWESHMRAWLMCASSDEDVE

SEQ ID NO: 911085 - protein, 872 aa, Homo sapiens
MGKNKLLHPSLVLLLLVLLPTDASVSGKPQYMVLVPSLLHTETTEKGCVLLSYLNETVTVSASLESVRGNRSLFTDLEAENDVLHCVAFAVPKSSSNEEVMFLTVQVKGPTQEFKKRTTVMVKNEDSLVFVQTDKSIYKPGQTVKFRVVSMDENFHPLNELIPLVYIQDPKGNRIAQWQSFQLEGGLKQFSFPLSSEPFQGSYKVVVQKKSGGRTEHPFTVEEFVLPKFEVQVTVPKIITILEEEMNVSVCGLYTYGKPVPGHVTVSICRKYSDASDCHGEDSQAFCEKFSGQLNSHGCFYQQVKTKVFQLKRKEYEMKLHTEAQIQEEGTVVELTGRQSSEITRTITKLSFVKVDSHFRQGIPFFGQVRLVDGKGVPIPNKVIFIRGNEANYYSNATTDEHGLVQFSINTTNVMGTSLTVRVNYKDRSPCYGYQWVSEEHEEAHHTAYLVFSPSKSFVHLEPMSHELPCGHTQTVQAHYILNGGTLLGLKKLSFYYLIMAKGGIVRTGTHGLLVKQEDMKGHFSISIPVKSDIAPVARLLIYAVLPTGDVIGDSAKYDVENCLANKVDLSFSPSQSLPASHAHLRVTAAPQSVCALRAVDQSVLLMKPDAELSASSVYNLLPEKDLTGFPGPLNDQDDEDCINRHNVYINGITYTPVSSTNEKDMYSFLEDMGLKAFTNSKIRKPKMCPQLQQYEMHGPEGLRVGFYESDVMGRGHARLVHVEEPHTETVRKYFPETWIWDLVVVNSAGVAEVGVTVPDTITEWKAGAFCLSEDAGLGISSTASLRAFQPFFVELTMPYSVIRGEAFTLKATVLNYLPKCIRVSVQLEASPAFLAVPVEKEQAPHCICANGRQTVSWAVTPKSLGEQKTAR

SEQ ID NO: 911086 - protein, 767 aa, Homo sapiens
MGKNKLLHPSLVLLLLVLLPTDASVSGKPQYMVLVPSLLHTETTEKGCVLLSYLNETVTVSASLESVRGNRSLFTDLEAENDVLHCVAFAVPKSSSNEEVMFLTVQVKGPTQEFKKRTTVMVKNEDSLVFVQTDKSIYKPGQTVKFRVVSMDENFHPLNELIPLVYIQDPKGNRIAQWQSFQLEGGLKQFSFPLSSEPFQGSYKVVVQKKSGGRTEHPFTVEEFVLPKFEVQVTVPKIITILEEEMNVSVCGLYTYGKPVPGHVTVSICRKYSDASDCHGEDSQAFCEKFSGQLNSHGCFYQQVKTKVFQLKRKEYEMKLHTEAQIQEEGTVVELTGRQSSEITRTITKLSFVKVDSHFRQGIPFFGQVRLVDGKGVPIPNKVIFIRGNEANYYSNATTDEHGLVQFSINTTNVMGTSLTVRVNYKDRSPCYGYQWVSEEHEEAHHTAYLVFSPSKSFVHLEPMSHELPCGHTQTVQAHYILNGGTLLGLKKLSFYYLIMAKGGIVRTGTHGLLVKQEDMKGHFSISIPVKSDIAPVARLLIYAVLPTGDVIGDSAKYDVENCLANKVDLSFSPSQSLPASHAHLRVTAAPQSVCALRAVDQSVLLMKPDAELSASSVYNLLPEKDLTGFPGPLNDQDDEDCINRHNVYINGITYTPVSSTNEKDMYSFLEDMGLKAFTNSKIRKPKMCPQLQQYEMHGPEGLRVGFYESDVMGRGHARLVHVEEPVWVNQHVWLEVGVTSPWHPFPVGRALCLFEDLAWVLFCPFR

SEQ ID NO: 911087 - protein, 182 aa, Homo sapiens
MGKNKLLHPSLVLLLLVLLPTDASVSGKPQYMVLVPSLLHTETTEKGCVLLSYLNETVTVSASLESVRGNRSLFTDLEAENDVLHCVAFAVPKSSSNEEVMFLTVQVKGPTQEFKKRTTVMVKNEDSLVFVQTDKSIYKPGQTVKFRVVSMDENFHPLNELIPLVYIQDPKGNRIAHGRVSS

SEQ ID NO: 911088 - protein, 515 aa, Homo sapiens
MACKISPGANSASLPGHPNKVICERVRLQSLFPLLPSDQNTTVQEDAHFKAFFQSEDSPSPKRQRLSHSVFDYTSASPAPSPPMRPWEMTSNRQPPSVRPSQHHFSGERCNTPARNRRSPPVRRQRGRRDRLSRHNSISQDENYHHLPYAQQQAIEEPRAFHPPNVSPRLLHPAAHPPQQNAVMVDIHDQLHQGTVPVSYTVTTVAPHGIPLCTGQHIPACSTQQVPGCSVVFSGQHLPVCSVPPPMLQACSVQHLPVPYAAFPPLISSDPFLIHPPHLSPHHPPHLPPPGQFVPFQTQQSRSPLQRIENEVELLGEHLPVGGFTYPPSAHPPTLPPSAPLQFLTHDPLHQEVSFGVPYPPFMPRRLTGRSRYRSQQPIPPPPYHPSLLPYVLSMLPVPPAVGPTFSFELDVEDGEVENYEALLNLAERLGEAKPRGLTKADIEQLPSYRFNPNNHQSEQTLCVVCMCDFESRQLLRVLPCNHEFHAKCVDKWLKANRTCPICRADASEVHRDSE

SEQ ID NO: 911089 - protein, 427 aa, Homo sapiens [sequence omitted]

SEQ ID NO: 911090 - protein, 427 aa, Homo sapiens [sequence omitted]

SEQ ID NO: 911091 - protein, 515 aa, Homo sapiens; identical to SEQ ID NO: 911088

SEQ ID NO: 911092 - protein, 432 aa, Homo sapiens
MRPWEMTSNRQPPSVRPSQHHFSGERCNTPARNRRSPPVRRQRGRRDRLSRHNSISQDENYHHLPYAQQQAIEEPRAFHPPNVSPRLLHPAAHPPQQNAVMVDIHDQLHQGTVPVSYTVTTVAPHGIPLCTGQHIPACSTQQVPGCSVVFSGQHLPVCSVPPPMLQACSVQHLPVPYAAFPPLISSDPFLIHPPHLSPHHPPHLPPPGQFVPFQTQQSRSPLQRIENEVELLGEHLPVGGFTYPPSAHPPTLPPSAPLQFLTHDPLHQEVSFGVPYPPFMPRRLTGRSRYRSQQPIPPPPYHPSLLPYVLSMLPVPPAVGPTFSFELDVEDGEVENYEALLNLAERLGEAKPRGLTKADIEQLPSYRFNPNNHQSEQTLCVVCMCDFESRQLLRVLPCNHEFHAKCVDKWLKANRTCPICRADASEVHRDSE

SEQ ID NO: 911093 - protein, 615 aa, Homo sapiens
AAAAVAAAAASAAAAAAHFQPQSSSPRPGPAELGPPRRPRPPPPPPRPEPAATDRLSPPGHGPLRAGAQGGGACGRAPGAGSVGASFQCQSIHHDHICHDDSDKISPGANSASLPGHPNKVICERVRLQSLFPLLPSDQNTTVQEDAHFKAFFQSEDSPSPKRQRLSHSVFDYTSASPAPSPPMRPWEMTSNRQPPSVRPSQHHFSGERCNTPARNRRSPPVRRQRGRRDRLSRHNSISQDENYHHLPYAQQQAIEEPRAFHPPNVSPRLLHPAAHPPQQNAVMVDIHDQLHQGTVPVSYTVTTVAPHGIPLCTGQHIPACSTQQVPGCSVVFSGQHLPVCSVPPPMLQACSVQHLPVPYAAFPPLISSDPFLIHPPHLSPHHPPHLPPPGQFVPFQTQQSRSPLQRIENEVELLGEHLPVGGFTYPPSAHPPTLPPSAPLQFLTHDPLHQEVSFGVPYPPFMPRRLTGRSRYRSQQPIPPPPYHPSLLPYVLSMLPVPPAVGPTFSFELDVEDGEVENYEALLNLAERLGEAKPRGLTKADIEQLPSYRFNPNNHQSEQTLCVVCMCDFESRQLLRVLPCNHEFHAKCVDKWLKANRTCPICRADASEVHRDSE

SEQ ID NO: 911094 - protein, 409 aa, Homo sapiens
MTSNRQPPSVRPSQHHFSGERCNTPARNRRSPPVRRQRGRRDRLSRHNSISQDAFHPPNVSPRLLHPAAHPPQQNAVMVDIHDQLHQGTVPVSYTVTTVAPHGIPLCTGQHIPACSTQQVPGCSVVFSGQHLPVCSVPPPMLQACSVQHLPVPYAAFPPLISSDPFLIHPPHLSPHHPPHLPPPGQFVPFQTQQSRSPLQRIENEVELLGEHLPVGGFTYPPSAHPPTLPPSAPLQFLTHDPLHQEVSFGVPYPPFMPRRLTGRSRYRSQQPIPPPPYHPSLLPYVLSMLPVPPAVGPTFSFELDVEDGEVENYEALLNLAERLGEAKPRGLTKADIEQLPSYRFNPNNHQSEQTLCVVCMCDFESRQLLRVLPCNHEFHAKCVDKWLKANRTCPICRADASEVHRDSE

SEQ ID NO: 911095 - protein, 171 aa, Homo sapiens
MRPWEMTSNRQPPSVRPSQHHFSGERCNTPARNRRSPPVRRQRGRRDRLSRHNSISQDENYHHLPYAQQQAIEEPRAFHPPNVSPRLLHPAAHPPQQNAVMVDIHDQLHQGTVPVSYTVTTVAPHGIPLCTGQHIPACSTQQVPGCSVVFSGQHLPVCSVPPPVSLYLCSH

SEQ ID NO: 911096 - protein, 427 aa, Homo sapiens [sequence omitted]

SEQ ID NO: 911097 - protein, 465 aa, Homo sapiens
MACKSEDSPSPKRQRLSHSVFDYTSASPAPSPPMRPWEMTSNRQPPSVRPSQHHFSGERCNTPARNRRSPPVRRQRGRRDRLSRHNSISQDENYHHLPYAQQQAIEEPRAFHPPNVSPRLLHPAAHPPQQNAVMVDIHDQLHQGTVPVSYTVTTVAPHGIPLCTGQHIPACSTQQVPGCSVVFSGQHLPVCSVPPPMLQACSVQHLPVPYAAFPPLISSDPFLIHPPHLSPHHPPHLPPPGQFVPFQTQQSRSPLQRIENEVELLGEHLPVGGFTYPPSAHPPTLPPSAPLQFLTHDPLHQEVSFGVPYPPFMPRRLTGRSRYRSQQPIPPPPYHPSLLPYVLSMLPVPPAVGPTFSFELDVEDGEVENYEALLNLAERLGEAKPRGLTKADIEQLPSYRFNPNNHQSEQTLCVVCMCDFESRQLLRVLPCNHEFHAKCVDKWLKANRTCPICRADASEVHRDSE

SEQ ID NO: 911098 - protein, 427 aa, Homo sapiens [sequence omitted]

SEQ ID NO: 911099 - protein, 427 aa, Homo sapiens [sequence omitted]

SEQ ID NO: 911100 - protein, 153 aa, Homo sapiens
MPRRLTGRSRYRSQQPIPPPPYHPSLLPYVLSMLPVPPAVGPTFSFELDVEDGEVENYEALLNLAERLGEAKPRGLTKADIEQLPSYRFNPNNHQSEQTLCVVCMCDFESRQLLRVLPCNHEFHAKCVDKWLKANRTCPICRADASEVHRDSE

SEQ ID NO: 911101 - protein, 333 aa, Homo sapiens
GAAENFPQAACSPGFFKFEASESPCLECPEHTLPSPEGATSCECEEGFFRAPQDPASMPCTRPPSAPHYLTAVGMGAKVELRWTPPQDSGGREDIVYSVTCEQCWPESGECGPCEASVRYSEPPHGLTRTSVTVSDLEPHMNYTFTVEARNGVSGLVTSRSFRTASVSINQTEPPKVRLEGRSTTSLSVSWSIPPPQQSRVWKYEVTYRKKGDSNSYNVRRTEGFSVTLDDLAPDTTYLVQVQALTQEGQGAGSKVHEFQTLSRRDLATWRDGGVVSGGCLWWRSGLFPAGDPCPARGCRPCIESLICPLAPGGSDPVRRARGARLRGRSGAP

SEQ ID NO: 911102 - protein, 673 aa, Homo sapiens
MSCGGGGLARRYRGHLGGQFHSTRPPSAPHYLTAVGMGAKVELRWTPPQDSGGREDIVYSVTCEQCWPESGECGPCEASVRYSEPPHGLTRTSVTVSDLEPHMNYTFTVEARNGVSGLVTSRSFRTASVSINQTEPPKVRLEGRSTTSLSVSWSIPPPQQSRVWKYEVTYRKKGDSNSYNVRRTEGFSVTLDDLAPDTTYLVQVQALTQEGQGAGSKVHEFQTLSPEGSGNLAVIGGVAVGVVLLLVLAGVGFFIHRRRKNQRARQSPEDVYFSKSEQLKPLKTYVDPHTYEDPNQAVLKFTTEIHPSCVTRQKVIGAGEFGEVYKGMLKTSSGKKEVPVAIKTLKAGYTEKQRVDFLGEAGIMGQFSHHNIIRLEGVISKYKPMMIITEYMENGALDKFLREKDGEFSVLQLVGMLRGIAAGMKYLANMNYVHRDLAARNILVNSNLVCKVSDFGLSRVLEDDPEATYTTSGGKIPIRWTAPEAISYRKFTSASDVWSFGIVMWEVMTYGERPYWELSNHEVMKAINDGFRLPTPMDCPSAIYQLMMQCWQQERARRPKFADIVSILDKLIRAPDSLKTLADFDPRVSIRLPSTSGSEGVPFRTVSEWLESIKMQQYTEHFMAAGYTAIEKVVQMTNDDIKRIGVRLPGHQKRIAYSLLGLKDQVNTVGIPI

SEQ ID NO: 911103 - protein, 561 aa, Homo sapiens
QGSGTAGLCRSFRTASVSINQTEPPKVRLEGRSTTSLSVSWSIPPPQQSRVWKYEVTYRKKGDSNSYNVRRTEGFSVTLDDLAPDTTYLVQVQALTQEGQGAGSKVHEFQTLSPEGSGNLAVIGGVAVGVVLLLVLAGVGFFIHRRRKNQRARQSPEDVYFSKSEQLKPLKTYVDPHTYEDPNQAVLKFTTEIHPSCVTRQKVIGAGEFGEVYKGMLKTSSGKKEVPVAIKTLKAGYTEKQRVDFLGEAGIMGQFSHHNIIRLEGVISKYKPMMIITEYMENGALDKFLREKDGEFSVLQLVGMLRGIAAGMKYLANMNYVHRDLAARNILVNSNLVCKVSDFGLSRVLEDDPEATYTTSGGKIPIRWTAPEAISYRKFTSASDVWSFGIVMWEVMTYGERPYWELSNHEVMKAINDGFRLPTPMDCPSAIYQLMMQCWQQERARRPKFADIVSILDKLIRAPDSLKTLADFDPRVSIRLPSTSGSEGVPFRTVSEWLESIKMQQYTEHFMAAGYTAIEKVVQMTNDDIKRIGVRLPGHQKRIAYSLLGLKDQVNTVGIPI

SEQ ID NO: 911104 - protein, 1022 aa, Homo sapiens
GAEVARRPAGGSGHRGRRAGVRVCGSRARGDRTESEKRGMELQAARACFALLWGCALAAAAAAQGKEVVLLDFAAAGGELGWLTHPYGKGWDLMQNIMNDMPIYMYSVCNVMSGDQDNWLRTNWVYRGEAERIFIELKFTVRDCNSFPGGASSCKETFNLYYAESDLDYGTNFQKRLFTKIDTIAPDEITVSSDFEARHVKLNVEERSVGPLTRKGFYLAFQDIGACVALLSVRVYYKKCPELLQGLAHFPETIAGSDAPSLATVAGTCVDHAVVPPGGEEPRMHCAVDGEWLVPIGQCLCQAGYEKVEDACQACSPGFFKFEASESPCLECPEHTLPSPEGATSCECEEGFFRAPQDPASMPCTRPPSAPHYLTAVGMGAKVELRWTPPQDSGGREDIVYSVTCEQCWPESGECGPCEASVRYSEPPHGLTRTSVTVSDLEPHMNYTFTVEARNGVSGLVTSRSFRTASVSINQTEPPKVRLEGRSTTSLSVSWSIPPPQQSRVWKYEVTYRKKGDSNSYNVRRTEGFSVTLDDLAPDTTYLVQVQALTQEGQGAGSKVHEFQTLSPEGSGNLAVIGGVAVGVVLLLVLAGVGFFIHRRRKNQRARQSPEDVYFSKSEQLKPLKTYVDPHTYEDPNQAVLKFTTEIHPSCVTRQKVIGAGEFGEVYKGMLKTSSGKKEVPVAIKTLKAGYTEKQRVDFLGEAGIMGQFSHHNIIRLEGVISKYKPMMIITEYMENGALDKFLREKDGEFSVLQLVGMLRGIAAGMKYLANMNYVHRDLAARNILVNSNLVCKVSDFGLSRVLEDDPEATYTTSGGKIPIRWTAPEAISYRKFTSASDVWSFGIVMWEVMTYGERPYWELSNHEVMKAINDGFRLPTPMDCPSAIYQLMMQCWQQERARRPKFADIVSILDKLIRALPHGVRVAGVHQDAAVYGALHGGRLHCHREGGADDQRRHQEDWGAAARPPEAHRLQPAGTQGPGEHCGDPHLSLDRAWSPIGQEYLKKQSGLPAVPCWATGDFIYF

SEQ ID NO: 911105 - protein, 360 aa, Homo sapiens
GAEVARRPAGGSGHRGRRAGVRVCGSRARGDRTESEKRGMELQAARACFALLWGCALAAAAAAQGKEVVLLDFAAAGGELGWLTHPYGKGWDLMQNIMNDMPIYMYSVCNVMSGDQDNWLRTNWVYRGEAERIFIELKFTVRDCNSFPGGASSCKETFNLYYAESDLDYGTNFQKLPFTSASDVWSFGIVMWEVMTYGERPYWELSNHEVMKAINDGFRLPTPMDCPSAIYQLMMQCWQQERARRPKFADIVSILDKLIRAPDSLKTLADFDPRVSIRLPSTSGSEGVPFRTVSEWLESIKMQQYTEHFMAAGYTAIEKVVQMTNDDIKRIGVRLPGHQKRIAYSLLGLKDQVNTVGIPI

SEQ ID NO: 911106 - protein, 1015 aa, Homo sapiens
GAEVARRPAGGSGHRGRRAGVRVCGSRARGDRTESEKRGMELQAARACFALLWGCALAAAAAAQGKEVVLLDFAAAGGELGWLTHPYGKGWDLMQNIMNDMPIYMYSVCNVMSGDQDNWLRTNWVYRGEAERIFIELKFTVRDCNSFPGGASSCKETFNLYYAESDLDYGTNFQKRLFTKIDTIAPDEITVSSDFEARHVKLNVEERSVGPLTRKGFYLAFQDIGACVALLSVRVYYKKCPELLQGLAHFPETIAGSDAPSLATVAGTCVDHAVVPPGGEEPRMHCAVDGEWLVPIGQCLCQAGYEKVEDACQACSPGFFKFEASESPCLECPEHTLPSPEGATSCECEEGFFRAPQDPASMPCTRPPSAPHYLTAVGMGAKVELRWTPPQDSGGREDIVYSVTCEQCWPESGECGPCEASVRYSEPPHGLTRTSVTVSDLEPHMNYTFTVEARNGVSGLVTSRSFRTASVSINQTEPPKVRLEGRSTTSLSVSWSIPPPQQSRVWKYEVTYRKKGDSNSYNVRRTEGFSVTLDDLAPDTTYLVQVQALTQEGQGAGSKVHEFQTLSPEGSGNLAVIGGVAVGVVLLLVLAGVGFFIHRRRKNQRARQSPEDVYFSKSEQLKPLKTYVDPHTYEDPNQAVLKFTTEIHPSCVTRQKVIGAGEFGEVYKGMLKTSSGKKEVPVAIKTLKAGYTEKQRVDFLGEAGIMGQFSHHNIIRLEGVISKYKPMMIITEYMENGALDKFLREKDGEFSVLQLVGMLRGIAAGMKYLANMNYVHRDLAARNILVNSNLVCKVSDFGLSRVLEDDPEATYTTSGGKIPIRWTAPEAISYRKFTSASDVWSFGIVMWEVMTYGERPYWELSNHEVMKAINDGFRLPTPMDCPSAIYQLMMQCWQQERARRPKFADIVSILDKLIRAPDSLKTLADFDPRVSIRLPSTSGSEGVPFRTVSEWLESIKMQQYTEHFMAAGYTAIEKVVQMTNDDIKRIGVRLPGHQKRIAYSLLGLKDQVNTVGIPI

SEQ ID NO: 911107 - protein, 1015 aa, Homo sapiens; identical to SEQ ID NO: 911106

SEQ ID NO: 911108 - protein, 1015 aa, Homo sapiens; identical to SEQ ID NO: 911106

SEQ ID NO: 911109 - protein, 482 aa, Homo sapiens
GAEVARRPAGGSGHRGRRAGVRVCGSRARGDRTESEKRGMELQAARACFALLWGCALAAAAAAQGKEVVLLDFAAAGGELGWLTHPYGKGWDLMQNIMNDMPIYMYSVCNVMSGDQDNWLRTNWVYRGEAERIFIELKFTVRDCNSFPGGASSCKETFNLYYAESDLDYGTNFQKRLFTKIDTIAPDEITVSSDFEARHVKLNVEERSVGPLTRKGFYLAFQDIGACVALLSVRVYYKKCPELLQGLAHFPETIAGSDAPSLATVAGTCVDHAVVPPGGEEPRMHCAVDGEWLVPIGQCLCQAGYEKVEDACQACSPGFFKFEASESPCLECPEHTLPSPEGATSCECEEGFFRAPQDPASMPCTRPPSAPHYLTAVGMGAKVELRWTPPQDSGGREDIVYSVTCEQCWPESGECGPCEASVRYSEPPHGLTRTSVTVSDLEPHMNYTFTVEARNGVSGLVTSRSFRTASVSINQTGWSAMA

SEQ ID NO: 911110 - protein, 315 aa, Homo sapiens
GAEVARRPAGGSGHRGRRAGVRVCGSRARGDRTESEKRGMELQAARACFALLWGCALAAAAAAQGKEVVLLDFAAAGGELGWLTHPYGKGWDLMQNIMNDMPIYMYSVCNVMSGDQDNWLRTNWVYRGEAERIFIELKFTVRDCNSFPGGASSCKETFNLYYAESDLDYGTNFQKRLFTKIDTIAPDEITVSSDFEARHVKLNVEERSVGPLTRKGFYLAFQDIGACVALLSVRVYYKKCPELLQGLAHFPETIAGSDAPSLATVAGTCVDHAVVPPGGEEPRMHCAVDGEWLVPIGQCLCQAGYEKVEDACQGE

SEQ ID NO: 911111 - protein, 1015 aa, Homo sapiens; identical to SEQ ID NO: 911106

SEQ ID NO: 911112 - protein, 164 aa, Homo sapiens
RGTKEARGTKEARGTKEARGTKEAVLKFTTEIHPSCVTRQKVIGAGEFGEVYKGMLKTSSGKKEVPVAIKTLKAGYTEKQRVDFLGEAGIMGQFSHHNIIRLEGVISKCEAWGLPTLGGEGPLSRGSVCDCAHLPYTCAHLPPTPAPTSSTTVPTSPQYLYPPP

SEQ ID NO: 911113 - protein, 563 aa, Homo sapiens
SLSEVTELPGLGFCPRRCCSINQTEPPKVRLEGRSTTSLSVSWSIPPPQQSRVWKYEVTYRKKGDSNSYNVRRTEGFSVTLDDLAPDTTYLVQVQALTQEGQGAGSKVHEFQTLSPEGSGNLAVIGGVAVGVVLLLVLAGVGFFIHRRRKNQRARQSPEDVYFSKSEQLKPLKTYVDPHTYEDPNQAVLKFTTEIHPSCVTRQKVIGAGEFGEVYKGMLKTSSGKKEVPVAIKTLKAGYTEKQRVDFLGEAGIMGQFSHHNIIRLEGVISKYKPMMIITEYMENGALDKFLREKDGEFSVLQLVGMLRGIAAGMKYLANMNYVHRDLAARNILVNSNLVCKVSDFGLSRVLEDDPEATYTTSGGKIPIRWTAPEAISYRKFTSASDVWSFGIVMWEVMTYGERPYWELSNHEVMKAINDGFRLPTPMDCPSAIYQLMMQCWQQERARRPKFADIVSILDKLIRAPDSLKTLADFDPRVSIRLPSTSGSEGVPFRTVSEWLESIKMQQYTEHFMAAGYTAIEKVVQMTNDDIKRIGVRLPGHQKRIAYSLLGLKDQVNTVGIPI

SEQ ID NO: 911114 - protein, 243 aa, Homo sapiens
MVEAGCELARHILVNSNLVCKVSDFGLSRVLEDDPEATYTTSGGKIPIRWTAPEAISYRKFTSASDVWSFGIVMWEVMTYGERPYWELSNHEVMKAINDGFRLPTPMDCPSAIYQLMMQCWQQERARRPKFADIVSILDKLIRAPDSLKTLADFDPRVSIRLPSTSGSEGVPFRTVSEWLESIKMQQYTEHFMAAGYTAIEKVVQMTNDDIKRIGVRLPGHQKRIAYSLLGLKDQVNTVGIPI

SEQ ID NO: 911115 - protein, 135 aa, Homo sapiens [sequence omitted]

SEQ ID NO: 911116 - protein, 1015 aa, Homo sapiens; identical to SEQ ID NO: 911106

SEQ ID NO: 911117 - protein, 919 aa, Homo sapiens
GAEVARRPAGGSGHRGRRAGVRVCGSRARGDRTESEKRGMELQAARACFALLWGCALAAAAAAQGKEVVLLDFAAAGGELGWLTHPYGKGWDLMQNIMNDMPIYMYSVCNVMSGDQDNWLRTNWVYRGEAERIFIELKFTVRDCNSFPGGASSCKETFNLYYAESDLDYGTNFQKRLFTKIDTIAPDEITVSSDFEARHVKLNVEERSVGPLTRKGFYLAFQDIGACVALLSVRVYYKKCPELLQGLAHFPETIAGSDAPSLATVAGTCVDHAVVPPGGEEPRMHCAVDGEWLVPIGQCLCQAGYEKVEDACQACSPGFFKFEASESPCLECPEHTLPSPEGATSCECEEGFFRAPQDPASMPCTRPPSAPHYLTAVGMGAKVELRWTPPQDSGGREDIVYSVTCEQCWPESGECGPCEASVRYSEPPHGLTRTSVTVSDLEPHMNYTFTVEARNGVSGLVTSRSFRTASVSINQTEPPKVRLEGRSTTSLSVSWSIPPPQQSRVWKYEVTYRKKGDSNSYNVRRTEGFSVTLDDLAPDTTYLVQVQALTQEGQGAGSKVHEFQTLSPEGSGNLAVIGGVAVGVVLLLVLAGVGFFIHRRRKNQRARQSPEDVYFSKSEQLKPLKTYVDPHTYEDPNQAVLKFTTEIHPSCVTRQKVIGAGEFGEVYKGMLKTSSGKKEVPVAIKTLKAGYTEKQRVDFLGEAGIMGQFSHHNIIRLEGVISKYKPMMIITEYMENGALDKFLREKDGEFSVLQLVGMLRGIAAGMKYLANMNYVHRDLAARNILVNSNLVCKVSDFGLSRVLEDDPEATYTTSGGKIPIRWTAPEAISYRKFTSASDVWSFGIVMWEVMTYGERPYWELSNHELDEAIMMGSGPNHVLPFALQVLMRVGDVPRPVVLSVWHLLGLSSDVLPPGSGAPG

SEQ ID NO: 911118 - protein, 637 aa, Homo sapiens
GAEVARRPAGGSGHRGRRAGVRVCGSRARGDRTESEKRGMELQAARACFALLWGCALAAAAAAQGKEVVLLDFAAAGGELGWLTHPYGKGWDLMQNIMNDMPIYMYSVCNVMSGDQDNWLRTNWVYRGEAERIFIELKFTVRDCNSFPGGASSCKETFNLYYAESDLDYGTNFQKRLFTKIDTIAPDEITVSSDFEARHVKLNVEERSVGPLTRKGFYLAFQDIGACVALLSVRVYYKKCPELLQGLAHFPETIAGSDAPSLATVAGTCVDHAVVPPGGEEPRMHCAVDGEWLVPIGQCLCQAGYEKVEDACQACSPGFFKFEASESPCLECPEHTLPSPEGATSCECEEGFFRAPQDPASMPCTRPPSAPHYLTAVGMGAKVELRWTPPQDSGGREDIVYSVTCEQCWPESGECGPCEASVRYSEPPHGLTRTSVTVSDLEPHMNYTFTVEARNGVSGLVTSRSFRTASVSINQTEPPKVRLEGRSTTSLSVSWSIPPPQQSRVWKYEVTYRKKGDSNSYNVRRTEGFSVTLDDLAPDTTYLVQVQALTQEGQGAGSKVHEFQTLSRRDLATWRDGGVVSGGCLWWRSGLFPAGDPCPARGCRPCIESLICPLAPGGSDPVRRARGARLRGRSGAP

SEQ ID NO: 911119 - protein, 102 aa, Homo sapiens
MSPFPAASPDELHAGRPAPWQAEAGRGAEPAGGEEGSAAGGEGRGRRPVAWGLGRPRRASGWILSRWKPCKGRRQGPDVFGLRLQEGPLAASGRIIWRRAGR

SEQ ID NO: 911120 - protein, 102 aa, Homo sapiens; identical to SEQ ID NO: 911119

SEQ ID NO: 911121 - protein, 102 aa, Homo sapiens; identical to SEQ ID NO: 911119

SEQ ID NO: 911122 - protein, 102 aa, Homo sapiens; identical to SEQ ID NO: 911119

SEQ ID NO: 911123 - protein, 215 aa, Homo sapiens
RGSGAAGSSQTGDALGKALASIYSPDHTNNSFSSNPSTPVGSPPSLSAGTAVWSRNGGQASSSPNYEGPLHSLQSRIEDRLERLDDAIHVLRNHAVGPSTAMPGGHGDMHGIIGPSHNGAMGGLGSGYGTGLLSANRHSLMVGTHREDGVALRGSHSLLPNQVPVPQLPVQSATSPDLNPPQDPYRGMPPGLQGQSVSSGSSEIKSDDESGRRYG

SEQ ID NO: 911124 - protein, 191 aa, Homo sapiens
MSARKPNILCIVNCQSHLNQSQGQVDIKILPKTWHKMEKFPENSGRKQSNVDTFFFPTPLENVASLLSHSNNDDEDLTPEQKAEREKERRMANNARERLRVRDINEAFKELGRMVQLHLKSDKPQTKLLILHQAVAVILSLEQQVRERNLNPKAACLKRREEEKVSSEPPPLSLAGPHPGMGDASNHMGQM

SEQ ID NO: 911125 - protein, 191 aa, Homo sapiens; identical to SEQ ID NO: 911124

SEQ ID NO: 911126 - protein, 156 aa, Homo sapiens
MPGGHGDMHGIIGPSHNGAMGGLGSGYGTGLLSANRHSLMVGTHREDGVALRGSHSLLPNQVPVPQLPVQSATSPDLNPPQDPYRGMPPGLQGQSVSSGSSEIKSDDEGDENLQDTKSSEDKKLDDDKKDIKSITRSRSSNNDDEDPLPASLPHPQ

SEQ ID NO: 911127 - protein, 191 aa, Homo sapiens; identical to SEQ ID NO: 911124

SEQ ID NO: 911128 - protein, 191 aa, Homo sapiens; identical to SEQ ID NO: 911124

SEQ ID NO: 911129 - protein, 274 aa, Homo sapiens
RGSGAAGSSQTGDALGKALASIYSPDHTNNSFSSNPSTPVGSPPSLSAGTAVWSRNGGQASSSPNYEGPLHSLQSRIEDRLERLDDAIHVLRNHAVGPSTAMPGGHGDMHGIIGPSHNGAMGGLGSGYGTGLLSANRHSLMVGTHREDGVALRGSHSLLPNQVPVPQLPVQSATSPDLNPPQDPYRGMPPGLQGQSVSSGSSEIKSDDEGDENLQDTKSSEDKKLDDDKKDIKSITRSRSRTCPEPMGGEGAERATCAEAVEAGPTAFKTRLGP

SEQ ID NO: 911130 - protein, 122 aa, Homo sapiens
TQQLQNGSHMGRHGSQGGIVMAISPSEETKLQMFMWSRIIFSLGFVISGHYKDFARDVAASIAFTNDLNGEHPHKAADMEGLYTLDTAEVDDRSYWVRFQSSSLASWSGTRSRVSSMAPLTL

SEQ ID NO: 911131 - protein, 1199 aa, Homo sapiens
MASAGTQHYSIGLRQKNSFKQSGPSGTVPATPPEKPSEGRVWPQAHQQVKPIWKLEKKQVETLSAGLGPGLLGVPPQPAYFFCPSTLCSSGTTAVIAGHSSSCYLHSLPDLFNSTLLYRRSSYRQKPYQQLESFCLRSSPSEKSPFSLPQKSLPVSLTANKATSSMVFSMAQPMASSSTEPYLCLAAAGENPSGKSLASAISGKIPSPLSSSYKPMLNNNSFMWPNSTPVPLLQTTQGLKPVSPPKIQPVSWHHSGGTGDCAPQPVDHKVPKSIGTVPADASAHIALSTASSHDTSTTSVASSWYNRNNLAMRAEPLSCALDDSSDSQDPTKEIRFTEAVRKLTARGFEKMPRQGCQLEQSSFLNPSFQWNVLNRSRRWKPPAVNQQFPQEDAGSVRRVLPGASDTLGLDNTVFCTKRISIHLLASHASGLNHNPACESVIDSSAFGEGKAPGPPFPQTLGIANVATRLSSIQLGQSEKERPEEARELDSSDRDISSATDLQPDQAETEDTEEELVDGLEDCCSRDENEEEEGDSECSSLSAVSPSESVAMISRSCMEILTKPLSNHEKVVRPALIYSLFPNVPPTIYFGTRDERVEKLPWEQRKLLRWKMSTVTPNIVKQTIGRSHFKISKRNDDWLGCWGHHMKSPSFRSIREHQKLNHFPGSFQIGRKDRLWRNLSRMQSRFGKKEFSFFPQSFILPQDAKLLRKAWESSSRQKWIVKPPASARGIGIQVIHKWSQLPKRRPLLVQRYLHKPYLISGSKFDLRIYVYVTSYDPLRIYLFSDGLVRFASCKYSPSMKSLGNKFMHLTNYSVNKKNAEYQANADEMACQGHKWALKALWNYLSQKGVNSDAIWEKIKDVVVKTIISSEPYVTSLLKMYVRRPYSCHELFGFDIMLDENLKPWVLEVNISPSLHSSSPLDISIKGQMIRDLLNLAGFVLPNAEDIISSPSSCSSSTTSLPTSPGDKCRMAPEHVTAQKMKKAYYLTQKIPDQDFYASVLDVLTPDDVRILVEMEDEFSRRGQFERIFPSHISSRYLRFFEQPRYFNILTTQWEQKYHGNKLKGVDLLRSWCYKGFHMGVVSDSAPVWSLPTSLLTISKDDVILNAFSKSETSKLGKQSSCEVSLLLSEDGTTPKSKKTQAGLSPYPQKPSSSKDSEDTSKEPSLSTQTLPVIKCSGQTSRLSASSTFQSISDSLLAVSP

SEQ ID NO: 911132 - protein, 1199 aa, Homo sapiens; identical to SEQ ID NO: 911131

SEQ ID NO: 911133 - protein, 1351 aa, Homo sapiens
MASAGTQHYSIGLRQKNSFKQSGPSGTVPATPPEKPSEGRVWPQAHQQVKPIWKLEKKQVETLSAGLGPGLLGVPPQPAYFFCPSTLCSSGTTAVIAGHSSSCYLHSLPDLFNSTLLYRRSSYRQKPYQQLESFCLRSSPSEKSPFSLPQKSLPVSLTANKATSSMVFSMAQPMASSSTEPYLCLAAAGENPSGKSLASAISGKIPSPLSSSYKPMLNNNSFMWPNSTPVPLLQTTQGLKPVSPPKIQPVSWHHSGGTGDCAPQPVDHKVPKSIGTVPADASAHIALSTASSHDTSTTSVASSWYNRNNLAMRAEPLSCALDDSSDSQDPTKEIRFTEAVRKLTARGFEKMPRQGCQLEQSSFLNPSFQWNVLNRSRRWKPPAVNQQFPQEDAGSVRRVLPGASDTLGLDNTVFCTKRISIHLLASHASGLNHNPACESVIDSSAFGEGKAPGPPFPQTLGIANVATRLSSIQLGQSEKERPEEARELDSSDRDISSATDLQPDQAETEDTEEELVDGLEDCCSRDENEEEEGDSECSSLSAVSPSESVAMISRSCMEILTKPLSNHEKVVRPALIYSLFPNVPPTIYFGTRDERGKPGQVSKPRRAPGRRLLAKLGGGGSRKERVSRMAVVAVVTLCSVPHVVVGLMQPFSCLSFSCPFSALPCHAEFMLFNLVAFPFQSSLSLFLIPAQPLFFPKVCSSETLIWSNSYVTCLPREDGQPCHLFCLLIMTLCSSPSPIPTPLAFFPVEKLPWEQRKLLRWKMSTVTPNIVKQTIGRSHFKISKRNDDWLGCWGHHMKSPSFRSIREHQKLNHFPGSFQIGRKDRLWRNLSRMQSRFGKKEFSFFPQSFILPQDAKLLRKAWESSSRQKWIVKPPASARGIGIQVIHKWSQLPKRRPLLVQRYLHKPYLISGSKFDLRIYVYVTSYDPLRIYLFSDGLVRFASCKYSPSMKSLGNKFMHLTNYSVNKKNAEYQANADEMACQGHKWALKALWNYLSQKGVNSDAIWEKIKDVVVKTIISSEPYVTSLLKMYVRRPYSCHELFGFDIMLDENLKPWVLEVNISPSLHSSSPLDISIKGQMIRDLLNLAGFVLPNAEDIISSPSSCSSSTTSLPTSPGDKCRMAPEHVTAQKMKKAYYLTQKIPDQDFYASVLDVLTPDDVRILVEMEDEFSRRGQFERIFPSHISSRYLRFFEQPRYFNILTTQWEQKYHGNKLKGVDLLRSWCYKGFHMGVVSDSAPVWSLPTSLLTISKDDVILNAFSKSETSKLGKQSSCEVSLLLSEDGTTPKSKKTQAGLSPYPQKPSSSKDSEDTSKEPSLSTQTLPVIKCSGQTSRLSASSTFQSISDSLLAVSP

SEQ ID NO: 911134 - protein, 1138 aa, Homo sapiens
MASAGTQHYSIGLRQKNSFKQSGPSGTVPATPPEKPSEGRVWPQAHQQVKPIWKLEKKQVETLSAGLGPGLLGVPPQPAYFFCPSTLCSSGTTAVIAGHSSSCYLHSLPDLFNSTLLYRRSSYRQKPYQQLESFCLRSSPSEKSPFSLPQKSLPVSLTANKATSSMVFSMAQPMASSSTEPYLCLAAAGENPSGKSLASAISGKIPSPLSSSYKPMLNNNSFMWPNSTPVPLLQTTQGLKPVSPPKIQPVSWHHSGGTGDCAPQPVDHKVPKSIGTVPADASAHIALSTASSHDTSTTSVASSWYNRNNLAMRAEPLSCALDDSSDSQDPTKEIRFTEAVRKLTARGFEKMPRQGCQLEQSSFLNPSFQWNVLNRSRRWKPPAVNQQFPQEDAGSVRRVLPGASDTLGLDNTVFCTKRISIHLLASHASGLNHNPACESVIDSSAFGEGKAPGPPFPQTLGIANVATRLSSIQLGQSEKERPEEARELDSSDRDISSATDLQPDQAETEDTEEELVDGLEDCCSRDENEEEEGDSECSSLSAVSPSESVAMISRSCMEILTKPLSNHEKVVRPALIYSLFPNVPPTIYFGTRDERVEKLPWEQRKLLRWKMSTVTPNIVKQTIGRSHFKISKRNDDWLGCWGHHMKSPSFRSIREHQKLNHFPGSFQIGRKDRLWRNLSRMQSRFGKKEFSFFPQSFILPQDAKLLRKAWESSSRQKWIVKPPASARGIGIQVIHKWSQLPKRRPLLVQRYLHKPYLISGSKFDLRIYVYVTSYDPLRIYLFSDGLVRFASCKYSPSMKSLGNKFMHLTNYSVNKKNAEYQANADEMACQGHKWALKALWNYLSQKGVNSDAIWEKIKDVVVKTIISSEPYVTSLLKMYVRRPYSCHELFGFDIMLDENLKPWVLEVNISPSLHSSSPLDISIKGQMIRDLLNLAGFVLPNAEDIISSPSSCSSSTTSLPTSPGDKCRMAPEHVTAQKMKKAYYLTQKIPDQDFYASVLDVLTPDDVRILVEMEDEFSRRGQFERIFPSHISSRYLRFFEQPRYFNILTTQWEQKYHGNKLKGVDLLRSWCYKGFHMGVVSDSAPVWSLPTSLLTISKDDVILNAFSKSETSKLGNPVPQRTVRTPAKSPAFLPRRYL

SEQ ID NO: 911135 - protein, 586 aa, Homo sapiens
SLCPWTELLARLIPDVPPIGNDDWLGCWGHHMKSPSFRSIREHQKLNHFPGSFQIGRKDRLWRNLSRMQSRFGKKEFSFFPQSFILPQDAKLLRKAWESSSRQKWIVKPPASARGIGIQVIHKWSQLPKRRPLLVQRYLHKPYLISGSKFDLRIYVYVTSYDPLRIYLFSDGLVRFASCKYSPSMKSLGNKFMHLTNYSVNKKNAEYQANADEMACQGHKWALKALWNYLSQKGVNSDAIWEKIKDVVVKTIISSEPYVTSLLKMYVRRPYSCHELFGFDIMLDENLKPWVLEVNISPSLHSSSPLDISIKGQMIRDLLNLAGFVLPNAEDIISSPSSCSSSTTSLPTSPGDKCRMAPEHVTAQKMKKAYYLTQKIPDQDFYASVLDVLTPDDVRILVEMEDEFSRRGQFERIFPSHISSRYLRFFEQPRYFNILTTQWEQKYHGNKLKGVDLLRSWCYKGFHMGVVSDSAPVWSLPTSLLTISKDDVILNAFSKSETSKLGKQSSCEVSLLLSEDGTTPKSKKTQAGLSPYPQKPSSSKDSEDTSKEPSLSTQTLPVIKCSGQTSRLSASSTFQSISDSLLAVSP

SEQ ID NO: 911136 - protein, 912 aa, Homo sapiens
MASAGTQHYSIGLRQKNSFKQSGPSGTVPATPPEKPSEGRVWPQAHQQVKPIWKLEKKQVETLSAGLGPGLLGVPPQPAYFFCPSTLCSSGTTAVIAGHSSSCYLHSLPDLFNSTLLYRRSSYRQKPYQQLESFCLRSSPSEKSPFSLPQKSLPVSLTANKATSSMVFSMAQPMASSSTEPYLCLAAAGENPSGKSLASAISGKIPSPLSSSYKPMLNNNSFMWPNSTPVPLLQTTQGLKPVSPPKIQPVSWHHSGGTGDCAPQPVDHKVPKSIGTVPADASAHIALSTASSHDTSTTSVASSWYNRNNLAMRAEPLSCALDDSSDSQDPTKEIRFTEAVRKLTARGFEKMPRQGCQLEQSSFLNPSFQWNVLNRSRRWKPPAVNQQFPQEDAGSVRRVLPGASDTLGLDNTVFCTKRISIHLLASHASGLNHNPACESVIDSSAFGEGKAPGPPFPQTLGIANVATRLSSIQLGQSEKERPEEARELDSSDRDISSATDLQPDQAETEDTEEELVDGLEDCCSRDENEEEEGDSECSSLSAVSPSESVAMISRSCMEILTKPLSNHEKVVRPALIYSLFPNVPPTIYFGTRDERVEKLPWEQRKLLRWKMSTVTPNIVKQTIGRSHFKISKRNDDWLGCWGHHMKSPSFRSIREHQKLNHFPGSFQIGRKDRLWRNLSRMQSRFGKKEFSFFPQSFILPQDAKLLRKAWESSSRQKWIVKPPASARGIGIQVIHKWSQLPKRRPLLVQRYLHKPYLISGSKFDLRIYVYVTSYDPLRIYLFSDGLVRFASCKYSPSMKSLGNKFMHLTNYSVNKKNAEYQANADEMACQGHKWALKALWNYLSQKGVNSDAIWEKIKDVVVKTIISSEPYVTSLLKMYVRRPYSCHELFGFDIMLDENLKPWVLEVNISPR

SEQ ID NO: 911137 - protein, 1199 aa, Homo sapiens; identical to SEQ ID NO: 911131

SEQ ID NO: 911138 - protein, 1034 aa, Homo sapiens
MVFSMAQPMASSSTEPYLCLAAAGENPSGKSLASAISGKIPSPLSSSYKPMLNNNSFMWPNSTPVPLLQTTQGLKPVSPPKIQPVSWHHSGGTGDCAPQPVDHKVPKSIGTVPADASAHIALSTASSHDTSTTSVASSWYNRNNLAMRAEPLSCALDDSSDSQDPTKEIRFTEAVRKLTARGFEKMPRQGCQLEQSSFLNPSFQWNVLNRSRRWKPPAVNQQFPQEDAGSVRRVLPGASDTLGLDNTVFCTKRISIHLLASHASGLNHNPACESVIDSSAFGEGKAPGPPFPQTLGIANVATRLSSIQLGQSEKERPEEARELDSSDRDISSATDLQPDQAETEDTEEELVDGLEDCCSRDENEEEEGDSECSSLSAVSPSESVAMISRSCMEILTKPLSNHEKVVRPALIYSLFPNVPPTIYFGTRDERVEKLPWEQRKLLRWKMSTVTPNIVKQTIGRSHFKISKRNDDWLGCWGHHMKSPSFRSIREHQKLNHFPGSFQIGRKDRLWRNLSRMQSRFGKKEFSFFPQSFILPQDAKLLRKAWESSSRQKWIVKPPASARGIGIQVIHKWSQLPKRRPLLVQRYLHKPYLISGSKFDLRIYVYVTSYDPLRIYLFSDGLVRFASCKYSPSMKSLGNKFMHLTNYSVNKKNAEYQANADEMACQGHKWALKALWNYLSQKGVNSDAIWEKIKDVVVKTIISSEPYVTSLLKMYVRRPYSCHELFGFDIMLDENLKPWVLEVNISPSLHSSSPLDISIKGQMIRDLLNLAGFVLPNAEDIISSPSSCSSSTTSLPTSPGDKCRMAPEHVTAQKMKKAYYLTQKIPDQDFYASVLDVLTPDDVRILVEMEDEFSRRGQFERIFPSHISSRYLRFFEQPRYFNILTTQWEQKYHGNKLKGVDLLRSWCYKGFHMGVVSDSAPVWSLPTSLLTISKDDVILNAFSKSETSKLGKQSSCEVSLLLSEDGTTPKSKKTQAGLSPYPQKPSSSKDSEDTSKEPSLSTQTLPVIKCSGQTSRLSASSTFQSISDSLLAVSP

SEQ ID NO: 911139 - protein, 1072 aa, Homo sapiens
MGQCYYNETWASHAWLAQVSLPQKSLPVSLTANKATSSMVFSMAQPMASSSTEPYLCLAAAGENPSGKSLASAISGKIPSPLSSSYKPMLNNNSFMWPNSTPVPLLQTTQGLKPVSPPKIQPVSWHHSGGTGDCAPQPVDHKVPKSIGTVPADASAHIALSTASSHDTSTTSVASSWYNRNNLAMRAEPLSCALDDSSDSQDPTKEIRFTEAVRKLTARGFEKMPRQGCQLEQSSFLNPSFQWNVLNRSRRWKPPAVNQQFPQEDAGSVRRVLPGASDTLGLDNTVFCTKRISIHLLASHASGLNHNPACESVIDSSAFGEGKAPGPPFPQTLGIANVATRLSSIQLGQSEKERPEEARELDSSDRDISSATDLQPDQAETEDTEEELVDGLEDCCSRDENEEEEGDSECSSLSAVSPSESVAMISRSCMEILTKPLSNHEKVVRPALIYSLFPNVPPTIYFGTRDERVEKLPWEQRKLLRWKMSTVTPNIVKQTIGRSHFKISKRNDDWLGCWGHHMKSPSFRSIREHQKLNHFPGSFQIGRKDRLWRNLSRMQSRFGKKEFSFFPQSFILPQDAKLLRKAWESSSRQKWIVKPPASARGIGIQVIHKWSQLPKRRPLLVQRYLHKPYLISGSKFDLRIYVYVTSYDPLRIYLFSDGLVRFASCKYSPSMKSLGNKFMHLTNYSVNKKNAEYQANADEMACQGHKWALKALWNYLSQKGVNSDAIWEKIKDVVVKTIISSEPYVTSLLKMYVRRPYSCHELFGFDIMLDENLKPWVLEVNISPSLHSSSPLDISIKGQMIRDLLNLAGFVLPNAEDIISSPSSCSSSTTSLPTSPGDKCRMAPEHVTAQKMKKAYYLTQKIPDQDFYASVLDVLTPDDVRILVEMEDEFSRRGQFERIFPSHISSRYLRFFEQPRYFNILTTQWEQKYHGNKLKGVDLLRSWCYKGFHMGVVSDSAPVWSLPTSLLTISKDDVILNAFSKSETSKLGKQSSCEVSLLLSEDGTTPKSKKTQAGLSPYPQKPSSSKDSEDTSKEPSLSTQTLPVIKCSGQTSRLSASSTFQSISDSLLAVSP

SEQ ID NO: 911140 - protein, 1199 aa, Homo sapiens; identical to SEQ ID NO: 911131

SEQ ID NO: 911141 - protein, 577 aa, Homo sapiens
SLCPWTELLARLIPDVPPIGNDDWLGCWGHHMKSPSFRSIREHQKIGRKDRLWRNLSRMQSRFGKKEFSFFPQSFILPQDAKLLRKAWESSSRQKWIVKPPASARGIGIQVIHKWSQLPKRRPLLVQRYLHKPYLISGSKFDLRIYVYVTSYDPLRIYLFSDGLVRFASCKYSPSMKSLGNKFMHLTNYSVNKKNAEYQANADEMACQGHKWALKALWNYLSQKGVNSDAIWEKIKDVVVKTIISSEPYVTSLLKMYVRRPYSCHELFGFDIMLDENLKPWVLEVNISPSLHSSSPLDISIKGQMIRDLLNLAGFVLPNAEDIISSPSSCSSSTTSLPTSPGDKCRMAPEHVTAQKMKKAYYLTQKIPDQDFYASVLDVLTPDDVRILVEMEDEFSRRGQFERIFPSHISSRYLRFFEQPRYFNILTTQWEQKYHGNKLKGVDLLRSWCYKGFHMGVVSDSAPVWSLPTSLLTISKDDVILNAFSKSETSKLGKQSSCEVSLLLSEDGTTPKSKKTQAGLSPYPQKPSSSKDSEDTSKEPSLSTQTLPVIKCSGQTSRLSASSTFQSISDSLLAVSP

SEQ ID NO: 911142 - protein, 364 aa, Homo sapiens
MSVMVVRKKVTRKWEKLPGRNTFCCDGRVMMARQKGIFYLTLFLILGTCTLFFAFECRYLAVQLSPAIPVFAAMLFLFSMATLLRTSFSDPGVIPRALPDEAAFIEMEIEATNGAVPQGQRPPPRIKNFQINNQIVKLKYCYTCKIFRPPRASHCSICDNCVERFDHHCPWVGNCVGKRNYRYFYLFILSLSLLTIYVFAFNIVYVALKSLKIGFLETLKETPGTVLEVLICFFTLWSVVGLTGFHTFLVALNQTTNEDIKGSWTGKNRVQNPYSHGNIVKNCCEVLCGPLPPSVLDRRGILPLEESGSRPPSTQETSSSLLPQSPAPTEHLNSNEMPEDSSTPEEMPPPEPPEPPQEAAEAEK

SEQ ID NO: 911143 - protein, 364 aa, Homo sapiens; identical to SEQ ID NO: 911142

SEQ ID NO: 911144 - protein, 364 aa, Homo sapiens; identical to SEQ ID NO: 911142

SEQ ID NO: 911145 - protein, 364 aa, Homo sapiens; identical to SEQ ID NO: 911142

SEQ ID NO: 911146 - protein, 364 aa, Homo sapiens; identical to SEQ ID NO: 911142

SEQ ID NO: 911147 - protein, 291 aa, Homo sapiens [sequence omitted]

SEQ ID NO: 911148 - protein, 290 aa, Homo sapiens
IKRLLISRSMNSVHNIFNTISGRDDGNPSKGTRGADLRDKREEMRQRPGLGQLGVPECQAPPHVLWVKAPPPGEQVYGTEDAGLGGDPKRFDHHCPWVGNCVGKRNYRYFYLFILSLSLLTIYVFAFNIVYVALKSLKIGFLETLKETPGTVLEVLICFFTLWSVVGLTGFHTFLVALNQTTNEDIKGSWTGKNRVQNPYSHGNIVKNCCEVLCGPLPPSVLDRRGILPLEESGSRPPSTQETSSSLLPQSPAPTEHLNSNEMPEDSSTPEEMPPPEPPEPPQEAAEAEK

SEQ ID NO: 911149 - protein, 208 aa, Homo sapiens
MSVMVVRKKVTRKWEKLPGRNTFCCDGRVMMARQKGIFYLTLFLILGTCTLFFAFECRYLAVQLSPAIPVFAAMLFLFSMATLLRTSFSDPGVIPRALPDEAAFIEMEIEATNGAVPQGQRPPPRIKNFQINNQIVKLKYCYTCKIFRPPRASHCSICDNCVERFDHHCPWVGVGRGCLLLPKLPLTRAPLGWRGSSKLSIDLYYILG

SEQ ID NO: 911150 - protein, 208 aa, Homo sapiens
MSVMVVRKKVTRKWEKLPGRNTFCCDGRVMMARQKGIFYLTLFLILGTCTLFFAFECRYLAVQLSPAIPVFAAMLFLFSMATLLRTSFSDPGVIPRALPDEAAFIEMEIEATNGAVPQGQRPPPRIKNFQINNQIVKLKYCYTCKIFRPPRASHCSICDNCVDFPVLDFHVGPTLHSGRRHLVHWRAALRKEGLSKTQPKKRKVASIY

SEQ ID NO: 911151 - protein, 123 aa, Homo sapiens
SRAMLALGGQENLLTPLSLLFSPEDPKNPVRIPWPEVSVTASGYGNHTGGFLQAPLFQHFHRQSPRATSPWGWAVAPSQLCSGPALFQGRRFMYYMWLYFLEHLCFPLSKPGSCLDDLCGGGV

SEQ ID NO: 911152 - protein, 364 aa, Homo sapiens; identical to SEQ ID NO: 911142

SEQ ID NO: 911153 - protein, 364 aa, Homo sapiens; identical to SEQ ID NO: 911142

SEQ ID NO: 911154 - protein, 364 aa, Homo sapiens; identical to SEQ ID NO: 911142

SEQ ID NO: 911155 - protein, 251 aa, Homo sapiens
MGIVLIVIFYHRETQLQHQTRTSPQPSQLEINFGEPPRASHCSICDNCVERFDHHCPWVGNCVGKRNYRYFYLFILSLSLLTIYVFAFNIVYVALKSLKIGFLETLKETPGTVLEVLICFFTLWSVVGLTGFHTFLVALNQTTNEDIKGSWTGKNRVQNPYSHGNIVKNCCEVLCGPLPPSVLDRRGILPLEESGSRPPSTQETSSSLLPQSPAPTEHLNSNEMPEDSSTPEEMPPPEPPEPPQEAAEAEK

SEQ ID NO: 911156 - protein, 364 aa, Homo sapiens; identical to SEQ ID NO: 911142

SEQ ID NO: 911157 - protein, 164 aa, Homo sapiens
MSVMVVRKKVTRKWEKLPGRNTFCCDGRVMMARQKGIFYLTLFLILGTCTLFFAFECRYLAVQLSPAIPVFAAMLFLFSMATLLRTSFSDPGVIPRALPDEAAFIEMEIEATNGAVPQGQRPPPRIKNFQINNQIVKLKYCYTCKIFRPPRASHCSICDNCVGE

SEQ ID NO: 911158 - protein, 696 aa, Homo sapiens
MKFAEHLSAHITPEWRKQYIQYEAFKDMLYSAQDQAPSVEVTDEDTVKRYFAKFEEKFFQTCEKELAKINTFYSEKLAEAQRRFATLQNELQSSLDAQKESTGVTTLRQRRKPVFHLSHEERVQHRNIKDLKLAFSEFYLSLILLQNYQNLNFTGFRKILKKHDKILETSRGADWRVAHVEVAPFYTCKKINQLISETEAVVTNELEDGDRQKAMKRLRVPPLGAAQPAPAWTTFRVGLFCGIFIVLNITLVLAAVFKLETDRSIWPLIRIYRGGFLLIEFLFLLGINTYGWRQAGVNHVLIFELNPRSNLSHQHLFEIAGFLGILWCLSLLACFFAPISVIPTYVYPLALYGFMVFFLINPTKTFYYKSRFWLLKLLFRVFTAPFHKVGFADFWLADQLNSLSVILMDLEYMICFYSLELKWDESKGLLPNNSEESGICHKYTYGVRAIVQCIPAWLRFIQCLRRYRDTKRAFPHLVNAGKYSTTFFMVTFAALYSTHKERGHSDTMVFFYLWIVFYIISSCYTLIWDLKMDWGLFDKNAGENTFLREEIVYPQKAYYYCAIIEDVILRFAWTIQISITSTTLLPHSGDIIATVFAPLEVFRRFVWNFFRLENEHLNNCGEFRAVRDISVAPLNADDQTLLEQMMDQDDGVRNRQKNRSWKYNQSISLRRPRLASQSKARDTKVLIEDTDDEANT

SEQ ID NO: 911159 - protein, 696 aa, Homo sapiens; identical to SEQ ID NO: 911158

SEQ ID NO: 911160 - protein, 696 aa, Homo sapiens; identical to SEQ ID NO: 911158

SEQ ID NO: 911161 - protein, 340 aa, Homo sapiens [sequence omitted]

SEQ ID NO: 911162 - protein, 603 aa, Homo sapiens [sequence omitted]

SEQ ID NO: 911163 - protein, 394 aa, Homo sapiens [sequence omitted]

SEQ ID NO: 911164 - protein, 696 aa, Homo sapiens; identical to SEQ ID NO: 911158

SEQ ID NO: 911165 - protein, 696 aa, Homo sapiens; identical to SEQ ID NO: 911158

SEQ ID NO: 911166 - protein, 696 aa, Homo sapiens; identical to SEQ ID NO: 911158

SEQ ID NO: 911167 - protein, 696 aa, Homo sapiens; identical to SEQ ID NO: 911158

SEQ ID NO: 911168 - protein, 702 aa, Homo sapiens
MKFAEHLSAHITPEWRKQYIQYEAFKDMLYSAQDQAPSVEVTDEDTVKRYFAKFEEKFFQTCEKELAKINTFYSEKLAEAQRRFATLQNELQSSLDAQKESTGVTTLRQRRKPVFHLSHEERVQHRNIKDLKLAFSEFYLSLILLQNYQNLNFTGFRKILKKHDKILETSRGADWRVAHVEVAPFYTCKKINQLISETEAVVTNELEDGDRQKAMKRLRVPPLGAAQPAPAWTTFRVGLFCGIFIVLNITLVLAAVFKLETDRSIWPLIRIYRGGFLLIEFLFLLGINTYGWRQAGVNHVLIFELNPRSNLSHQHLFEIAGFLGILWCLSLLACFFAPISVIPTYVYPLALYGFMVFFLINPTKTFYYKSRFWLLKLLFRVFTAPFHKVGFADFWLADQLNSLSVILMDLEYMICFYSLELKWDESKGLLPNNSEESGICHKYTYGVRAIVQCIPAWLRFIQCLRRYRDTKRAFPHLVNAGKYSTTFFMVTFAALYSTHKERGHSDTMVFFYLWIVFYIISSCYTLIWDLKMDWGLFDKNAGENTFLREEIVYPQKAYYYCAIIEDVILRFAWTIQISITSTTLLPHSGDIIATVFAPLEVFRQKLETEDKPERESMTLESTCHQSSLQTSAPSLPHLPECLGLAPELPIAAATFPHPLLSLSCVLLHQFFKRNSSKKRKIPHDDFLFKIICLLTKSNVLSH

SEQ ID NO: 911169 - protein, 384 aa, Homo sapiens
RGGRAGLGWAERAYPHGPASGRRGQQRLRVAAAVGCAGVSSLWSAAGWWREEGTAAGAGRGRRAAGAMAEPGSRESETRARSPSVAAMASPQLCRALVSAQWVAEALRAPRAGQPLQLLDASWYLPKLGRDARREFEERHIPGAAFFDIDQCSDRTSPYDHMLPGAEHFAEYAGRLGVGAATHVVIYDASDQGLYSAPRVWWMFRAFGHHAVSLLDGGLRHWLRQNLPLSSGKSQPAPAEFRAQLDPAFIKTYEDIKENLESRRFQVVDSRATGRFRGTEPEPRDGIEPGHIPGTVNIPFTDFLSQEGLEKSPEEIRHLFQEKKVDLSKPLVATCGSGVTACHVALGAYLCGKPDVPIYDGSWVEWYMRARPEDVISEGRGKTH

SEQ ID NO: 911170 - protein, 352 aa, Homo sapiens
GAGAARAWAGRSGRTPTARPVEGAGSSGSEWPRRWAVPESPPFGPLQARSPSVAAMASPQLCRALVSAQWVAEALRAPRAGQPLQLLDASWYLPKLGRDARREFEERHIPGAAFFDIDQCSDRTSPYDHMLPGAEHFAEYAGRLGVGAATHVVIYDASDQGLYSAPRVWWMFRAFGHHAVSLLDGGLRHWLRQNLPLSSGKSQPAPAEFRAQLDPAFIKTYEDIKENLESRRFQVVDSRATGRFRGTEPEPRDGIEPGHIPGTVNIPFTDFLSQEGLEKSPEEIRHLFQEKKVDLSKPLVATCGSGVTACHVALGAYLCGKPDVPIYDGSWVEWYMRARPEDVISEGRGKTH

SEQ ID NO: 911171 - protein, 384 aa, Homo sapiens; identical to SEQ ID NO: 911169

SEQ ID NO: 911172 - protein, 341 aa, Homo sapiens
ARGPRGPGLGGAGVPPRPGQWKARAAAAPSGRGGGLCRSLLPLVRCRPAARVSPPWLRRSSAARWCRRNGWRRRCGPRALGSLCSCWTPPGTCRSWGATRAAFFDIDQCSDRTSPYDHMLPGAEHFAEYAGRLGVGAATHVVIYDASDQGLYSAPRVWWMFRAFGHHAVSLLDGGLRHWLRQNLPLSSGKSQPAPAEFRAQLDPAFIKTYEDIKENLESRRFQVVDSRATGRFRGTEPEPRDGIEPGHIPGTVNIPFTDFLSQEGLEKSPEEIRHLFQEKKVDLSKPLVATCGSGVTACHVALGAYLCGKPDVPIYDGSWVEWYMRARPEDVISEGRGKTH

SEQ ID NO: 911173 - protein, 347 aa, Homo sapiens
RGGRAGLGWAERAYPHGPASGRRGQQRLRVAAAVGCAGVSSLWSAAGWWREEGTAAGAGRGRRAAGAMAEPGSRESETRARSPSVAAMASPQLCRALVSAQWVAEALRAPRAGQPLQLLDASWYLPKLGRDARREFEERHIPGAAFFDIDQCSDRTSPYDHMLPGAEHFAEYAGRLGVGAATHVVIYDASDQGLYSAPRVWWMFRAFGHHAFIKTYEDIKENLESRRFQVVDSRATGRFRGTEPEPRDGIEPGHIPGTVNIPFTDFLSQEGLEKSPEEIRHLFQEKKVDLSKPLVATCGSGVTACHVALGAYLCGKPDVPIYDGSWVEWYMRARPEDVISEGRGKTH

SEQ ID NO: 911174 - protein, 368 aa, Homo sapiens
RGGRAGLGWAERAYPHGPASGRRGQQRLRVAAAVGCAGVSSLWSAAGWWREEGTAAGAGRGRRAAGAMAEPGSRESETRARSPSVAAMASPQLCRALVSAQWVAEALRAPRAGQPLQLLDASWYLPKLGRDARREFEERHIPGAAFFDIDQCSDRTSPYDHMLPGAEHFAEYAGRLGVGAATHVVIYDASDQGLYSAPRVWWMFRAFGHHAVSLLDGGLRHWLRQNLPLSSGKSQPAPAEFRAQLDPAFIKTYEDIKENLESRRFQVVDSRATGRFRGTEPEPRDDFLSQEGLEKSPEEIRHLFQEKKVDLSKPLVATCGSGVTACHVALGAYLCGKPDVPIYDGSWVEWYMRARPEDVISEGRGKTH

SEQ ID NO: 911175 - protein, 130 aa, Homo sapiens [sequence omitted]

SEQ ID NO: 911176 - protein, 178 aa, Homo sapiens
ARGPRGPGLGGAGVPPRPGQWKARAAAAPSGRGGGLCRSLLPLVRCRLVAGGGDSCGRGEGAPRRGGHGGARKPGVRDPGIEPGHIPGTVNIPFTDFLSQEGLEKSPEEIRHLFQEKKVDLSKPLVATCGSGVTACHVALGAYLCGKPDVPIYDGSWVEWYMRARPEDVISEGRGKTH

SEQ ID NO: 911177 - protein, 257 aa, Homo sapiens
RGGRAGLGWAERAYPHGPASGRRGQQRLRVAAAVGCAGVSSLWSAAGWWREEGTAAGAGRGRRAAGAMAEPGSRESETRARSPSVAAMASPQLCRALVSAQWVAEALRAPRAGQPLQLLDASWYLPKLGRDARREFEERHIPGAAFFDIDQCSDRTSPYDHMLPGAEHFAEYAGRLGVGAATHVVIYDASDQGLYSAPRVWWMFRAFGHHAVSLLDGGLRHWLRQNLPLSSGKSQPAPAEFRAQLDPRLLSVLFLRK

SEQ ID NO: 911178 - protein, 384 aa, Homo sapiens; identical to SEQ ID NO: 911169

SEQ ID NO: 911179 - protein, 297 aa, Homo sapiens
MASPQLCRALVSAQWVAEALRAPRAGQPLQLLDASWYLPKLGRDARREFEERHIPGAAFFDIDQCSDRTSPYDHMLPGAEHFAEYAGRLGVGAATHVVIYDASDQGLYSAPRVWWMFRAFGHHAVSLLDGGLRHWLRQNLPLSSGKSQPAPAEFRAQLDPAFIKTYEDIKENLESRRFQVVDSRATGRFRGTEPEPRDGIEPGHIPGTVNIPFTDFLSQEGLEKSPEEIRHLFQEKKVDLSKPLVATCGSGVTACHVALGAYLCGKPDVPIYDGSWVEWYMRARPEDVISEGRGKTH

SEQ ID NO: 911180 - protein, 240 aa, Homo sapiens
NKTERRRGPAQHQVGSSELWPPSSRARLRLSSRPYLATHVVIYDASDQGLYSAPRVWWMFRAFGHHAVSLLDGGLRHWLRQNLPLSSGKSQPAPAEFRAQLDPAFIKTYEDIKENLESRRFQVVDSRATGRFRGTEPEPRDGIEPGHIPGTVNIPFTDFLSQEGLEKSPEEIRHLFQEKKVDLSKPLVATCGSGVTACHVALGAYLCGKPDVPIYDGSWVEWYMRARPEDVISEGRGKTH

SEQ ID NO: 911181 - protein, 416 aa, Homo sapiens
RGGRAGLGWAERAYPHGPASGRRGQQRLRVAAAVGCAGVSSLWSAAGWWREEGTAAGAGRGRRAAGAMAEPGSRESETRARSPSVAAMASPQLCRALVSAQWVAEALRAPRAGQPLQLLDASWYLPKLGRDARREFEERHIPGAAFFDIDQCSDRTSPYDHMLPGAEHFAEYAGRLGVGAATHVVIYDASDQGLYSAPRVWWMFRAFGHHAVSLLDGGLRHWLRQNLPLSSGKSQPAPAEFRAQLDPAFIKTYEDIKENLESRRFQVVDSRATGRFRGTEPEPRDAGVQWRNLGSPNLRLPGSSDSPALASRVAGITGIEPGHIPGTVNIPFTDFLSQEGLEKSPEEIRHLFQEKKVDLSKPLVATCGSGVTACHVALGAYLCGKPDVPIYDGSWVEWYMRARPEDVISEGRGKTH

SEQ ID NO: 911182 - protein, 216 aa, Homo sapiens
MTHSSLSTDSGVLSLCQGLRIDTDTWVSSSCGGVTPLRRETKAEAGQESEWLRFESFVLGGFLFVFVSVVVVVIVLRRSFALVSQLEYSGAISAHHNLRLPGSSDSPALASRVAGITGIEPGHIPGTVNIPFTDFLSQEGLEKSPEEIRHLFQEKKVDLSKPLVATCGSGVTACHVALGAYLCGKPDVPIYDGSWVEWYMRARPEDVISEGRGKTH

SEQ ID NO: 911183 - protein, 360 aa, Homo sapiens
RGGRAGLGWAERAYPHGPASGRRGQQRLRVAAAVGCAGVSSLWSAAGWWREEGTAAGAGRGRRAAGAMAEPGSRESETRARSPSVAAMASPQLCRALVSAQWVAEALRAPRAGQPLQLLDASWYLPKLGRDARREFEERHIPGAAFFDIDQCSDRTSPYDHMLPGAEHFAEYAGRLGVGAATHVVIYDASDQGLYSAPRVWWMFRAFGHHAVSLLDGGLRHWLRQNLPLSSGKSQPAPAEFRAQLDPAFIKTYEDIKENLESRRFQVVDSRATGRFRGTEPEPRDDGNAGEGGRRSSGARPLRPEQCPGLDLSFIFLIYLAFISFPFFFPFLPFPFPPFPLFPTLAFLHSSLGNKSKTPS

SEQ ID NO: 911184 - protein, 234 aa, Homo sapiens
RGGRAGLGWAERAYPHGPASGRRGQQRLRVAAAVGCAGVSSLWSAAGWWREEGTAAGAGRGRRAAGAMAEPGSRESETRARSPSVAAMASPQLCRALVSAQWVAEALRAPRAGQPLQLLDASWYLPKLGRDARREFEERHIPGAAFFDIDQCSDRTSPYDHMLPGAEHFAEYAGRLGVGAATHVVIYDASDQGLYSAPRVWWMFRAFGHHAVSLLDGGLRHWLRQNLPLSSGCQ

SEQ ID NO: 911185 - protein, 263 aa, Homo sapiens
RAGEGAGAPRTRTGRRRAPSGGHRAGAATMEGGAYGAGKAGGAFDPYTLVRQPHTILRVVSWLFSIVVFGSIVNEGYLNSASEGEEFCIYNRNPNACSYGVAVGVLAFLTCLLYLALDVYFPQISSVKDRKKAVLSDIGVSAFWAFLWFVGFCYLANQWQVSKPKDNPLNEGTDAARAAIAFSFFSIFTWAGQAVLAFQRYQIGADSALFSQDYMDPSQDSSMPYAPYVEPNTGPDPAGMGGTYQQPANTFDTEPQGYQSQGY

SEQ ID NO: 911186 - protein, 220 aa, Homo sapiens
RAGEGAGAPRTRTGRRRAPSGGHRAGAATMEGGAYGAGKAGGAFDPYTLVRQPHTILRVVSWLFSIVVFGSIVNEGYLNSASEGEEFCIYNRNPNACSYGVAVGVLAFLTCLLYLALDVYFPQISSVKDRKKAVLSDIGVSAFWAFLWFVGFCYLANQWQVSKPKDNPLNEGTDAARAAIAFSFFSIFTWSLTAALAVRRFKDLSFQEEYSTLFPASAQP

SEQ ID NO: 911187 - protein, 65 aa, Homo sapiens
MEGGAYGAGKAGGAFDPYTLVRQPHTILRVVSWAGGSGMITVHYNLHLLGSRDPPPHLPWYLRLQ

SEQ ID NO: 911188 - protein, 241 aa, Homo sapiens
RAGEGAGAPRTRTGRRRAPSGGHRAGAATMEGGAYGAGKAGGAFDPYTLVRQPHTILRVVSWLFSIVVFGSIVNEGYLNSASEGEEFCIYNRNPNACSYGVAVGVLAFLTCLLYLALDVYFPQISSVKDRKKAVLSDIGVSAFWAFLWFVGFCYLANQWQVSKPKDNPLNEGTDAARAAIAFSFFSIFTWDYMDPSQDSSMPYAPYVEPNTGPDPAGMGGTYQQPANTFDTEPQGYQSQGY

SEQ ID NO: 911189 - protein, 220 aa, Homo sapiens; identical to SEQ ID NO: 911186

SEQ ID NO: 911190 - protein, 220 aa, Homo sapiens; identical to SEQ ID NO: 911186

SEQ ID NO: 911191 - protein, 200 aa, Homo sapiens
QQACLLGLMLTLEFGILEFDPSWIGSWTQRSWVSWRSRPGCELFSIVVFGSIVNEGYLNSASEGEEFCIYNRNPNACSYGVAVGVLAFLTCLLYLALDVYFPQISSVKDRKKAVLSDIGVSAFWAFLWFVGFCYLANQWQVSKPKDNPLNEGTDAARAAIAFSFFSIFTWSLTAALAVRRFKDLSFQEEYSTLFPASAQP

SEQ ID NO: 911192 - protein, 220 aa, Homo sapiens; identical to SEQ ID NO: 911186

SEQ ID NO: 911193 - protein, 243 aa, Homo sapiens
QQACLLGLMLTLEFGILEFDPSWIGSWTQRSWVSWRSRPGCELFSIVVFGSIVNEGYLNSASEGEEFCIYNRNPNACSYGVAVGVLAFLTCLLYLALDVYFPQISSVKDRKKAVLSDIGVSAFWAFLWFVGFCYLANQWQVSKPKDNPLNEGTDAARAAIAFSFFSIFTWAGQAVLAFQRYQIGADSALFSQDYMDPSQDSSMPYAPYVEPNTGPDPAGMGGTYQQPANTFDTEPQGYQSQGY

SEQ ID NO: 911194 - protein, 263 aa, Homo sapiens; identical to SEQ ID NO: 911185

SEQ ID NO: 911195 - protein, 62 aa, Homo sapiens
MGDALLNVPLFLGFPIFSPLTLSPMCGTAYSARSWDPPAFWAFLWFVGFCYLANQWQVSKPK

SEQ ID NO: 911196 - protein, 401 aa, Homo sapiens
METGKDGARRGTQSPERKRRSPVPRAPSTKLRPAAAARAMDPVAAEAPGEAFLARRRPEGGGGSARPRYSLLAEIGRGSYGVVYEAVAGRSGARVAVKKIRCDAPENVELALAEFWALTSLKRRHQNVVQFEECVLQRNGLAQRMSHGNKSSQLYLRLVETSLKGERILGYAEEPCYLWFVMEFCEGGDLNQYVLSRRPDPATNKSFMLQLTSAIAFLHKNHIVHRDLKPDNILITERSGTPILKVADFGLSKVCAGLAPRGKEGNQDNKNVNVNKYWLSSACGSDFYMAPEVWEGHYTAKADIFALGIIIWAMIERITFIDSETKKELLGTYIKQGTEIVPVGEALLENPKMELHIPQKRRTSMSEGIKQLLKDMLAANPQDRPDAFELETRMDQVTCAA

SEQ ID NO: 911197 - protein, 401 aa, Homo sapiens; identical to SEQ ID NO: 911196

SEQ ID NO: 911198 - protein, 401 aa, Homo sapiens; identical to SEQ ID NO: 911196

SEQ ID NO: 911199 - protein, 104 aa, Homo sapiens
MLALTRLPLTPLLALRAGALVALTLGWSQTIPPLGWFSLLGLSGSPQTDVAPGSLGPGNLGRAKLTLFSSSGHWVLEAEVQRYWLCQAVVLGCGTAFETTRVYL

SEQ ID NO: 911200 - protein, 401 aa, Homo sapiens; identical to SEQ ID NO: 911196

SEQ ID NO: 911201 - protein, 401 aa, Homo sapiens; identical to SEQ ID NO: 911196

SEQ ID NO: 911202 - protein, 1007 aa, Homo sapiens [sequence omitted]

SEQ ID NO: 911203 - protein, 200 aa, Homo sapiens
MSRRKQRKPQQLISDCEGPSASENGDASEEDHPQVCAKCCAQFTDPTEFLAHQNACSTDPPVMVIIGGQENPNNSSASSEPRPEGHNNPQVMDTEHSNPPDSGSSVPTDPTWGPERRGEESSGHFLVAATEPVCGIPVKWPAHEALEFQLHLHYHSKPGPTSAVWPRNCGWEGASNNGIQGSQGEDSPPPISASCTQGSA

SEQ ID NO: 911204 - protein, 1007 aa, Homo sapiens [sequence omitted]

SEQ ID NO: 911205 - protein, 1038 aa, Homo sapiens
WVQRLPQTQRPSPPSIPISIVSHPTWPSTSPTTMAHESERSSRLGVPCGEPAELGGDASEEDHPQVCAKCCAQFTDPTEFLAHQNACSTDPPVMVIIGGQENPNNSSASSEPRPEGHNNPQVMDTEHSNPPDSGSSVPTDPTWGPERRGEESSGHFLVAATGTAAGGGGGLILASPKLGATPLPPESTPAPPPPPPPPPPPGVGSGHLNIPLILEELRVLQQRQIHQMQMTEQICRQVLLLGSLGQTVGAPASPSELPGTGTASSTKPLLPLFSPIKPVQTSKTLASSSSSSSSSSGAETPKQAFFHLYHPLGSQHPFSAGGVGRSHKPTPAPSPALPGSTDQLIASPHLAFPSTTGLLAAQCLGAARGLEATASPGLLKPKNGSGELSYGEVMGPLEKPGGRHKCRFCAKVFGSDSALQIHLRSHTGERPYKCNVCGNRFTTRGNLKVHFHRHREKYPHVQMNPHPVPEHLDYVITSSGLPYGMSVPPEKAEEEAATPGGGVERKPLVASTTALSATESLTLLSTSAGTATAPGLPAFNKFVLMKAVEPKNKADENTPPGSEGSAISGVAESSTATRMQLSKLVTSLPSWALLTNHFKSTGSFPFPYVLEPLGASPSETSKLQQLVEKIDRQGAVAVTSAASGAPTTSAPAPSSSASSGPNQCVICLRVLSCPRALRLHYGQHGGERPFKCKVCGRAFSTRGNLRAHFVGHKASPAARAQNSCPICQKKFTNAVTLQQHVRMHLGGQIPNGGTALPEGGGAAQENGSEQSTVSGAGSFPQQQSQQPSPEEELSEEEEEEDEEEEEDVTDEDSLAGRGSESGGEKAISVRGDSEEASGAEEEVGTVAAAATAGKEMDSNEKTTQQSSLPPPPPPDSLDQPQPMEQGSSGVLGGKEEGGKPERSSSPASALTPEGEATSVTLVEELSLQEAMRKEPGESSSRKACEVCGQAFPSQAALEEHQKTHPKEGPLFTCVFCRQGFLERATLKKHMLLAHHQVQPFAPHGPQNIAALSLVPGCSPSITSTGLSPFPRKDDPTIP

SEQ ID NO: 911206 - protein, 231 aa, Homo sapiens
WVQRLPQTQRPSPPSIPISIVSHPTWPSTSPTTMAHESERSSRLGVPCGEPAELGGDASEEDHPQVCAKCCAQFTDPTEFLAHQNACSTDPPVMVIIGGQENPNNSSASSEPRPEGHNNPQVMDTEHSNPPDSGSSVPTDPTWGPERRGEESSGHFLVAATEPVCGIPVKWPAHEALEFQLHLHYHSKPGPTSAVWPRNCGWEGASNNGIQGSQGEDSPPPISASCTQGSA

SEQ ID NO: 911207 - protein, 369 aa, Homo sapiens
LTSSRSAGSGEAQMSNVNLSVSDFWRVMMRVCWLVRQDSRHQRIRLPHLEAVVIGRGPETKITDKKCSRQQVQLKAECNKGYVKVKQVGVNPTSIDSVVIGKDQEVKLQPGQVLHMVNELYPYIVEFEEEAKNPGLETHRKRKRSGNSDSIERDAAQEAEAGTGLEPGSNSGQCSVPLKKGKDAPIKKESLGHWSQGLKISMQDPKMQVYKDEQVVVIKDKYPKARYHWLVLPWTSISSLKAVAREHLELLKHMHTVGEKVIVDFAGSSKLRFRLGYHAIPSMSHVHLHVISQDFDSPCLKNKKHWNSFNTEYFLESQAVIEMVQEAGRVTVRDGMPELLKLPLRCHECQQLLPSIPQLKEHLRKHWTQ

SEQ ID NO: 911208 - protein, 341 aa, Homo sapiens [sequence omitted]

SEQ ID NO: 911209 - protein, 168 aa, Homo sapiens
MQDPKMQVYKDEQVVVIKDKYPKARYHWLVLPWTSISSLKAVAREHLELLKHMHTVGEKVIVDFAGSSKLRFRLGYHAIPSMSHVHLHVISQDFDSPCLKNKKHWNSFNTEYFLESQAVIEMVQEAGRVTVRDGMPELLKLPLRCHECQQLLPSIPQLKEHLRKHWTQ

SEQ ID NO: 911210 - protein, 112 aa, Homo sapiens
LTSSRSAGSGEAQMSNVNLSVSDFWRVMMRVCWLVRQDSRHQRIRLPHLEAVVIGRGPETKITDKKCSRQQVQLKAECNKGYVKVKQSLRKRQRTLAWKHTGRERDQATVIL

SEQ ID NO: 911211 - protein, 315 aa, Homo sapiens
LTSSRSAGSGEAQMSNVNLSVSDFWRVMMRVCWLVRQDSRHQRIRLPHLEAVVIGRGPETKITDKKCSRQQEFEEEAKNPGLETHRKRKRSGNSDSIERDAAQEAEAGTGLEPGSNSGQCSVPLKKGKDAPIKKESLGHWSQGLKISMQDPKMQVYKDEQVVVIKDKYPKARYHWLVLPWTSISSLKAVAREHLELLKHMHTVGEKVIVDFAGSSKLRFRLGYHAIPSMSHVHLHVISQDFDSPCLKNKKHWNSFNTEYFLESQAVIEMVQEAGRVTVRDGMPELLKLPLRCHECQQLLPSIPQLKEHLRKHWTQ

SEQ ID NO: 911212 - protein, 349 aa, Homo sapiens
LTSSRSAGSGEAQMSNVNLSVSDFWRVMMRVCWLVRQDSRHQRIRLPHLEAVVIGRGPETKITDKKCSRQQVQLKAECNKGYVKVKQVGVNPTSIDSVVIGKDQEVKLQPGQVLHMVNELYPYIVEFEEEAKNPGLETHRKRKRSGNSDSIERDAAQEAEAGTGLEPGSNSGQCSVPLKKGKDAPIKKVYKDEQVVVIKDKYPKARYHWLVLPWTSISSLKAVAREHLELLKHMHTVGEKVIVDFAGSSKLRFRLGYHAIPSMSHVHLHVISQDFDSPCLKNKKHWNSFNTEYFLESQAVIEMVQEAGRVTVRDGMPELLKLPLRCHECQQLLPSIPQLKEHLRKHWTQ

SEQ ID NO: 911213 - protein, 319 aa, Homo sapiens
LTSSRSAGSGEAQMSNVNLSVSDFWRVMMRVCWLVRQDSRHQRIRLPHLEAVVIGRGPETKITDKKCSRQQVQLKAECNKGYVKVKQVGVNPTSIDSVVIGKDQEVKLQPGQVLHMVNELYPYIVEFEEEAKNPGLETHRKRKRSGNSDSIERDAAQEAEAGTGLEPGSNSGQCSVPLKKGKDAPIKKESLGHWSQGLKISMQDPKMQVYKDEQVVVIKDKYPKARYHWLVLPWTSISSLKAVAREHLELLKHMHTVGEKVIVDFAGSSKLRFRLGYHAIPSMSHVHLHVISQDFDSPCLKNKKHWNSFNTEYFLESQE

SEQ ID NO: 911214 - protein, 297 aa, Homo sapiens
LTSSRSAGSGEAQMSNVNLSVSDFWRVMMRVCWLVRQDSRHQRIRLPHLEAVVIGRGPETKITDKKCSRQQVQLKAECNKGYVKVKQVGVNPTSIDSVVIGKDQEVKLQPGQVLHMESLGHWSQGLKISMQDPKMQVYKDEQVVVIKDKYPKARYHWLVLPWTSISSLKAVAREHLELLKHMHTVGEKVIVDFAGSSKLRFRLGYHAIPSMSHVHLHVISQDFDSPCLKNKKHWNSFNTEYFLESQAVIEMVQEAGRVTVRDGMPELLKLPLRCHECQQLLPSIPQLKEHLRKHWTQ

SEQ ID NO: 911215 - protein, 125 aa, Homo sapiens [sequence omitted]

SEQ ID NO: 911216 - protein, 168 aa, Homo sapiens; identical to SEQ ID NO: 911209

SEQ ID NO: 911217 - protein, 342 aa, Homo sapiens
MMRVCWLVRQDSRHQRIRLPHLEAVVIGRGPETKITDKKCSRQQVQLKAECNKGYVKVKQVGVNPTSIDSVVIGKDQEVKLQPGQVLHMVNELYPYIVEFEEEAKNPGLETHRKRKRSGNSDSIERDAAQEAEAGTGLEPGSNSGQCSVPLKKGKDAPIKKESLGHWSQGLKISMQDPKMQVYKDEQVVVIKDKYPKARYHWLVLPWTSISSLKAVAREHLELLKHMHTVGEKVIVDFAGSSKLRFRLGYHAIPSMSHVHLHVISQDFDSPCLKNKKHWNSFNTEYFLESQAVIEMVQEAGRVTVRDGMPELLKLPLRCHECQQLLPSIPQLKEHLRKHWTQ

SEQ ID NO: 911218 - protein, 168 aa, Homo sapiens; identical to SEQ ID NO: 911209

SEQ ID NO: 911219 - protein, 342 aa, Homo sapiens; identical to SEQ ID NO: 911217

SEQ ID NO: 911220 - protein, 288 aa, Homo sapiens
MMRVCWLVRQDSRHQRIRLPHLEAVVIGRGPETKITDKKCSRQQEFEEEAKNPGLETHRKRKRSGNSDSIERDAAQEAEAGTGLEPGSNSGQCSVPLKKGKDAPIKKESLGHWSQGLKISMQDPKMQVYKDEQVVVIKDKYPKARYHWLVLPWTSISSLKAVAREHLELLKHMHTVGEKVIVDFAGSSKLRFRLGYHAIPSMSHVHLHVISQDFDSPCLKNKKHWNSFNTEYFLESQAVIEMVQEAGRVTVRDGMPELLKLPLRCHECQQLLPSIPQLKEHLRKHWTQ

SEQ ID NO: 911221 - protein, 168 aa, Homo sapiens; identical to SEQ ID NO: 911209

SEQ ID NO: 911222 - protein, 289 aa, Homo sapiens
  misc_feature (36)..(37): Xaa can be any naturally occurring amino acid
  misc_feature (50)..(54): Xaa can be any naturally occurring amino acid
  misc_feature (57)..(69): Xaa can be any naturally occurring amino acid
  misc_feature (71)..(73): Xaa can be any naturally occurring amino acid
  misc_feature (77)..(77): Xaa can be any naturally occurring amino acid
  misc_feature (79)..(80): Xaa can be any naturally occurring amino acid
  misc_feature (83)..(84): Xaa can be any naturally occurring amino acid
  misc_feature (87)..(87): Xaa can be any naturally occurring amino acid
  misc_feature (91)..(91): Xaa can be any naturally occurring amino acid
AGAFRRLLPSRRRVLGGAFLRVLGPRPRAVPVGRCXXGPAFLALLSGLGXXXXXVGXXXXXXXXXXXXXLXXXGWWXGXXGWXXGGXWEEXWGMVVGVKKGKDGGMKKESLGHWSQGLKISMQDPKMQVYKDEQVVVIKDKYPKARYHWLVLPWTSISSLKAVAREHLELLKHMHTVGEKVIVDFAGSSKLRFRLGYHAIPSMSHVHLHVISQDFDSPCLKNKKHWNSFNTEYFLESQAVIEMVQEAGRVTVRDGMPELLKLPLRCHECQQLLPSIPQLKEHLRKHWTQ

SEQ ID NO: 911223 - protein, 33 aa, Homo sapiens
MLEPGGSSPQTNSIGLGSCCFSRVVQGGIINQI

SEQ ID NO: 911224 - protein, 83 aa, Homo sapiens
VRNSRVEYYYIIRGRVTRLDLYNLVYQNLTWLQYEIFVQNYFLKHLFHEIMFNPVPGVILKLIACNLTLLIMFIIFPNNALTD

SEQ ID NO: 911225 - protein, 683 aa, Homo sapiens
RHYQARAGNMAAAGVVSGKIIYEQEGVYIHSSCGKTNDQDGLISGILRVLEKDAEVIVDWRPLDDALDSSSILYARKDSSSVVEWTQAPKERGHRGSEHLNSYEAEWDMVNTVSFKRKPHTNGDAPSHRNGKSKWSFLFSLTDLKSIKQNKEGMGWSYLVFCLKDDVVLPALHFHQGDSKLLIESLEKYVVLCESPQDKRTLLVNCQNKSLSQSFENLLDEPAYGLIQKIKKDPYTATMIGFSKVTNYIFDSLRGSDPSTHQRPPSEMADFLSDAIPGLKINQQEEPGFEVITRIDLGERPVVQRREPVSLEEWTKNIDSEGRILNVDNMKQMIFRGGLSHALRKQAWKFLLGYFPWDSTKEERTQLQKQKTDEYFRMKLQWKSISQEQEKRNSRLRDYRSLIEKDVNRTDRTNKFYEGQDNPGLILLHDILMTYCMYDFDLGYVQGMSDLLSPLLYVMENEVDAFWCFASYMDQMHQNFEEQMQGMKTQLIQLSTLLRLLDSGFCSYLESQDSGYLYFCFRWLLIRFKREFSFLDILRLWEVMWTELPCTNFHLLLCCAILESEKQQIMEKHYGFNEILKHINELSMKIDVEDILCKAEAISLQMVKCKELPQAVCEILGLQGSEVTTPDSDVGEDENVVMTPCPTSAFQSNALPTLSASGARNDSPTQIPVSSDVCRLTPA

SEQ ID NO: 911226 - protein, 306 aa, Homo sapiens [sequence omitted]

SEQ ID NO: 911227 - protein, 683 aa, Homo sapiens; identical to SEQ ID NO: 911225

SEQ ID NO: 911228 - protein, 683 aa, Homo sapiens; identical to SEQ ID NO: 911225

SEQ ID NO: 911229 - protein, 683 aa, Homo sapiens; identical to SEQ ID NO: 911225

SEQ ID NO: 911230 - protein, 445 aa, Homo sapiens
MIGFSKVTNYIFDSLRGSDPSTHQRPPSEMADFLSDAIPGLKINQQEEPGFEVITRIDLGERPVVQRREPVSLEEWTKNIDSEGRILNVDNMKQMIFRGGLSHALRKQAWKFLLGYFPWDSTKEERTQLQKQKTDEYFRMKLQWKSISQEQEKRNSRLRDYRSLIEKDVNRTDRTNKFYEGQDNPGLILLHDILMTYCMYDFDLGYVQGMSDLLSPLLYVMENEVDAFWCFASYMDQMHQNFEEQMQGMKTQLIQLSTLLRLLDSGFCSYLESQDSGYLYFCFRWLLIRFKREFSFLDILRLWEVMWTELPCTNFHLLLCCAILESEKQQIMEKHYGFNEILKHINELSMKIDVEDILCKAEAISLQMVKCKELPQAVCEILGLQGSEVTTPDSDVGEDENVVMTPCPTSAFQSNALPTLSASGARNDSPTQIPVSSDVCRLTPA

SEQ ID NO: 911231 - protein, 665 aa, Homo sapiens
RHYQARAGNMAAAGVVSGKIIYEQEGVYIHSSCGKTNDQDGLISGILRVLEKDAEVIVDWRPLDDALDSSSILYARKDSSSVVEWTQAPKERGHRGSEHLNSYEAEWDMVNTVSFKRKPHTNGDAPSHRNGKSKWSFLFSLTDLKSIKQNKEGMGWSYLVFCLKDDVVLPALHFHQGDSKLLIESLEKYVVLCESPQDKRTLLVNCQNKSLSQSFENLLDEPAYGLIQKIKKDPYTATMIGFSKVTNYIFDSLRGSDPSTHQRPPSEMADFLSDAIPGLKINQQEEPGFEVITRIDLGERPVVQRREPVSLEEWTKNIDSEGRILNVDNMKQMIFRGGLSHALRKQAWKFLLGYFPWDSTKEERTQLQKQKTDEYFRMKLQWKSISQEQEKRNSRLRDYRSLIEKDVNRTDRTNKFYEGQDNPGLILLHDILMTYCMYDFDLGYVQGMSDLLSPLLYVMENEVDAFWCFASYMDQMHQNFEEQMQGMKTQLIQLSTLLRLLDSGFCSYLESQDSGYLYFCFRWLLIRFKREFSFLDILRLWEVMWTELPCTNFHLLLCCAILESEKQQIMEKHYGFNEILKHINELSMKIDVEDILCKAEAISLQMVKCKELPQAVCEILGLQGSEVTTPDSDVGEDATLSASGARNDSPTQIPVSSDVCRLTPA

SEQ ID NO: 911232 - protein, 626 aa, Homo sapiens
RHYQARAGNMAAAGVVSGKIIYEQEGVYIHSSCGKTNDQDGLISGILRVLEKDAEVIVDWRPLDDALDSSSILYARKDSSSVVEWTQAPKERGHRGSEHLNSYEAEWDMVNTVSFKRKPHTNGDAPSHRNGKSKWSFLFSLTDLKSIKQNKEGMGWSYLVFCLKDDVVLPALHFHQGDSKLLIESLEKYVVLCESPQDKRTLLVNCQNKSLSQSFENLLDEPAYGLIQKIKKDPYTATMIGFSKVTNYIFDSLRGSDPSTHQRPPSEMADFLSDAIPGLKINQQEEPGFEVITRIDLGERPVVQRREPVSLEEWTKNIDSEGRILNVDNMKQMIFRGGLSHALRKQAWKFLLGYFPWDSTKEERTQLQKQKTDEYFRMKLQWKSISQEQEKRNSRLRDYRSLIEKDVNRTDRTNKFYEGQDNPGLILLHDILMTYCMYDFDLGYVQGMSDLLSPLLYVMENEVDAFWCFASYMDQMHQNFEEQMQGMKTQLIQLSTLLRLLDSGFCSYLESQDSGYLYFCFRWLLIRFKREFSFLDILRLWEVMWTELPCTNFHLLLCCAILESEKQQIMEKHYGFNEILKHINELSMKIDVEDILCKAEAISLQMVKCKVYSVSSNCKICLFLVG

SEQ ID NO: 911233 - protein, 138 aa, Homo sapiens
MPNFSGNWKIIRSENFEELLKVLGVNVMLRKIAVAAASKPAVEIKQEGDTFYIKTSTTVRTTEINFKVGEEFEEQTVDGRPCKSLVKWESENKMVCEQKLLKGEGPKTSWTRELTNDGELILTMTADDVVCTRVYVRE

SEQ ID NO: 911234 - protein, 138 aa, Homo sapiens; identical to SEQ ID NO: 911233

SEQ ID NO: 911235 - protein, 138 aa, Homo sapiens; identical to SEQ ID NO: 911233

SEQ ID NO: 911236 - protein, 138 aa, Homo sapiens; identical to SEQ ID NO: 911233

SEQ ID NO: 911237 - protein, 133 aa, Homo sapiens
MPNFSGNWKIIRSENFEELLKVLGVNVMLRKIAVAAASKPAVEIKQEGDTFYIKTSTTVRTTEINFKVGEEFEEQTVDGRPCKSLVKWESENKMVCEQKLLKGEGPKTSRIALPLPQSLLGVTGMPLAGSCFL

SEQ ID NO: 911238 - protein, 138 aa, Homo sapiens; identical to SEQ ID NO: 911233

SEQ ID NO: 911239 - protein, 1018 aa, Homo sapiens
MKMWLLVSHLVIISITTCLAEFTWYRRYGHGVSEEDKGFGPIFEEQPINTIYPEESLEGKVSLNCRARASPFPVYKWRMNNGDVDLTSDRYSMVGGNLVINNPDKQKDAGIYYCLASNNYGMVRSTEATLSFGYLDPFPPEERPEVRVKEGKGMVLLCDPPYHFPDDLSYRWLLNEFPVFITMDKRRFVSQTNGNLYIANVEASDKGNYSCFVSSPSITKSVFSKFIPLIPIPERTTKPYPADIVVQFKDVYALMGQNVTLECFALGNPVPDIRWRKVLEPMPSTAEISTSGAVLKIFNIQLEDEGIYECEAENIRGKDKHQARIYVQAFPEWVEHINDTEVDIGSDLYWPCVATGKPIPTIRWLKNGYAYHKGELRLYDVTFENAGMYQCIAENTYGAIYANAELKILALAPTFEMNPMKKKILAAKGGRVIIECKPKAAPKPKFSWSKGTEWLVNSSRILIWEDGSLEINNITRNDGGIYTCFAENNRGKANSTGTLVITDPTRIILAPINADITVGENATMQCAASFDPALDLTFVWSFNGYVIDFNKENIHYQRNFMLDSNGELLIRNAQLKHAGRYTCTAQTIVDNSSASADLVVRGPPGPPGGLRIEDIRATSVALTWSRGSDNHSPISKYTIQTKTILSDDWKDAKTDPPIIEGNMEAARAVDLIPWMEYEFRVVATNTLGRGEPSIPSNRIKTDGAAPNVAPSDVGGGGGRNRELTITWAPLSREYHYGNNFGYIVAFKPFDGEEWKKVTVTNPDTGRYVHKDETMSPSTAFQVKVKAFNNKGDGPYSLVAVINSAQDAPSEAPTEVGVKVLSSSEISVHWEHVLEKIVESYQIRYWAAHDKEEAANRVQVTSQEYSARLENLLPDTQYFIEVGACNSAGCGPPSDMIEAFTKKAPPSQPPRIISSVRSGSRYIITWDHVVALSNESTVTGYKVLYRPDGQHDGKLYSTHKHSIEVPIPRDGEYVVEVRAHSDGGDGVVSQVKISGAPTLSPSLLGLLLPAFGILVYLEF

SEQ ID NO: 911240 - protein, 1072 aa, Homo sapiens
AEPGWAPPRRGGAPVGRCAPRCLQRKWETCRVWSSCAAPRRAGAGNRCLKLSNCHRAKFFFGKLNRTSTEYKMKMWLLVSHLVIISITTCLAEFTWYRRYGHGVSEEDKGFGPIFEEQPINTIYPEESLEGKVSLNCRARASPFPVYKWRMNNGDVDLTSDRYSMVGGNLVINNPDKQKDAGIYYCLASNNYGMVRSTEATLSFGYLDPFPPEERPEVRVKEGKGMVLLCDPPYHFPDDLSYRWLLNEFPVFITMDKRRFVSQTNGNLYIANVEASDKGNYSCFVSSPSITKSVFSKFIPLIPIPERTTKPYPADIVVQFKDVYALMGQNVTLECFALGNPVPDIRWRKVLEPMPSTAEISTSGAVLKIFNIQLEDEGIYECEAENIRGKDKHQARIYVQAFPEWVEHINDTEVDIGSDLYWPCVATGKPIPTIRWLKNGYAYHKGELRLYDVTFENAGMYQCIAENTYGAIYANAELKILALAPTFEMNPMKKKILAAKGGRVIIECKPKAAPKPKFSWSKGTEWLVNSSRILIWEDGSLEINNITRNDGGIYTCFAENNRGKANSTGTLVITDPTRIILAPINADITVGENATMQCAASFDPALDLTFVWSFNGYVIDFNKENIHYQRNFMLDSNGELLIRNAQLKHAGRYTCTAQTIVDNSSASADLVVRGPPGPPGGLRIEDIRATSVALTWSRGSDNHSPISKYTIQTKTILSDDWKDAKTDPPIIEGNMEAARAVDLIPWMEYEFRVVATNTLGRGEPSIPSNRIKTDGAAPNVAPSDVGGGGGRNRELTITWAPLSREYHYGNNFGYIVAFKPFDGEEWNMSPSTAFQVKVKAFNNKGDGPYSLVAVINSAQDAPSEAPTEVGVKVLSSSEISVHWEHVLEKIVESYQIRYWAAHDKEEAANRVQVTSQEYSARLENLLPDTQYFIEVGACNSAGCGPPSDMIEAFTKKAPPSQPPRIISSVRSGSRYIITWDHVVALSNESTVTGYKVLYRPDGQHDGKLYSTHKHSIEVPIPRDGEYVVEVRAHSDGGDGVVSQVKISGAPTLSPSLLGLLLPAFGILVYLEF

SEQ ID NO: 911241 - protein, 337 aa, Homo sapiens
SVCFCGVWCWSFLSISSDSFRSSAPNVAPSDVGGGGGRNRELTITWAPLSREYHYGNNFGYIVAFKPFDGEEWKKVTVTNPDTGRYVHKDETMSPSTAFQVKVKAFNNKGDGPYSLVAVINSAQDAPSEAPTEVGVKVLSSSEISVHWEHVLEKIVESYQIRYWAAHDKEEAANRVQVTSQEYSARLENLLPDTQYFIEVGACNSAGCGPPSDMIEAFTKKAPPSQPPRIISSVRSGSRYIITWDHVVALSNESTVTGYKVLYRPDGQHDGKLYSTHKHSIEVPIPRDGEYVVEVRAHSDGGDGVVSQVKISGAPTLSPSLLGLLLPAFGILVYLEF

SEQ ID NO: 911242 - protein, 699 aa, Homo sapiens
AEPGWAPPRRGGAPVGRCAPRCLQRKWETCRVWSSCAAPRRAGAGNRCLKLSNCHRAKFFFGKLNRTSTEYKMKMWLLVSHLVIISITTCLAEFTWYRRYGHGVSEEDKGFGPIFEEQPINTIYPEESLEGKVSLNCRARASPFPVYKWRMNNGDVDLTSDRYSMVGGNLVINNPDKQKDAGIYYCLASNNYGMVRSTEATLSFGYLDPFPPEERPEVRVKEGKGMVLLCDPPYHFPDDLSYRWLLNEFPVFITMDKRRFVSQTNGNLYIANVEASDKGNYSCFVSSPSITKSVFSKFIPLIPIPERTTKPYPADIVVQFKDVYALMGQNVTLECFALGNPVPDIRWRKVLEPMPSTAEISTSGAVLKIFNIQLEDEGIYECEAENIRGKDKHQARIYVQAFPEWVEHINDTEVDIGSDLYWPCVATGKPIPTIRWLKNGYAYHKGELRLYDVTFENAGMYQCIAENTYGAIYANAELKILALAPTFEMNPMKKKILAAKGGRVIIECKPKAAPKPKFSWSKGTEWLVNSSRILIWEDGSLEINNITRNDGGIYTCFAENNRGKANSTGTLVITDPTRIILAPINADITVGENATMQCAASFDPALDLTFVWSFNGYVIDFNKENIHYQRNFMLDSNGELLIRNAQLKHAGRYTCTAQTIVDNSSASADLVVRGKNRKGGEKNMVDSFLPVCASLPPTW

SEQ ID NO: 911243 - protein, 1090 aa, Homo sapiens
AEPGWAPPRRGGAPVGRCAPRCLQRKWETCRVWSSCAAPRRAGAGNRCLKLSNCHRAKFFFGKLNRTSTEYKMKMWLLVSHLVIISITTCLAEFTWYRRYGHGVSEEDKGFGPIFEEQPINTIYPEESLEGKVSLNCRARASPFPVYKWRMNNGDVDLTSDRYSMVGGNLVINNPDKQKDAGIYYCLASNNYGMVRSTEATLSFGYLDPFPPEERPEVRVKEGKGMVLLCDPPYHFPDDLSYRWLLNEFPVFITMDKRRFVSQTNGNLYIANVEASDKGNYSCFVSSPSITKSVFSKFIPLIPIPERTTKPYPADIVVQFKDVYALMGQNVTLECFALGNPVPDIRWRKVLEPMPSTAEISTSGAVLKIFNIQLEDEGIYECEAENIRGKDKHQARIYVQAFPEWVEHINDTEVDIGSDLYWPCVATGKPIPTIRWLKNGYAYHKGELRLYDVTFENAGMYQCIAENTYGAIYANAELKILALAPTFEMNPMKKKILAAKGGRVIIECKPKAAPKPKFSWSKGTEWLVNSSRILIWEDGSLEINNITRNDGGIYTCFAENNRGKANSTGTLVITDPTRIILAPINADITVGENATMQCAASFDPALDLTFVWSFNGYVIDFNKENIHYQRNFMLDSNGELLIRNAQLKHAGRYTCTAQTIVDNSSASADLVVRGPPGPPGGLRIEDIRATSVALTWSRGSDNHSPISKYTIQTKTILSDDWKDAKTDPPIIEGNMEAARAVDLIPWMEYEFRVVATNTLGRGEPSIPSNRIKTDGAAPNVAPSDVGGGGGRNRELTITWAPLSREYHYGNNFGYIVAFKPFDGEEWKKVTVTNPDTGRYVHKDETMSPSTAFQVKVKAFNNKGDGPYSLVAVINSAQDAPSEAPTEVGVKVLSSSEISVHWEHVLEKIVESYQIRYWAAHDKEEAANRVQVTSQEYSARLENLLPDTQYFIEVGACNSAGCGPPSDMIEAFTKKAPPSQPPRIISSVRSGSRYIITWDHVVALSNESTVTGYKVLYRPDGQHDGKLYSTHKHSIEVPIPRDGEYVVEVRAHSDGGDGVVSQVKISGAPTLSPSLLGLLLPAFGILVYLEF

SEQ ID NO: 911244 - protein, 1079 aa, Homo sapiens
AEPGWAPPRRGGAPVGRCAPRCLQRKWETCRVWSSCAAPRRAGAGNRCLKLSNCHRAKFFFGKLNRTSTEYKMKMWLLVSHLVIISITTCLAVSEEDKGFGPIFEEQPINTIYPEESLEGKVSLNCRARASPFPVYKWRMNNGDVDLTSDRYSMVGGNLVINNPDKQKDAGIYYCLASNNYGMVRSTEATLSFGYLDPFPPEERPEVRVKEGKGMVLLCDPPYHFPDDLSYRWLLNEFPVFITMDKRRFVSQTNGNLYIANVEASDKGNYSCFVSSPSITKSVFSKFIPLIPIPERTTKPYPADIVVQFKDVYALMGQNVTLECFALGNPVPDIRWRKVLEPMPSTAEISTSGAVLKIFNIQLEDEGIYECEAENIRGKDKHQARIYVQAFPEWVEHINDTEVDIGSDLYWPCVATGKPIPTIRWLKNGYAYHKGELRLYDVTFENAGMYQCIAENTYGAIYANAELKILALAPTFEMNPMKKKILAAKGGRVIIECKPKAAPKPKFSWSKGTEWLVNSSRILIWEDGSLEINNITRNDGGIYTCFAENNRGKANSTGTLVITDPTRIILAPINADITVGENATMQCAASFDPALDLTFVWSFNGYVIDFNKENIHYQRNFMLDSNGELLIRNAQLKHAGRYTCTAQTIVDNSSASADLVVRGPPGPPGGLRIEDIRATSVALTWSRGSDNHSPISKYTIQTKTILSDDWKDAKTDPPIIEGNMEAARAVDLIPWMEYEFRVVATNTLGRGEPSIPSNRIKTDGAAPNVAPSDVGGGGGRNRELTITWAPLSREYHYGNNFGYIVAFKPFDGEEWKKVTVTNPDTGRYVHKDETMSPSTAFQVKVKAFNNKGDGPYSLVAVINSAQDAPSEAPTEVGVKVLSSSEISVHWEHVLEKIVESYQIRYWAAHDKEEAANRVQVTSQEYSARLENLLPDTQYFIEVGACNSAGCGPPSDMIEAFTKKAPPSQPPRIISSVRSGSRYIITWDHVVALSNESTVTGYKVLYRPDGQHDGKLYSTHKHSIEVPIPRDGEYVVEVRAHSDGGDGVVSQVKISGAPTLSPSLLGLLLPAFGILVYLEF

SEQ ID NO: 911245 - protein, 1087 aa, Homo sapiens
AEPGWAPPRRGGAPVGRCAPRCLQRKWETCRVWSSCAAPRRAGAGNRCLKLSNCHRAKFFFGKLNRTSTEYKMKMWLLVSHLVIISITTCLAEFTWYRRYGHGVSEEDKGFGPIFEEQPINTIYPEESLEGKVSLNCRARASPFPVYKWRMNNGDVDLTSDRYSMVGGNLVINNPDKQKDAGIYYCLASNNYGMVRSTEATLSFGYLDPFPPEERPEVRVKEGKGMVLLCDPPYHFPDDLSYRWLLNEFPVFITMDKRRFVSQTNGNLYIANVEASDKGNYSCFVSSPSITKSVFSKFIPLIPIPERTTKPYPADIVVQFKDVYALMGQNVTLECFALGNPVPDIRWRKVLEPMPSTAEISTSGAVLKIFNIQLEDEGIYECEAENIRGKDKHQARIYVQAFPEWVEHINDTEVDIGSDLYWPCVATGKPIPTIRWLKNGYAYHKGELRLYDVTFENAGMYQCIAENTYGAIYANAELKILALAPTFEMNPMKKKILAAKGGRVIIECKPKAAPKPKFSWSKGTEWLVNSSRILIWEDGSLEINNITRNDGGIYTCFAENNRGKANSTGTLVITDPTRIILAPINADITVGENATMQCAASFDPALDLTFVWSFNGYVIDFNKENIHYQRNFMLDSNGELLIRNAQLKHAGRYTCTAQTIVDNSSASADLVVRGPPGPPGGLRIEDIRATSVALTWSRGSDNHSPISKYTIQTKTILSDDWKDAKTDPPIIEGNMEAARAVDLIPWMEYEFRVVATNTLGRGEPSIPSNRIKTDGAAPNVAPSDVGGGGGRNRELTITWAPLSREYHYGNNFGYIVAFKPFDGEEWKKVTVTNPDTGRYVHKDETMSPSTAFQVKVKAFNNKGDGPYSLVAVINSAQDAPSEAPTEVGVKVLSSSEISVHWEHVLEKIVESYQIRYWAAHDKEEAANRVQVTSQEYSARLENLLPDTQYFIEVGACNSAGCGPPSDMIEAFTKKAPPSQPPRIISSVRSGSRYIITWDHVVALSNESTVTGYKVLYRPDGQHDGKLYSTHKHSIEVPIPRDGEYVVEVRAHSDGGDGVVSQVKISEGKSTSLRSKTAKDHRSIRTMS

SEQ ID NO: 911246 - protein, 758 aa, Homo sapiens
AEPGWAPPRRGGAPVGRCAPRCLQRKWETCRVWSSCAAPRRAGAGNRCLKLSNCHRAKFFFGKLNRTSTEYKMKMWLLVSHLVIISITTCLAEFTWYRRYGHGVSEEDKGFGPIFEEQPINTIYPEESLEGKVSLNCRARASPFPVYKWRMNNGDVDLTSDRYSMVGGNLVINNPDKQKDAGIYYCLASNNYGMVRSTEATLSFGYLDPFPPEERPEVRVKEGKGMVLLCDPPYHFPDDLSYRWLLNEFPVFITMDKRRFVSQTNGNLYIANVEASDKGNYSCFVSSPSITKSVFSKFIPLIPIPERTTKPYPADIVVQFKDVYALMGQNVTLECFALGNPVPDIRWRKVLEPMPSTAEISTSGAVLKIFNIQLEDEGIYECEAENIRGKDKHQARIYVQAFPEWVEHINDTEVDIGSDLYWPCVATGKPIPTIRWLKNGYAYHKGELRLYDVTFENAGMYQCIAENTYGAIYANAELKILALAPTFEMNPMKKKILAAKGGRVIIECKPKAAPKPKFSWSKGTEWLVNSSRILIWEDGSLEINNITRNDGGIYTCFAENNRGKANSTGTLVITDPTRIILAPINADITVGENATMQCAASFDPALDLTFVWSFNGYVIDFNKENIHYQRNFMLDSNGELLIRNAQLKHAGRYTCTAQTIVDNSSASADLVVRGPPGPPGGLRIEDIRATSVALTWSRGSDNHSPISKYTIQTKTILSDDWKDAKTDPPIIEGTTDTVSNYDTSLTQINALVHTVAHI

SEQ ID NO: 911247 - protein, 414 aa, Homo sapiens [sequence omitted]

SEQ ID NO: 911248 - protein, 261 aa, Homo sapiens
  misc_feature (4)..(4): Xaa can be any naturally occurring amino acid
  misc_feature (6)..(7): Xaa can be any naturally occurring amino acid
AKGXNXXSPPAINSEAWVAPEGPLAVLRDRAQQISCPLYLCPMLEALEEGGPPLTLGLEGEHQRSNAALALQLAHCWLQRQDRHGAGEPKASRPGLLWQLPLAPVFQPTSHMRLGLRNTEWPGRTQVLRRGPLTWYLDGAHTASSAQACVRWFRQALQGRERPSGGPEVRVLLFNATGDRDPAALLKLLQPCQFDYAVFCPNLTEVSSTGNADQQNFTVTLDQVLLRCLEHQQHWNHLDEEQASPDLWSAPSPEPGGLSVR

SEQ ID NO: 911249 - protein, 587 aa, Homo sapiens [sequence omitted]

SEQ ID NO: 911250 - protein, 587 aa, Homo sapiens [sequence omitted]

SEQ ID NO: 911251 - protein, 435 aa, Homo sapiens
MSRARSHLRAALFLAAASARGVTTQVAARRGLSAWPVPQEPSMEYQDAVRMLNTLQTNAGYLEQVKRQRGDPQTQLEAMELYLARSGLQVEDLDRLNIIHVTGTKGKGSTCAFTECILRSYGLKTGFFSSPHLVQVRERIRINGQPISPELFTKYFWRLYHRLEETKDGSCVSMPPYFRFLTLMAFHVFLQEKVDLAVVEVGIGGAYDCTNIIRKPVVCGVSSLGIDHTSLLGDTVEKIAWQKGGIFKQGVPAFTVLQPEGPLAVLRDRAQQISCPLYLCPMLEALEEGGPPLTLGLEGEHQRSNAALALQLAHCWLQRQDRHGAGEPKASRPGLLWQLPLAPVFQPTSHMRLGLRNTEWPGRTQVLRRGPLTWYLDGAHTASSAQACVRWFRQALQGRERPSGGPEVRVLLFNATGDRDPAALLKLLQTNRTSQ

SEQ ID NO: 911252 - protein, 537 aa, Homo sapiens
MLNTLQTNAGYLEQVKRQRGDPQTQLEAMELYLARSGLQVEDLDRLNIIHVTGTKGKGSTCAFTECILRSYGLKTGFFSSPHLVQVRERIRINGQPISPELFTKYFWRLYHRLEETKDGSCVSMPPYFRFLTLMAFHVFLQEKVDLAVVEVGIGGAYDCTNIIRKPVVCGVSSLGIDHTSLLGDTVEKIAWQKGGIFKQGVPAFTVLQPEGPLAVLRDRAQQISCPLYLCPMLEALEEGGPPLTLGLEGEHQRSNAALALQLAHCWLQRQDRHGAGEPKASRPGLLWQLPLAPVFQPTSHMRLGLRNTEWPGRTQVLRRGPLTWYLDGAHTASSAQACVRWFRQALQGRERPSGGPEVRVLLFNATGDRDPAALLKLLQPCQFDYAVFCPNLTEVSSTGNADQQNFTVTLDQVLLRCLEHQQHWNHLDEEQASPDLWSAPSPEPGGSASLLLAPHPPHTCSASSLVFSCISHALQWISQGRDPIFQPPSPPKGLLTHPVAHSGASILREAAAIHVLVTGSLHLVGGVLKLLEPALSQ

SEQ ID NO: 911253 - protein, 537 aa, Homo sapiens; identical to SEQ ID NO: 911252

SEQ ID NO: 911254 - protein, 503 aa, Homo sapiens
MGHQEQTEGHRRDEATEASSISPCRVGEGQDAREGSPDDPSCPGSSPHLVQVRERIRINGQPISPELFTKYFWRLYHRLEETKDGSCVSMPPYFRFLTLMAFHVFLQEKVDLAVVEVGIGGAYDCTNIIRKPVVCGVSSLGIDHTSLLGDTVEKIAWQKGGIFKQGVPAFTVLQPEGPLAVLRDRAQQISCPLYLCPMLEALEEGGPPLTLGLEGEHQRSNAALALQLAHCWLQRQDRHGAGEPKASRPGLLWQLPLAPVFQPTSHMRLGLRNTEWPGRTQVLRRGPLTWYLDGAHTASSAQACVRWFRQALQGRERPSGGPEVRVLLFNATGDRDPAALLKLLQPCQFDYAVFCPNLTEVSSTGNADQQNFTVTLDQVLLRCLEHQQHWNHLDEEQASPDLWSAPSPEPGGSASLLLAPHPPHTCSASSLVFSCISHALQWISQGRDPIFQPPSPPKGLLTHPVAHSGASILREAAAIHVLVTGSLHLVGGVLKLLEPALSQ

SEQ ID NO: 911255 - protein, 511 aa, Homo sapiens
MLNTLQTNAGYLEQVKRQRGDPQTQLEAMELYLARSGLQVEDLDRLNIIHVTGTKGKGSTCAFTECILRSYGLKTGFFSSPHLVQVRERIRINGQPISPELFTKYFWRLYHRLEETKVDLAVVEVGIGGAYDCTNIIRKPVVCGVSSLGIDHTSLLGDTVEKIAWQKGGIFKQGVPAFTVLQPEGPLAVLRDRAQQISCPLYLCPMLEALEEGGPPLTLGLEGEHQRSNAALALQLAHCWLQRQDRHGAGEPKASRPGLLWQLPLAPVFQPTSHMRLGLRNTEWPGRTQVLRRGPLTWYLDGAHTASSAQACVRWFRQALQGRERPSGGPEVRVLLFNATGDRDPAALLKLLQPCQFDYAVFCPNLTEVSSTGNADQQNFTVTLDQVLLRCLEHQQHWNHLDEEQASPDLWSAPSPEPGGSASLLLAPHPPHTCSASSLVFSCISHALQWISQGRDPIFQPPSPPKGLLTHPVAHSGASILREAAAIHVLVTGSLHLVGGVLKLLEPALSQ

SEQ ID NO: 911256 - protein, 343 aa, Homo sapiens
GGGGKNKLGTRLGVTEGPLAVLRDRAQQISCPLYLCPMLEALEEGGPPLTLGLEGEHQRSNAALALQLAHCWLQRQDRHGAGEPKASRPGLLWQLPLAPVFQPTSHMRLGLRNTEWPGRTQVLRRGPLTWYLDGAHTASSAQACVRWFRQALQGRERPSGGPEVRVLLFNATGDRDPAALLKLLQPCQFDYAVFCPNLTEVSSTGNADQQNFTVTLDQVLLRCLEHQQHWNHLDEEQASPDLWSAPSPEPGGSASLLLAPHPPHTCSASSLVFSCISHALQWISQGRDPIFQPPSPPKGLLTHPVAHSGASILREAAAIHVLVTGSLHLVGGVLKLLEPALSQ

SEQ ID NO: 911257 - protein, 375 aa, Homo sapiens [sequence omitted]

SEQ ID NO: 911258 - protein, 237 aa, Homo sapiens [sequence omitted]

SEQ ID NO: 911259 - protein, 333 aa, Homo sapiens
MSRARSHLRAALFLAAASARGVTTQVAARRGLSAWPVPQEPSMEYQDAVRMLNTLQTNAGYLEQVKRQRGDPQTQLEAMELYLARSGLQVEDLDRLNIIHVTGTKGKGSTCAFTECILRSYGLKTGFFSSPHLVQVRERIRINGQPISPELFTKYFWRLYHRLEETKDGSCVSMPPYFRFLTLMAFHVFLQEKVDLAVVEVGIGGAYDCTNIIRKPVVCGVSSLGIDHTSLLGDTVEKIAWQKGGIFKQGVPAFTVLQPEGPLAVLRDRAQQISHSWKPWNCTWHGVGCRWRSLDRLNIIHVTGTKGKGSTCAFTECILRSYGLKTGFFSSPH

SEQ ID NO: 911260 - protein, 587 aa, Homo sapiens [sequence omitted]

SEQ ID NO: 911261 - protein, 256 aa, Homo sapiens
GGGGKNKLGTRLGVTEGPLAVLRDRAQQISCPLYLCPMLEALEEGGPPLTLGLEGEHQRSNAALALQLAHCWLQRQDRHGAGEPKASRPGLLWQLPLAPVFQPTSHMRLGLRNTEWPGRTQVLRRGPLTWYLDGAHTASSAQACVRWFRQALQGRERPSGGPEVRVLLFNATGDRDPAALLKLLQPCQFDYAVFCPNLTEVSSTGNADQQNFTVTLDQVLLRCLEHQQHWNHLDEEQASPDLWSAPSPEPGGLSVR

SEQ ID NO: 911262 - protein, 184 aa, Homo sapiens
MKGAGSLAASLPMAEKFWWEGTMEGPSGYPSSAKTASFQDAVRMLNTLQTNAGYLEQVKRQRGDPQTQLEAMELYLARSGLQVEDLDRLNIIHVTGTKGKGSTCAFTECILRSYGLKTGFFRYWLVGGCGVCVPMDPGGLWNQPVLQDQGHPQEVSCMSLCPVFIHSINIQLAISLGDRANCYL

SEQ ID NO: 911263 - protein, 537 aa, Homo sapiens; identical to SEQ ID NO: 911252

SEQ ID NO: 911264 - protein, 580 aa, Homo sapiens
MKGAGSLAASLPMAEKFWWEGTMEGPSGYPSSAKTASFQDAVRMLNTLQTNAGYLEQVKRQRGDPQTQLEAMELYLARSGLQVEDLDRLNIIHVTGTKGKGSTCAFTECILRSYGLKTGFFSSPHLVQVRERIRINGQPISPELFTKYFWRLYHRLEETKDGSCVSMPPYFRFLTLMAFHVFLQEKVDLAVVEVGIGGAYDCTNIIRKPVVCGVSSLGIDHTSLLGDTVEKIAWQKGGIFKQGVPAFTVLQPEGPLAVLRDRAQQISCPLYLCPMLEALEEGGPPLTLGLEGEHQRSNAALALQLAHCWLQRQDRHGAGEPKASRPGLLWQLPLAPVFQPTSHMRLGLRNTEWPGRTQVLRRGPLTWYLDGAHTASSAQACVRWFRQALQGRERPSGGPEVRVLLFNATGDRDPAALLKLLQPCQFDYAVFCPNLTEVSSTGNADQQNFTVTLDQVLLRCLEHQQHWNHLDEEQASPDLWSAPSPEPGGSASLLLAPHPPHTCSASSLVFSCISHALQWISQGRDPIFQPPSPPKGLLTHPVAHSGASILREAAAIHVLVTGSLHLVGGVLKLLEPALSQ

SEQ ID NO: 911265 - protein, 616 aa, Homo sapiens
MSRARSHLRAALFLAAASARGVTTQVAARRGLSAWPVPQEPSMEYQDAVRMLNTLQTNAGYLEQVKRQRGDPQTQLEAMELYLARSGLQVEDLDRLNIIHVTGTKGKGSTCAFTECILRSYGLKTGFFSSPHLVQVRERIRINGQPISPELFTKYFWRLYHRLEETKDGSCVSMPPYFRFLTLMAFHVFLQEKVDLAVVEVGIGGAYDCTNIIRKPVVCGVSSLGIDHTSLLGDTVEKIAWQKGGIFKVTRQTGGRERHGRPGSLRFHPGFTVSLEQQGVPAFTVLQPEGPLAVLRDRAQQISCPLYLCPMLEALEEGGPPLTLGLEGEHQRSNAALALQLAHCWLQRQDRHGAGEPKASRPGLLWQLPLAPVFQPTSHMRLGLRNTEWPGRTQVLRRGPLTWYLDGAHTASSAQACVRWFRQALQGRERPSGGPEVRVLLFNATGDRDPAALLKLLQPCQFDYAVFCPNLTEVSSTGNADQQNFTVTLDQVLLRCLEHQQHWNHLDEEQASPDLWSAPSPEPGGSASLLLAPHPPHTCSASSLVFSCISHALQWISQGRDPIFQPPSPPKGLLTHPVAHSGASILREAAAIHVLVTGSLHLVGGVLKLLEPALSQ

SEQ ID NO: 911266 - protein, 375 aa, Homo sapiens [sequence omitted]

SEQ ID NO: 911267 - protein, 356 aa, Homo sapiens
MCDPALGRSRGRTGASLQGVPAFTVLQPEGPLAVLRDRAQQISCPLYLCPMLEALEEGGPPLTLGLEGEHQRSNAALALQLAHCWLQRQDRHGAGEPKASRPGLLWQLPLAPVFQPTSHMRLGLRNTEWPGRTQVLRRGPLTWYLDGAHTASSAQACVRWFRQALQGRERPSGGPEVRVLLFNATGDRDPAALLKLLQPCQFDYAVFCPNLTEVSSTGNADQQNFTVTLDQVLLRCLEHQQHWNHLDEEQASPDLWSAPSPEPGGSASLLLAPHPPHTCSASSLVFSCISHALQWISQGRDPIFQPPSPPKGLLTHPVAHSGASILREAAAIHVLVTGSLHLVGGVLKLLEPALSQ

SEQ ID NO: 911268 - protein, 500 aa, Homo sapiens
MSRARSHLRAALFLAAASARGVTTQVAARRGLSAWPVPQEPSMEYQDAVRMLNTLQTNAGYLEQVKRQRGDPQTQLEAMELYLARSGLQVEDLDRLNIIHVTGTKGKGSTCAFTECILRSYGLKTGFFSSPHLVQVRERIRINGQPISPELFTKYFWRLYHRLEETKDGSCVSMPPYFRFLTLMAFHVFLQEKVDLAVVEVGIGGAYDCTNIIRKPVVCGVSSLGIDHTSLLGDTVEKIAWQKGGIFKQGVPAFTVLQPEGPLAVLRDRAQQISCPLYLCPMLEALEEGGPPLTLGLEGEHQRSNAALALQLAHCWLQRQDRHGAGEPKASRPGLLWQLPLAPVFQPTSHMRLGLRNTEWPGRTQVLRRGPLTWYLDGAHTASSAQACVRWFRQALQGRERPSGGPEVRVLLFNATGDRDPAALLKLLQPCQFDYAVFCPNLTEVSSTGNADQQNFTVTLDQVLLRCLEHQQHWNHLDEEQASPDLWSAPSPEPGGLSVR

SEQ ID NO: 911269 - protein, 301 aa, Homo sapiens
QACVRWFRQALQGRERPSGGPEVRVLLFNATGDRDPAALLKLLQPCQFDYAVFCPNLTEVSSTGNADESLALSPRLECNVLRRGPLTWYLDGAHTASSAQACVRWFRQALQGRERPSGGPEVRVLLFNATGDRDPAALLKLLQPCQFDYAVFCPNLTEVSSTGNADQQNFTVTLDQVLLRCLEHQQHWNHLDEEQASPDLWSAPSPEPGGSASLLLAPHPPHTCSASSLVFSCISHALQWISQGRDPIFQPPSPPKGLLTHPVAHSGASILREAAAIHVLVTGSLHLVGGVLKLLEPALSQ

SEQ ID NO: 911270 - protein, 174 aa, Homo sapiens [sequence omitted]

SEQ ID NO: 911271 - protein, 328 aa, Homo sapiens
MGPAGSLLGSGQMQITLWGSLAAVAIFFVITFLIFLCSSCDREKKPRQHSGDHENLMNVPSDKEMFSRSVTSLATDAPASSEQNGALTNGDILSEDSTLTCMQHYEEVQTSASDLLDSQDSTGKPKCHQSRELPRIPPESAVDTMLTARSVDGDQGLGMEGPYEVLKDSSSQENMVEDCLYETVKEIKEVAAAAHLEKGHSGKAKSTSASKELPGPQTEGKAEFAEYASVDRNKKCRQSVNVESILGNSCDPEEEAPPPVPVKLLDENENLQEKEGGEAEESATDTTSETNKVGTGVFVLSLWVPVLVRNLAGPGVVLGNICKHFPVC

SEQ ID NO: 911272 - protein, 432 aa, Homo sapiens
MGPAGSLLGSGQMQITLWGSLAAVAIFFVITFLIFLCSSCDREKKPRQHSGDHENLMNVPSDKEMFSRSVTSLATDAPASSEQNGALTNGDILSEDSTLTCMQHYEEVQTSASDLLDSQDSTGKPKCHQSRELPRIPPESAVDTMLTARSVDGDQGLGMEGPYEVLKDSSSQENMVEDCLYETVKEIKEVAAAAHLEKGHSGKAKSTSASKELPGPQTEGKAEFAEYASVDRNKKCRQSVNVESILGNSCDPEEEAPPPVPVKLLDENENLQEKEGGEAEESATDTTSETNKRFSSLSYKSREEDPTLTEEEISAMYSSVNKPGQLVNKSGQSLTVPESTYTSIQGDPQRSPSSCNDLYATVKDFEKTPNSTLPPAGRPSEEPEPDYEAIQTLNREEEKATLGTNGHHGLVPKENDYESISDLQQGRDITRL

SEQ ID NO: 911273 - protein, 318 aa, Homo sapiens [sequence omitted]

SEQ ID NO: 911274 - protein, 678 aa, Homo sapiens
RPAVRKSAGQTLFSTIGAHGTLLQHSTWHTVIWKVLFHLLDRVRESSTTADKEKIESGGGNILIHHSRDTAEKQWAETWVLTLAGVARIFNTRRYLLQPLGDFSRAWDVLLDHIQSAALSKNNEVSLAALKSFQEILQIVSPVRDSDKPETPPVVNVPVPVLIGPISGMSRPFVRTDSIGEKLGRYSSSEPPIVTDELEDLNLWWAAWNTWYRIGSESTKPPITFDKLTFIPSQPFLTALIQIFPALYQHIKTGFNMDDLQKLGVILHSAISVPISSDASPFILPSYTEAVLTSLQEAVLTALDVLQKAICVGPENMQIMYPAIFDQLLAFVEFSCKPPQYGQLETKHIANAKYNQYFRRKWVALNYVPFAERSLEVVVDLYQKTACHKAVVNEKVLQNIIKTLRVPLSLKYSCPSESTWKLAVSSLLRVLSIGLPVARQHASSGKFDSMWPELANTFEDFLFTKSIPPDNLSIQEFQRNENIDVEVVQLISNEILPYANFIPKEFVGQIMTMLNKGSIHSQSSSFTEAEIDIRLREEFSKMCFETLLQFSFSNKVTTPQEGYISRMALSVLLKRSQDVLHRYIEDERLSGKCPLPRQQVTEIIFVLKAVSTLIDSLKKTQPENVDGNTWAQVIALYPTLVECITCSSSEVCSALKEALVPFKDFMQPPASRVQNGES

SEQ ID NO: 911275 - protein, 678 aa, Homo sapiens; identical to SEQ ID NO: 911274

SEQ ID NO: 911276 - protein, 166 aa, Homo sapiens [sequence omitted]

SEQ ID NO: 911277 - protein, 678 aa, Homo sapiens; identical to SEQ ID NO: 911274

SEQ ID NO: 911278 - protein, 278 aa, Homo sapiens
NFPFSGGEMDSLEWNWALVYELSGEHHDEEWSVKTYQEVAQKFVETHPEFIGIKIIYSDHRSKDVAVIAESIRMAMGLRIKFPTVVAGFDLVGHEDTGHSLRDYKEALMIPAKDGVKLPYFFHAGETDWQGTSIDRNILDALMLNTTRIGHGFALSKHPAVRTYSWKKDIPIEVCPISNQVLKLVSDLRNHPVATLMATGHPMVISSDDPAMFGAKGLSYDFYEVFMGIGGMKADLRTLKQLAMNSIKYSTLLESEKNTFMEIWKKRWDKFIADVATK

SEQ ID NO: 911279 - protein, 272 aa, Homo sapiens
ETMPKAVEDLNKVYELSGEHHDEEWSVKTYQEVAQKFVETHPEFIGIKIIYSDHRSKDVAVIAESIRMAMGLRIKFPTVVAGFDLVGHEDTGHSLRDYKEALMIPAKDGVKLPYFFHAGETDWQGTSIDRNILDALMLNTTRIGHGFALSKHPAVRTYSWKKDIPIEVCPISNQVLKLVSDLRNHPVATLMATGHPMVISSDDPAMFGAKGLSYDFYEVFMGIGGMKADLRTLKQLAMNSIKYSTLLESEKNTFMEIWKKRWDKFIADVATK

SEQ ID NO: 911280 - protein, 460 aa, Homo sapiens
VSGAVPSPVESPSEPFPSPGIPMLVDGPSERPALCFLLLAVAMSFFGSALSIDETRAHLLLKEKMMRLGGRLVLNTKEELANERLMTLKIAEMKEAMRTLIFPPSMHFFQAKHLIERSQVFNILRMMPKGAALHLHDIGIVTMDWLVRNVTYRPHCHICFTPRGIMQFRFAHPTPRPSEKCSKWILLEDYRKRVQNVTEFDDSLLRNFTLVTQHPEVIYTNQNVVWSKFETIFFTISGLIHYAPVFRDYVFRSMQEFYEDNVLYMEIRARLLPVYELSGEHHDEEWSVKTYQEVAQKFVETHPEFIGIKIIYSDHRSKDVAVIAESIRMAMGLRIKFPTVVAGFDLVGHEDTGHSLRDYKEALMIPAKDGVKLPYFFHAGETDWQGTSIDRNILDALMLNTTRIGHGFALSKHPAVRTYSWKKDIPIEVCPISNQVLKLVSDLIRPHAIRMDSAMTVTGH

SEQ ID NO: 911281 - protein, 581 aa, Homo sapiens
GKPLPVCTCRSFLWGLEEESFNILPSGNLRAGREKEDQSSTLKSVGFHSPTLLCSPVESPSEPFPSPGIPMLVDGPSERPALCFLLLAVAMSFFGSALSIDETRAHLLLKEKMMRLGGRLVLNTKEELANERLMTLKIAEMKEAMRTLIFPPSMHFFQAKHLIERSQVFNILRMMPKGAALHLHDIGIVTMDWLVRNVTYRPHCHICFTPRGIMQFRFAHPTPRPSEKCSKWILLEDYRKRVQNVTEFDDSLLRNFTLVTQHPEVIYTNQNVVWSKFETIFFTISGLIHYAPVFRDYVFRSMQEFYEDNVLYMEIRARLLPVYELSGEHHDEEWSVKTYQEVAQKFVETHPEFIGIKIIYSDHRSKDVAVIAESIRMAMGLRIKFPTVVAGFDLVGHEDTGHSLRDYKEALMIPAKDGVKLPYFFHAGETDWQGTSIDRNILDALMLNTTRIGHGFALSKHPAVRTYSWKKDIPIEVCPISNQVLKLVSDLRNHPVATLMATGHPMVISSDDPAMFGAKGLSYDFYEVFMGIGGMKADLRTLKQLAMNSIKYSTLLESEKNTFMEIWKKRWDKFIADVATK

SEQ ID NO: 911282 - protein, 533 aa, Homo sapiens
VSGAVPSPVESPSEPFPSPGIPMLVDGPSERPALCFLLLAVAMSFFGSALSIDETRAHLLLKEKMMRLGGRLVLNTKEELANERLMTLKIAEMKEAMRTLIFPPSMHFFQAKHLIERSQVFNILRMMPKGAALHLHDIGIVTMDWLVRNVTYRPHCHICFTPRGIMQFRFAHPTPRPSEKCSKWILLEDYRKRVQNVTEFDDSLLRNFTLVTQHPEVIYTNQNVVWSKFETIFFTISGLIHYAPVFRDYVFRSMQEFYEDNVLYMEIRARLLPVYELSGEHHDEEWSVKTYQEVAQKFVETHPEFIGIKIIYSDHRSKDVAVIAESIRMAMGLRIKFPTVVAGFDLVGHEDTGHSLRDYKEALMIPAKDGVKLPYFFHAGETDWQGTSIDRNILDALMLNTTRIGHGFALSKHPAVRTYSWKKDIPIEVCPISNQVLKLVSDLRNHPVATLMATGHPMVISSDDPAMFGAKGLSYDFYEVFMGIGGMKADLRTLKQLAMNSIKYSTLLESEKNTFMEIWKKRWDKFIADVATK

SEQ ID NO: 911283 - protein, 117 aa, Homo sapiens
RKKKIVSSGRVRPLVSPPPHPIRFNLDPFRRLPLPVTQRAPTPAALSSSNVLGSIPCLGLFSFSLPGTFLLSPFVLPTPVYPSSFKFMSLSQRGFPVLALFLSGSLALFHHASNHSL

SEQ ID NO: 911284 - protein, 142 aa, Homo sapiens
MKADEAHIANVMQMWTFIVALVFTHKGYLNMEFNPSDHPRASTIFLSKSQTDVREKRKSLFINHHPPGQIARKYSSCSTIFLDDSTVSQPNLKYTIKCCVASGNILSTSKKQGTQMDGCSSDIFGLKIFTPLFEIPKWPPDY

SEQ ID NO: 911285 - protein, 341 aa, Homo sapiens
MGNTTSCCVSSSPKLRRNAHSRLESYRPDTDLSREDTGCNLQHISDRENIDDLNMEFNPSDHPRASTIFLSKSQTDVREKRKSLFINHHPPGQIARKYSSCSTIFLDDSTVSQPNLKYTIKCVALAIYYHIKNRDPDGRMLLDIFDENLHPLSKSEVPPDYDKHNPEQKQIYRFVRTLFSAAQLTAECAIVTLVYLERLLTYAEIDICPANWKRIVLGAILLASKVWDDQAVWNVDYCQILKDITVEDMNELERQFLELLQFNINVPSSVYAKYYFDLRSLAEANNLSFPLEPLSRERAHKLEAISRLCEDKYKDLRRSARKRSASADNLTLPRWSPAIIS

SEQ ID NO: 911286 - protein, 287 aa, Homo sapiens
MEFNPSDHPRASTIFLSKSQTDVREKRKSLFINHHPPGQIARKYSSCSTIFLDDSTVSQPNLKYTIKCVALAIYYHIKNRDPDGRMLLDIFDENLHPLSKSEVPPDYDKHNPEQKQIYRFVRTLFSAAQLTAECAIVTLVYLERLLTYAEIDICPANWKRIVLGAILLASKVWDDQAVWNVDYCQILKDITVEDMNELERQFLELLQFNINVPSSVYAKYYFDLRSLAEANNLSFPLEPLSRERAHKLEAISRLCEDKYKDLRRSARKRSASADNLTLPRWSPAIIS

SEQ ID NO: 911287 - protein, 287 aa, Homo sapiens; identical to SEQ ID NO: 911286

SEQ ID NO: 911288 - protein, 287 aa, Homo sapiens; identical to SEQ ID NO: 911286

SEQ ID NO: 911289 - protein, 287 aa, Homo sapiens; identical to SEQ ID NO: 911286

SEQ ID NO: 911290 - protein, 287 aa, Homo sapiens; identical to SEQ ID NO: 911286

SEQ ID NO: 911291 - protein, 275 aa, Homo sapiens
MEFNPSDHPRASTIFLSKSQTDVREKRKSLFINHHPPGQIARKYSSCSTIFLDDSTVSQPNLKYTIKWDPDGRMLLDIFDENLHPLSKSEVPPDYDKHNPEQKQIYRFVRTLFSAAQLTAECAIVTLVYLERLLTYAEIDICPANWKRIVLGAILLASKVWDDQAVWNVDYCQILKDITVEDMNELERQFLELLQFNINVPSSVYAKYYFDLRSLAEANNLSFPLEPLSRERAHKLEAISRLCEDKYKDLRRSARKRSASADNLTLPRWSPAIIS

SEQ ID NO: 911292 - protein, 341 aa, Homo sapiens; identical to SEQ ID NO: 911285

SEQ ID NO: 911293 - protein, 341 aa, Homo sapiens; identical to SEQ ID NO: 911285

SEQ ID NO: 911294 - protein, 111 aa, Homo sapiens
QQLPWAQGIIGRLGAQNLTGDIWVCFCFFFPFLFLRIAPSSCLDERPCSKAWRKRQCPGDPSSLSPLSATALPSWRKWTRILEEEIKGKGSRGEAGKMVKQPGPLESPWGR

SEQ ID NO: 911295 - protein, 341 aa, Homo sapiens; identical to SEQ ID NO: 911285

SEQ ID NO: 911296 - protein, 341 aa, Homo sapiens; identical to SEQ ID NO: 911285

SEQ ID NO: 911297 - protein, 341 aa, Homo sapiens; identical to SEQ ID NO: 911285

SEQ ID NO: 911298 - protein, 341 aa, Homo sapiens; identical to SEQ ID NO: 911285

SEQ ID NO: 911299 - protein, 307 aa, Homo sapiens
MGNTTSCCVSSSPKLRRNAHSRLESYRPDTDLSREDTGCNLQHISDRENIDDLNMEFNPSDHPRASTIFLSKSQTDVREKRKSLFINHHPPGQIARKYSSCSTIFLDDSTVSQPNLKYTIKCVALAIYYHIKNRDPDGRMLLDIFDENLHPLSKSEVPPDYDKHNPEQKQIYRFVRTLFSAAQLTAECAIVTLVYLERLLTYAEIDICPANWKRIVLGAILLASKVWDDQAVWNVDYCQILKDITVEDMNELERQFLELLQFNINVPSSVYAKYYFDLRSLAEANNLSFPLEPLSRERAHKLEGKMV

SEQ ID NO: 911300 - protein, 341 aa, Homo sapiens; identical to SEQ ID NO: 911285

SEQ ID NO: 911301 - protein, 287 aa, Homo sapiens; identical to SEQ ID NO: 911286

SEQ ID NO: 911302 - protein, 341 aa, Homo sapiens; identical to SEQ ID NO: 911285

SEQ ID NO: 911303 - protein, 287 aa, Homo sapiens; identical to SEQ ID NO: 911286

SEQ ID NO: 911304 - protein, 287 aa, Homo sapiens; identical to SEQ ID NO: 911286

SEQ ID NO: 911305 - protein, 287 aa, Homo sapiens; identical to SEQ ID NO: 911286

SEQ ID NO: 911306 - protein, 202 aa, Homo sapiens
MLLDIFDENLHPLSKSEVPPDYDKHNPEQKQIYRFVRTLFSAAQLTAECAIVTLVYLERLLTYAEIDICPANWKRIVLGAILLASKVWDDQAVWNVDYCQILKDITVEDMNELERQFLELLQFNINVPSSVYAKYYFDLRSLAEANNLSFPLEPLSRERAHKLEAISRLCEDKYKDLRRSARKRSASADNLTLPRWSPAIIS

SEQ ID NO: 911307 - protein, 341 aa, Homo sapiens; identical to SEQ ID NO: 911285

SEQ ID NO: 911308 - protein, 341 aa, Homo sapiens; identical to SEQ ID NO: 911285

SEQ ID NO: 911309 - protein, 341 aa, Homo sapiens; identical to SEQ ID NO: 911285

SEQ ID NO: 911310 - protein, 341 aa, Homo sapiens; identical to SEQ ID NO: 911285

SEQ ID NO: 911311 - protein, 341 aa, Homo sapiens; identical to SEQ ID NO: 911285

SEQ ID NO: 911312 - protein, 69 aa, Homo sapiens
MDADMARPDPHCLSCPSGHLSPLRGQVQGPKKIREEALSQCRQPDSAPVVPSHHLLTTEARRRPHHPLV

SEQ ID NO: 911313 - protein, 211 aa, Homo sapiens
MCPGNWLWASMTFMARFSRSSSRSPVRTRGTLEEMPTVQHPFLNVFELERLLYTGKTACNHADEVWPGLYLGDQDMANNRRELRRLGITHVLNASHSRWRGTPEAYEGLGIRYLGVEAHDSPAFDMSIHFQTAADFIHRALSQPGGKILVHCAVGVSRSATLVLAYLMLYHHLTLVEAIKKVKDHRGIIPNRGFLRQLLALDRRLRQGLEA

SEQ ID NO: 911314 - protein, 211 aa, Homo sapiens; identical to SEQ ID NO: 911313

SEQ ID NO: 911315 - protein, 158 aa, Homo sapiens
MCPGNWLWASMTFMARFSRSSSRSPVRTRGTLEEMPTVQHPFLNVFELERLLYTGKTACNHADEVWPGLYLGDQDMANNRRELRRLGITHVLNASHSRWRGTPEAYEGLGIRYLGVEAHDSPAFDMSIHFQTAADFIHQNKRAISALHLCRKSGIRQA

SEQ ID NO: 911316 - protein, 147 aa, Homo sapiens
MCPGNWLWASMTFMARFSRSSSRSPVRTRGTLEEMPTVQHPFLNVFELERLLYTGKTACNHADEVWPGLYLGDQDMANNRRELRRLGITHVLNASHSRWRGTPEAYEGLGIRYLGVEAHDSPAFDMRGRGKRTRPRTGEGLNTKWRK

SEQ ID NO: 911317 - protein, 211 aa, Homo sapiens; identical to SEQ ID NO: 911313

SEQ ID NO: 911318 - protein, 1409 aa, Homo sapiens
DSPTTTSGPSPSPRDLRPSSAPPGALAFRSPNYAERAPRPERPSTRPPPAASSAAGPDRARDAAAPLPAQRRPGGTMQAQQLPYEFFSEENAPKWRGLLVPALKKVQGQVHPTLESNDDALQYVEELILQLLNMLCQAQPRSASDVEERVQKSFPHPIDKWAIADAQSAIEKRKRRNPLSLPVEKIHPLLKEVLGYKIDHQVSVYIVAVLEYISADILKLVGNYVRNIRHYEITKQDIKVAMCADKVLMDMFHQDVEDINILSLTDEEPSTSGEQTYYDLVKAFMAEIRQYIRELNLIIKVFREPFVSNSKLFSANDVENIFSRIVDIHELSVKLLGHIEDTVEMTDEGSPHPLVGSCFEDLAEELAFDPYESYARDILRPGFHDRFLSQLSKPGAALYLQSIGEGFKEAVQYVLPRLLLAPVYHCLHYFELLKQLEEKSEDQEDKECLKQAITALLNVQSGMEKICSKSLAKRRLSESACRFYSQQMKGKQLAIKKMNEIQKNIDGWEGKDIGQCCNEFIMEGTLTRVGAKHERHIFLFDGLMICCKSNHGQPRLPGASNAEYRLKEKFFMRKVQINDKDDTNEYKHAFEIILKDENSVIFSAKSAEEKNNWMAALISLQYRSTLERMLDVTMLQEEKEEQMRLPSADVYRFAEPDSEENIIFEENMQPKAGIPIIKAGTVIKLIERLTYHMYADPNFVRTFLTTYRSFCKPQELLSLIIERFEIPEPEPTEADRIAIENGDQPLSAELKRFRKEYIQPVQLRVLNVCRHWVEHHFYDFERDAYLLQRMEEFIGTVRGKAMKKWVESITKIIQRKKIARDNGPGHNITFQSSPPTVEWHISRPGHIETFDLLTLHPIEIARQLTLLESDLYRAVQPSELVGSVWTKEDKEINSPNLLKMIRHTTNLTLWFEKCIVETENLEERVAVVSRIIEILQVFQELNNFNGVLEVVSAMNSSPVYRLDHTFEQIPSRQKKILEEAHELSEDHYKKYLAKLRSINPPCVPFFGIYLTNILKTEEGNPEVLKRHGKELINFSKRRKVAEITGEIQQYQNQPYCLRVESDIKRFFENLNPMGNSMEKEFTDYLFNKSLEIEPRNPKPLPRFPKKYSYPLKSPGVRPSNPRPGTMRHPTPLQQEPRKISYSRIPESETESTASAPNSPRTPLTPPPASGASSTTDVCSVFDSDHSSPFHSSNDTVFIQVTLPHGPRSASVSSISLTKGTDEVPVPPPVPPRRRPESAPAESSPSKIMSKHLDSPPAIPPRQPTSKAYSPRYSISDRTSISDPPESPPLLPPREPVRTPDVFSSSPLHLQPPPLGKKSDHGNAFFPNSPSPFTPPPPQTPSPHGTRRHLPSPPLTQEVDLHSIAGPPVPPRQSTSQHIPKLPPKTYKREHTHPSMHRDGPPLLENAHSS

SEQ ID NO: 911319 - protein, 1409 aa, Homo sapiens; identical to SEQ ID NO: 911318

SEQ ID NO: 911320 - protein, 1394 aa, Homo sapiens
DSPTTTSGPSPSPRDLRPSSAPPGALAFRSPNYAERAPRPERPSTRPPPAASSAAGPDRARDAAAPLPAQRRPGGTMQAQQLPYEFFSEENAPKWRGLLVPALKKVQGQVHPTLESNDDALQYVEELILQLLNMLCQAQPRSASDVEERVQKSFPHPIDKWAIADAQSAIEKRKRRNPLSLPVEKIHPLLKEVLGYKIDHQVSVYIVAVLEYISADILKLVGNYVRNIRHYEITKQDIKVAMCADKVLMDMFHQDVEDINILSLTDEEPSTSGEQTYYDLVKAFMAEIRQYIRELNLIIKVFREPFVSNSKLFSANDVENIFSRIVDIHELSVKLLGHIEDTVEMTDEGSPHPLVGSCFEDLAEELAFDPYESYARDILRPGFHDRFLSQLSKPGAALYLQSIGEGFKEAVQYVLPRLLLAPVYHCLHYFELLKQLEEKSEDQEDKECLKQAITALLNVQSGMEKICSKSLAKRRLSESACRFYSQQMKGKQLAIKKMNEIQKNIDGWEGKDIGQCCNEFIMEGTLTRVGAKHERHIFLFDGLMICCKSNHGQPRLPGASNAEYRLKEKFFMRKVQINDKDDTNEYKHAFEIILKDENSVIFSAKSAEEKNNWMAALISLQYRSTLERMLDVTMLQEEKEEQMRLPSADVYRFAEPDSEENIIFEENMQPKAGIPIIKAGTVIKLIERLTYHMYADPNFVRTFLTTYRSFCKPQELLSLIIERFEIPEPEPTEADRIAIENGDQPLSAELKRFRKEYIQPVQLRVLNVCRHWVEHHFYDFERDAYLLQRMEEFIGTVRGKAMKKWVESITKIIQRKKIARDNGPGHNITFQSSPPTVEWHISRPGHIETFDLLTLHPIEIARQLTLLESDLYRAVQPSELVGSVWTKEDKEINSPNLLKMIRHTTNLTLWFEKCIVETENLEERVAVVSRIIEILQVFQELNNFNGVLEVVSAMNSSPVYRLDHTFEQIPSRQKKILEEAHELSEDHYKKYLAKLRSINPPCVPFFGIYLTNILKTEEGNPEVLKRHGKELINFSKRRKVAEITGEIQQYQNQPYCLRVESDIKRFFENLNPMGNSMEKEFTDYLFNKSLEIEPRNPKPLPRFPKKYSYPLKSPGVRPSNPRPGTMRHPTPLQQEPRKISYSRIPESETESTASAPNSPRTPLTPPPASGASSTTDVCSVFDSDHSSPFHSRSASVSSISLTKGTDEVPVPPPVPPRRRPESAPAESSPSKIMSKHLDSPPAIPPRQPTSKAYSPRYSISDRTSISDPPESPPLLPPREPVRTPDVFSSSPLHLQPPPLGKKSDHGNAFFPNSPSPFTPPPPQTPSPHGTRRHLPSPPLTQEVDLHSIAGPPVPPRQSTSQHIPKLPPKTYKREHTHPSMHRDGPPLLENAHSS

SEQ ID NO: 911321 - protein, 362 aa, Homo sapiens
ELGTLIGSQVRVESDIKRFFENLNPMGNSMEKEFTDYLFNKSLEIEPRNPKPLPRFPKKYSYPLKSPGVRPSNPRPGTMRHPTPLQQEPRKISYSRIPESETESTASAPNSPRTPLTPPPASGASSTTDVCSVFDSDHSSPFHSSNDTVFIQVTLPHGPRSASVSSISLTKGTDEVPVPPPVPPRRRPESAPAESSPSKIMSKHLDSPPAIPPRQPTSKAYSPRYSISDRTSISDPPESPPLLPPREPVRTPDVFSSSPLHLQPPPLGKKSDHGNAFFPNSPSPFTPPPPQTPSPHGTRRHLPSPPLTQEVDLHSIAGPPVPPRQSTSQHIPKLPPKTYKREHTHPSMHRDGPPLLENAHSS

SEQ ID NO: 911322 - protein, 711 aa, Homo sapiens
DSPTTTSGPSPSPRDLRPSSAPPGALAFRSPNYAERAPRPERPSTRPPPAASSAAGPDRARDAAAPLPAQRRPGGTMQAQQLPYEFFSEENAPKWRGLLVPALKKVQGQVHPTLESNDDALQYVEELILQLLNMLCQAQPRSASDVEERVQKSFPHPIDKWAIADAQSAIEKRKRRNPLSLPVEKIHPLLKEVLGYKIDHQVSVYIVAVLEYISADILKLVGNYVRNIRHYEITKQDIKVAMCADKVLMDMFHQDVEDINILSLTDEEPSTSGEQTYYDLVKAFMAEIRQYIRELNLIIKVFREPFVSNSKLFSANDVENIFSRIVDIHELSVKLLGHIEDTVEMTDEGSPHPLVGSCFEDLAEELAFDPYESYARDILRPGFHDRFLSQLSKPGAALYLQSIGEGFKEAVQYVLPRLLLAPVYHCLHYFELLKQLEEKSEDQEDKECLKQAITALLNVQSGMEKICSKSLAKRRLSESACRFYSQQMKGKQLAIKKMNEIQKNIDGWEGKDIGQCCNEFIMEGTLTRVGAKHERHIFLFDGLMICCKSNHGQPRLPGASNAEYRLKEKFFMRKVQINDKDDTNEYKHAFEIILKDENSVIFSAKSAEEKNNWMAALISLQYRSTLERMLDVTMLQEEKEEQMRLPSADVYRFAEPDSEENIIFEENMQPKAGIPIIKAGTVIKLIERLTYHMYAGKNYAVACHFCFPASN

SEQ ID NO: 911323 - protein, 333 aa, Homo sapiens
DSPTTTSGPSPSPRDLRPSSAPPGALAFRSPNYAERAPRPERPSTRPPPAASSAAGPDRARDAAAPLPAQRRPGGTMQAQQLPYEFFSEENAPKWRGLLVPALKKVQGQVHPTLESNDDALQYVEELILQLLNMLCQAQPRSASDVEERVQKSFPHPIDKWAIADAQSAIEKRKRRNPLSLPVEKIHPLLKEVLGYKIDHQVSVYIVAVLEYISADILKLVGNYVRNIRHYEITKQDIKVAMCADKVLMDMFHQDVEDINILSLTDEEPSTSGEQTYYDLVKAFMAEIRQYIRELNLIIKVFREPFVSNSKLFSANVSIIVYMPLIECVVKFA

SEQ ID NO: 911324 - protein, 1065 aa, Homo sapiens [sequence omitted]

SEQ ID NO: 911325 - protein, 1125 aa, Homo sapiens
GPDVKERRCKKEIDKGKHLFPCVSDSKWFSANDVENIFSRIVDIHELSVKLLGHIEDTVEMTDEGSPHPLVGSCFEDLAEELAFDPYESYARDILRPGFHDRFLSQLSKPGAALYLQSIGEGFKEAVQYVLPRLLLAPVYHCLHYFELLKQLEEKSEDQEDKECLKQAITALLNVQSGMEKICSKSLAKRRLSESACRFYSQQMKGKQLAIKKMNEIQKNIDGWEGKDIGQCCNEFIMEGTLTRVGAKHERHIFLFDGLMICCKSNHGQPRLPGASNAEYRLKEKFFMRKVQINDKDDTNEYKHAFEIILKDENSVIFSAKSAEEKNNWMAALISLQYRSTLERMLDVTMLQEEKEEQMRLPSADVYRFAEPDSEENIIFEENMQPKAGIPIIKAGTVIKLIERLTYHMYADPNFVRTFLTTYRSFCKPQELLSLIIERFEIPEPEPTEADRIAIENGDQPLSAELKRFRKEYIQPVQLRVLNVCRHWVEHHFYDFERDAYLLQRMEEFIGTVRGKAMKKWVESITKIIQRKKIARDNGPGHNITFQSSPPTVEWHISRPGHIETFDLLTLHPIEIARQLTLLESDLYRAVQPSELVGSVWTKEDKEINSPNLLKMIRHTTNLTLWFEKCIVETENLEERVAVVSRIIEILQVFQELNNFNGVLEVVSAMNSSPVYRLDHTFEQIPSRQKKILEEAHELSEDHYKKYLAKLRSINPPCVPFFGIYLTNILKTEEGNPEVLKRHGKELINFSKRRKVAEITGEIQQYQNQPYCLRVESDIKRFFENLNPMGNSMEKEFTDYLFNKSLEIEPRNPKPLPRFPKKYSYPLKSPGVRPSNPRPGTMRHPTPLQQEPRKISYSRIPESETESTASAPNSPRTPLTPPPASGASSTTDVCSVFDSDHSSPFHSSNDTVFIQVTLPHGPRSASVSSISLTKGTDEVPVPPPVPPRRRPESAPAESSPSKIMSKHLDSPPAIPPRQPTSKAYSPRYSISDRTSISDPPESPPLLPPREPVRTPDVFSSSPLHLQPPPLGKKSDHGNAFFPNSPSPFTPPPPQTPSPHGTRRHLPSPPLTQEVDLHSIAGPPVPPRQSTSQHIPKLPPKTYKREHTHPSMHRDGPPLLENAHSS

SEQ ID NO: 911326 - protein, 1267 aa, Homo sapiens
DSPTTTSGPSPSPRDLRPSSAPPGALAFRSPNYAERAPRPERPSTRPPPAASSAAGPDRARDAAAPLPAQRRPGGTMQAQQLPYEFFSEENAPKWRGLLVPALKKVQGQVHPTLESNDDALQYVEELILQLLNMLCQAQPRSASDVEERVQKSFPHPIDKWAIADAQSAIEKRKRRNPLSLPVEKIHPLLKEVLGYKIDHQVSVYIVAVLEYISADILKLVGNYVRNIRHYEITKQDIKVAMCADKVLMDMFHQDVEDINILSLTDEEPSTSGEQTYYDLVKAFMAEIRQYIRELNLIIKVFREPFVSNSKLFSANDVENIFSRIVDIHELSVKLLGHIEDTVEMTDEGSPHPLVGSCFEDLAEELAFDPYESYARDILRPGFHDRFLSQLSKPGAALYLQSIGEGFKEAVQYVLPRLLLAPVYHCLHYFELLKQLEEKSEDQEDKECLKQAITALLNVQSGMEKICSKSLAKRRLSESACRFYSQQMKGKQLAIKKMNEIQKNIDGWEGKDIGQCCNEFIMEGTLTRVGAKHERHIFLFDGLMICCKSNHGQPRLPGASNAEYRLKEKFFMRKVQINDKDDTNEYKHAFEIILKDENSVIFSAKSAEEKNNWMAALISLQYRSTLERMLDVTMLQEEKEEQMRLPSADVYRFAEPDSEENIIFEENMQPKAGIPIIKAGTVIKLIERLTYHMYADPNFVRTFLTTYRSFCKPQELLSLIIERFEIPEPEPTEADRIAIENGDQPLSAELKRFRKEYIQPVQLRVLNVCRHWVEHHFYDFERDAYLLQRMEEFIGTVRGKAMKKWVESITKIIQRKKIARDNGPGHNITFQSSPPTVEWHISRPGHIETFDLLTLHPIEIARQLTLLESDLYRAVQPSELVGSVWTKEDKEINSPNLLKMIRHTTNLTLWFEKCIVETENLEERVAVVSRIIEILQVFQELNNFNGVLEVVSAMNSSPVYRLDHTFEQIPSRQKKILEEAHELSEDHYKKYLAKLRSINPPCVPFFGIYLTNILKTEEGNPEVLKRHGKELINFSKRRKVAEITGEIQQYQNQPYCLRVESDIKRFFENLNPMGNSMEKEFTDYLFNKSLEIEPRNPKPLPRFPKKYSYPLKSPGVRPSNPRPGTMRHPTPLQQEPRKISYSRIPESETESTASAPNSPRTPLTPPPASGASSTTDVCSVFDSDHSSPFHSSNDTVFIQVTLPHGPRSASVSSISLTKGTDEVPVPPPVPPRRRPESAPAESSPSKIMSKHLDSPPAIPPRQPTSNI

SEQ ID NO: 911327 - protein, 176 aa, Homo sapiens
MMPTPVILLKEGTDSSQGIPQLVSNISACQVIAEAVRTTLGPRGMDKLIVDGRGKATISNDGATILKLLDVVHPAAKTLVDIAKSQDAEVGDGTTSVTLLAAEFLKQVKPYVEEGLHPQIIIRAFRTATQLAVNKIKEIAVTVKKADKVEQRKLLETVCHDRSELQADLPAESFLC

SEQ ID NO: 911328 - protein, 88 aa, Homo sapiens
NSRPRRPRRRQKGAQGGTWYGVDINNEDIADNFEAFVWEPAMVRINALTAASEAACLIVSVDETIKNPRSTVDAPTAAGRGRGRGRPH

SEQ ID NO: 911329 - protein, 85 aa, Homo sapiens
LLNSRPVDRHAQGGTWYGVDINNEDIADNFEAFVWEPAMVRINALTAASEAACLIVSVDETIKNPRSTVDAPTAAGRGRGRGRPH

SEQ ID NO: 911330 - protein, 92 aa, Homo sapiens
TTTFAAGRLLNKLRARHAQGGTWYGVDINNEDIADNFEAFVWEPAMVRINALTAASEAACLIVSVDETIKNPRSTVDAPTAAGRGRGRGRPH

SEQ ID NO: 911331 - protein, 303 aa, Homo sapiens
MVELELKAEKDNAEIRVHTVEDYQAIVDAEWNILYDKLEKIHHSGAKVVLSKLPIGDVATQYFADRDMFCAGRVPEEDLKRTMMACGGSIQTSVNALSADVLGRCQVFEETQIGGERYNFFTGCPKAKTCTFILRGGAEQFMEETERSLHDAIMIVRRAIKNDSVVAGGGAIEMELSKYLRDYSRTIPGKQQLLIGAYAKALEIIPRQLCDNAGFDATNILNKLRARHAQGGTWYGVDINNEDIADNFEAFVWEPAMVRINALTAASEAACLIVSVDETIKNPRSTVDAPTAAGRGRGRGRPH

SEQ ID NO: 911332 - protein, 303 aa, Homo sapiens; identical to SEQ ID NO: 911331

SEQ ID NO: 911333 - protein, 303 aa, Homo sapiens; identical to SEQ ID NO: 911331

SEQ ID NO: 911334 - protein, 303 aa, Homo sapiens; identical to SEQ ID NO: 911331

SEQ ID NO: 911335 - protein, 303 aa, Homo sapiens; identical to SEQ ID NO: 911331

SEQ ID NO: 911336 - protein, 303 aa, Homo sapiens; identical to SEQ ID NO: 911331

SEQ ID NO: 911337 - protein, 279 aa, Homo sapiens
MVELELKAEKDNAEIRVHTVEDYQAIVDAEWNILYDKLEKIHHSGAKVVLSKLPIGDVATQYFADRDMFCAGRVPEEDLKRTMMACGGSIQTSVNALSADVLGRCQVFEETQIGGERYNFFTGCPKAKTCTFILRGGAEQFMEETERSLHDAIMIVRRAIKNDSVVAGGGAIEMELSKYLRDYSRTIPGKQQLLIGAYAKALEIIPRQLCDNAGFDATNILNKLRARHAQPAMVRINALTAASEAACLIVSVDETIKNPRSTVDAPTAAGRGRGRGRPH

SEQ ID NO: 911338 - protein, 277 aa, Homo sapiens
MVELELKAEKDNAEIRVHTVEDYQAIVDAEWNILYDKLEKIHHSGAKVVLSKLPIGDVATQYFADRDMFCAGRVPEEDLKRTMMACGGSIQTSVNALSADVLGRCQVFEETQIGGERYNFFTGCPKAKTCTFILRGGAEQFMEETERSLHDAIMIVRRAIKNDSVVAGGGAIEMELSKYLRDYSRTIPGKQQLLIGAYAKALEIIPRQLCDNAGFDATNILNKLRARHAQCGCSHSSRPGPWSWPPPLRGTPPITWLAGCWVHLPSLAWLLHFTRKG

SEQ ID NO: 911339 - protein, 234 aa, Homo sapiens
MVELELKAEKDNAEIRVHTVEDYQAIVDAEWNILYDKLEKIHHSGAKVVLSKLPIGDVATQYFADRDMFCAGRVPEEDLKRTMMACGGSIQTSVNALSADVLGRCQVFEETQIGGERYNFFTGCPKAKTCTFILRGGAEQFMEETERSLHDAIMIVRRAIKGGTWYGVDINNEDIADNFEAFVWEPAMVRINALTAASEAACLIVSVDETIKNPRSTVDAPTAAGRGRGRGRPH

SEQ ID NO: 911340 - protein, 176 aa, Homo sapiens; identical to SEQ ID NO: 911327

SEQ ID NO: 911341 - protein, 303 aa, Homo sapiens; identical to SEQ ID NO: 911331

SEQ ID NO: 911342 - protein, 176 aa, Homo sapiens; identical to SEQ ID NO: 911327

SEQ ID NO: 911343 - protein, 176 aa, Homo sapiens; identical to SEQ ID NO: 911327

SEQ ID NO: 911344 - protein, 303 aa, Homo sapiens; identical to SEQ ID NO: 911331

SEQ ID NO: 911345 - protein, 303 aa, Homo sapiens; identical to SEQ ID NO: 911331

SEQ ID NO: 911346 - protein, 303 aa, Homo sapiens; identical to SEQ ID NO: 911331

SEQ ID NO: 911347 - protein, 303 aa, Homo sapiens; identical to SEQ ID NO: 911331

SEQ ID NO: 911348 - protein, 303 aa, Homo sapiens; identical to SEQ ID NO: 911331

SEQ ID NO: 911349 - protein, 303 aa, Homo sapiens; identical to SEQ ID NO: 911331

SEQ ID NO: 911350 - protein, 303 aa, Homo sapiens; identical to SEQ ID NO: 911331

SEQ ID NO: 911351 - protein, 303 aa, Homo sapiens; identical to SEQ ID NO: 911331

SEQ ID NO: 911352 - protein, 303 aa, Homo sapiens; identical to SEQ ID NO: 911331

SEQ ID NO: 911353 - protein, 303 aa, Homo sapiens; identical to SEQ ID NO: 911331

SEQ ID NO: 911354 - protein, 294 aa, Homo sapiens
GCESAPRVHTVEDYQAIVDAEWNILYDKLEKIHHSGAKVVLSKLPIGDVATQYFADRDMFCAGRVPEEDLKRTMMACGGSIQTSVNALSADVLGRCQVFEETQIGGERYNFFTGCPKAKTCTFILRGGAEQFMEETERSLHDAIMIVRRAIKNDSVVAGGGAIEMELSKYLRDYSRTIPGKQQLLIGAYAKALEIIPRQLCDNAGFDATNILNKLRARHAQGGTWYGVDINNEDIADNFEAFVWEPAMVRINALTAASEAACLIVSVDETIKNPRSTVDAPTAAGRGRGRGRPH

SEQ ID NO: 911355 - protein, 313 aa, Homo sapiens
RSPCTVRSPCTVRSPCTVRSPCTVRSPCTVEDYQAIVDAEWNILYDKLEKIHHSGAKVVLSKLPIGDVATQYFADRDMFCAGRVPEEDLKRTMMACGGSIQTSVNALSADVLGRCQVFEETQIGGERYNFFTGCPKAKTCTFILRGGAEQFMEETERSLHDAIMIVRRAIKNDSVVAGGGAIEMELSKYLRDYSRTIPGKQQLLIGAYAKALEIIPRQLCDNAGFDATNILNKLRARHAQGGTWYGVDINNEDIADNFEAFVWEPAMVRINALTAASEAACLIVSVDETIKNPRSTVDAPTAAGRGRGRGRPH

SEQ ID NO: 911356 - protein, 176 aa, Homo sapiens; identical to SEQ ID NO: 911327

SEQ ID NO: 911357 - protein, 271 aa, Homo sapiens
  misc_feature (125)..(125): Xaa can be any naturally occurring amino acid
MMPTPVILLKEGTDSSQGIPQLVSNISACQVIAEAVRTTLGPRGMDKLIVDGRGKATISNDGATILKLLDVVHPAAKTLVDIAKSQDAEVGDGTTSVTLLAAEFLKQVKPYVEEGLHPQIIIRAXSRTGQPPAGHTIRMVTEAYEQRAEVCMTSGSADLRSSARWDADDAHDAVKMIKSGARDLVYCVVKISTRVNAPKYHNPKMPLCRARVKAEKTAEMSPKLSIHVSEEISSSKNHIDQCLSIHGMGTVLLTECRGILRIERMRLEVNN

SEQ ID NO: 911358 - protein, 176 aa, Homo sapiens; identical to SEQ ID NO: 911327

SEQ ID NO: 911359 - protein, 176 aa, Homo sapiens; identical to SEQ ID NO: 911327

SEQ ID NO: 911360 - protein, 92 aa, Homo sapiens; identical to SEQ ID NO: 911330

SEQ ID NO: 911361 - protein, 303 aa, Homo sapiens; identical to SEQ ID NO: 911331

SEQ ID NO: 911362 - protein, 303 aa, Homo sapiens; identical to SEQ ID NO: 911331

SEQ ID NO: 911363 - protein, 303 aa, Homo sapiens; identical to SEQ ID NO: 911331

SEQ ID NO: 911364 - protein, 303 aa, Homo sapiens; identical to SEQ ID NO: 911331

SEQ ID NO: 911365 - protein, 303 aa, Homo sapiens; identical to SEQ ID NO: 911331

SEQ ID NO: 911366 - protein, 347 aa, Homo sapiens
MVELELKAEKDNAEIRVHTVEDYQAIVDAEWNILYDKLEKIHHSGAKVVLSKLPIGDVATQYFADRDMFCAGRVPEEDLKRTMMACGGSIQTSVNALSADVLGRCQVFEETQIGGERYNFFTGCPKAKTCTFILRGGAEQFMEETERSLHDAIMIVRRAIKNDSVVAGGGAIEMELSKYLRDYSRTIPGKQQLLIGAYAKALEIIPRQLCDNAGFDATNILNKLRARHAQGGTWYGVDINNEDIADNFEAFVWEPAMVRINALTAASEAACLIVSVDETIKNPRSTVDAPTAAGRGRGRGRPMERDHHNGWCCGASSWLVLLSSRGDGLFGVKGIKHTKTVFGKKAV

SEQ ID NO: 911367 - protein, 284 aa, Homo sapiens
MVELELKAEKDNAEIRVHTVEIHHSGAKVVLSKLPIGDVATQYFADRDMFCAGRVPEEDLKRTMMACGGSIQTSVNALSADVLGRCQVFEETQIGGERYNFFTGCPKAKTCTFILRGGAEQFMEETERSLHDAIMIVRRAIKNDSVVAGGGAIEMELSKYLRDYSRTIPGKQQLLIGAYAKALEIIPRQLCDNAGFDATNILNKLRARHAQGGTWYGVDINNEDIADNFEAFVWEPAMVRINALTAASEAACLIVSVDETIKNPRSTVDAPTAAGRGRGRGRPH

SEQ ID NO: 911368 - protein, 176 aa, Homo sapiens; identical to SEQ ID NO: 911327

SEQ ID NO: 911369 - protein, 303 aa, Homo sapiens; identical to SEQ ID NO: 911331

SEQ ID NO: 911370 - protein, 176 aa, Homo sapiens; identical to SEQ ID NO: 911327

SEQ ID NO: 911371 - protein, 303 aa, Homo sapiens; identical to SEQ ID NO: 911331

SEQ ID NO: 911372 - protein, 303 aa, Homo sapiens; identical to SEQ ID NO: 911331

SEQ ID NO: 911373 - protein, 303 aa, Homo sapiens; identical to SEQ ID NO: 911331

SEQ ID NO: 911374 - protein, 303 aa, Homo sapiens; identical to SEQ ID NO: 911331

SEQ ID NO: 911375 - protein, 303 aa, Homo sapiens; identical to SEQ ID NO: 911331

SEQ ID NO: 911376 - protein, 303 aa, Homo sapiens; identical to SEQ ID NO: 911331

SEQ ID NO: 911377 - protein, 303 aa, Homo sapiens; identical to SEQ ID NO: 911331

SEQ ID NO: 911378 - protein, 303 aa, Homo sapiens; identical to SEQ ID NO: 911331

SEQ ID NO: 911379 - protein, 304 aa, Homo sapiens
EKDYARVYRVAYTKLDGLVRQIVCMAGDVKMPLLHNALALQIHHSGAKVVLSKLPIGDVATQYFADRDMFCAGRVPEEDLKRTMMACGGSIQTSVNALSADVLGRCQVFEETQIGGERYNFFTGCPKAKTCTFILRGGAEQFMEETERSLHDAIMIVRRAIKNDSVVAGGGAIEMELSKYLRDYSRTIPGKQQLLIGAYAKALEIIPRQLCDNAGFDATNILNKLRARHAQGGTWYGVDINNEDIADNFEAFVWEPAMVRINALTAASEAACLIVSVDETIKNPRSTVDAPTAAGRGRGRGRPH

SEQ ID NO: 911380 - protein, 125 aa, Homo sapiens
MVELELKAEKDNAEIRVHTVEDYQAIVDAEWNILYDKLEKIHHSGAKVVLSKLPIGDVATQYFADRDMFCAGRVPEEDLKRTMMACGGSIQTSVNALSADVLGRCQVFEETQIGGESQLWCGSMR

SEQ ID NO: 911381 - protein, 124 aa, Homo sapiens
LRPTLLPLLHSLVWRPGMEEGGIKLVGDAGRAKTLRALRSTTEMRRPLFNERPSLESPRSPASGPSSRTESVVTNHRVAEVVRSLPLPGAELLGISIARGIVGCWAARSRRRGESGGPLNKLPK

SEQ ID NO: 911382 - protein, 1261 aa, Homo sapiens
MIAHKQKKTKKKRAWASGQLSTDITTSEMGLKSLSSNSIFDPDYIKELVNDIRKFSHMLLYLKEAIFSDCFKEVIHIRLEELLRVLKSIMNKHQNLNSVDLQNAAEMLTAKVKAVNFTEVNEENKNDLFQEVFSSIETLAFTFGNILTNFLMGDVGNDSLLRLPVSRETKSFENVSVESVDSSSEKGNFSPLELDNVLLKNTDSIELALSYAKTWSKYTKNIVSWVEKKLNLELESTRNMVKLAEATRTNIGIQEFMPLQSLFTNALLNDIESSHLLQQTIAALQANKFVQPLLGRKNEMEKQRKEIKELWKQEQNKMLEAENALKKAKLLCMQRQDEYEKAKSSMFRAEEEHLSSSGGLAKNLNKQLEKKRRLEEEALQKVEEANELYKVCVTNVEERRNDLENTKREILAQLRTLVFQCDLTLKAVTVNLFHMQHLQAASLADSLQSLCDSAKLYDPGQEYSEFVKATNSTEEEKVDGNVNKHLNSSQPSGFGPANSLEDVVRLPDSSNKIEEDRCSNSADITGPSFIRSWTFGMFSDSESTGGSSESRSLDSESISPGDFHRKLPRTPSSGTMSSADDLDEREPPSPSETGPNSLGTFKKTLMSKAALTHKFRKLRSPTKCRDCEGIVVFQGVECEECLLVCHRKCLENLVIICGHQKLPGKIHLFGAEFTQVAKKEPDGIPFILKICASEIENRALCLQGIYRVCGNKIKTEKLCQALENGMHLVDISEFSSHDICDVLKLYLRQLPEPFILFRLYKEFIDLAKEIQHVNEEQETKKNSLEDKKWPNMCIEINRILLKSKDLLRQLPASNFNSLHFLIVHLKRVVDHAEENKMNSKNLGVIFGPSLIRPRATTAPITISSLAEYSNQARLVEFLITYSQKIFDGSLQPQDVMCSIGVVDQGCFPKPLLSPEERDIERSMKSLFFSSKEDIHTSESESKIFERATSFEESERKQNALGKCDACLSDKAQLLLDQEAESASQKIEDGKTPKPLSLKSDRSTNNVERHTPRTKIRPVSLPVDRLLLASPPNERNGRNMGNVNLDKFCKNPAFEGVNRKDAATTVCSKFNGFDQQTLQKIQDKQYEQNSLTAKTTMIMPSALQEKGVTTSLQISGDHSINATQPSKPYAEPVRSVREASERRSSDSYPLAPVRAPRTLQPQHWTTFYKPHAPIISIRGNEEKPASPSAAVPPGTDHDPHGLVVKSMPDPDKASACPGQATGQPKEDSEELGLPDVNPMCQRPRLKRMQQFEDLEDEIPQFV

SEQ ID NO: 911383 - protein, 392 aa, Homo sapiens
PVACEGSLTWKTLPKIFDGSLQPQDVMCSIGVVDQGCFPKPLLSPEERDIERSMKSLFFSSKEDIHTSESESKIFERATSFEESERKQNALGKCDACLSDKAQLLLDQEAESASQKIEDGKTPKPLSLKSDRSTNNVERHTPRTKIRPVSLPVDRLLLASPPNERNGRNMGNVNLDKFCKNPAFEGVNRKDAATTVCSKFNGFDQQTLQKIQDKQYEQNSLTAKTTMIMPSALQEKGVTTSLQISGDHSINATQPSKPYAEPVRSVREASERRSSDSYPLAPVRAPRTLQPQHWTTFYKPHAPIISIRGNEEKPASPSAAVPPGTDHDPHGLVVKSMPDPDKASACPGQATGQPKEDSEELGLPDVNPMCQRPRLKRMQQFEDLEDEIPQFV

SEQ ID NO: 911384 - protein, 223 aa, Homo sapiens [sequence omitted]

SEQ ID NO: 911385 - protein, 1261 aa, Homo sapiens
MIAHKQKKTKKKRAWASGQLSTDITTSEMGLKSLSSNSIFDPDYIKELVNDIRKFSHMLLYLKEAIFSDCFKEVIHIRLEELLRVLKSIMNKHQNLNSVDLQNAAEMLTAKVKAVNFTEVNEENKNDLFQEVFSSIETLAFTFGNILTNFLMGDVGNDSLLRLPVSRETKSFENVSVESVDSSSEKGNFSPLELDNVLLKNTDSIELALSYAKTWSKYTKNIVSWVEKKLNLELESTRNMVKLAEATRTNIGIQEFMPLQSLFTNALLNDIESSHLLQQTIAALQANKFVQPLLGRKNEMEKQRKEIKELWKQEQNKMLEAENALKKAKLLCMQRQDEYEKAKSSMFRAEEEHLSSSGGLAKNLNKQLEKKRRLEEEALQKVEEANELYKVCVTNVEERRNDLENTKREILAQLRTLVFQCDLTLKAVTVNLFHMQHLQAASLADSLQSLCDSAKLYDPGQEYSEFVKATNSTEEEKVDGNVNKHLNSSQPSGFGPANSLEDVVRLPDSSNKIEEDRCSNSADITGPSFIRSWTFGMFSDSESTGGSSESRSLDSESISPGDFHRKLPRTPSSGTMSSADDLDEREPPSPSETGPNSLGTFKKTLMSKAALTHKFRKLRSPTKCRDCEGIVVFQGVECEECLLVCHRKCLENLVIICGHQKLPGKIHLFGAEFTQVAKKEPDGIPFILKICASEIENRALCLQGIYRVCGNKIKTEKLCQALENGMHLVDISEFSSHDICDVLKLYLRQLPEPFILFRLYKEFIDLAKEIQHVNEEQETKKNSLEDKKWPNMCIEINRILLKSKDLLRQLPASNFNSLHFLIVHLKRVVDHAEENKMNSKNLGVIFGPSLIRPRPTTAPITISSLAEYSNQARLVEFLITYSQKIFDGSLQPQDVMCSIGVVDQGCFPKPLLSPEERDIERSMKSLFFSSKEDIHTSESESKIFERATSFEESERKQNALGKCDACLSDKAQLLLDQEAESASQKIEDGKTPKPLSLKSDRSTNNVERHTPRTKIRPVSLPVDRLLLASPPNERNGRNMGNVNLDKFCKNPAFEGVNRKDAATTVCSKFNGFDQQTLQKIQDKQYEQNSLTAKTTMIMPSALQEKGVTTSLQISGDHSINATQPSKPYAEPVRSVREASERRSSDSYPLAPVRAPRTLQPQHWTTFYKPHAPIISIRGNEEKPASPSAAVPPGTDHDPHGLVVKSMPDPDKASACPGQATGQPKEDSEELGLPDVNPMCQRPRLKRMQQFEDLEDEIPQFV

SEQ ID NO: 911386 - protein, 1197 aa, Homo sapiens
MERRDCFKEVIHIRLEELLRVLKSIMNKHQNLNSVDLQNAAEMLTAKVKAVNFTEVNEENKNDLFQEVFSSIETLAFTFGNILTNFLMGDVGNDSLLRLPVSRETKSFENVSVESVDSSSEKGNFSPLELDNVLLKNTDSIELALSYAKTWSKYTKNIVSWVEKKLNLELESTRNMVKLAEATRTNIGIQEFMPLQSLFTNALLNDIESSHLLQQTIAALQANKFVQPLLGRKNEMEKQRKEIKELWKQEQNKMLEAENALKKAKLLCMQRQDEYEKAKSSMFRAEEEHLSSSGGLAKNLNKQLEKKRRLEEEALQKVEEANELYKVCVTNVEERRNDLENTKREILAQLRTLVFQCDLTLKAVTVNLFHMQHLQAASLADSLQSLCDSAKLYDPGQEYSEFVKATNSTEEEKVDGNVNKHLNSSQPSGFGPANSLEDVVRLPDSSNKIEEDRCSNSADITGPSFIRSWTFGMFSDSESTGGSSESRSLDSESISPGDFHRKLPRTPSSGTMSSADDLDEREPPSPSETGPNSLGTFKKTLMSKAALTHKFRKLRSPTKCRDCEGIVVFQGVECEECLLVCHRKCLENLVIICGHQKLPGKIHLFGAEFTQVAKKEPDGIPFILKICASEIENRALCLQGIYRVCGNKIKTEKLCQALENGMHLVDISEFSSHDICDVLKLYLRQLPEPFILFRLYKEFIDLAKEIQHVNEEQETKKNSLEDKKWPNMCIEINRILLKSKDLLRQLPASNFNSLHFLIVHLKRVVDHAEENKMNSKNLGVIFGPSLIRPRPTTAPITISSLAEYSNQARLVEFLITYSQKIFDGSLQPQDVMCSIGVVDQGCFPKPLLSPEERDIERSMKSLFFSSKEDIHTSESESKIFERATSFEESERKQNALGKCDACLSDKAQLLLDQEAESASQKIEDGKTPKPLSLKSDRSTNNVERHTPRTKIRPVSLPVDRLLLASPPNERNGRNMGNVNLDKFCKNPAFEGVNRKDAATTVCSKFNGFDQQTLQKIQDKQYEQNSLTAKTTMIMPSALQEKGVTTSLQISGDHSINATQPSKPYAEPVRSVREASERRSSDSYPLAPVRAPRTLQPQHWTTFYKPHAPIISIRGNEEKPASPSAAVPPGTDHDPHGLVVKSMPDPDKASACPGQATGQPKEDSEELGLPDVNPMCQRPRLKRMQQFEDLEDEIPQFV

SEQ ID NO: 911387 - protein, 366 aa, Homo sapiens [sequence omitted]

SEQ ID NO: 911388 - protein, 171 aa, Homo sapiens
MSLTKTERTIIVSMWAKISTQADTIGTETLERLFLSHPQTKTYFPHFDLHPGSAQLRAHGSKVVAAVGDAVKSIDDIGGALSKLSELHAYILRVDPVNFKLLSHCLLVTLAARFPADFTPRPTPPGTSSIGRILCPDREVPLSAAPGPPGQAAAPPPSWRFPSPTYRVMRQ

SEQ ID NO: 911389 - protein, 230 aa, Homo sapiens
MSLTKTERTIIVSMWAKISTQADTIGTETLERLFLSHPQTKTYFPHFDLHPGSAQLRAHGSKVVAAVGDAVKSIDDIGGALSKLSELHAYILRVDPVNFKALHGVPQHQGLLPAPERLPGRDAAAEPRAAHAGGCGRGGAARGQPARRAEPAGGPARARAARGPSQLSAANPVFPRRAGLPPAGRVHRANASGVGQVPDWCGRGADRKIPLSPVLRRPWSVPVNKQRPEP

SEQ ID NO: 911390 - protein, 142 aa, Homo sapiens
HVSDQDLGAIIVSMWAKISTQADTIGTETLERLFLSHPQTKTYFPHFDLHPGSAQLRAHGSKVVAAVGDAVKSIDDIGGALSKLSELHAYILRVDPVNFKLLSHCLLVTLAARFPADFTAEAHAAWAKFLSVVSSVLTEKYR

SEQ ID NO: 911391 - protein, 147 aa, Homo sapiens
STSGGAMLSAQERAQIAQVWDLIAGHEAQFGAELLLRLFTVYPSTKVYFPHLSACQDATQLLSHGQRMLAAVGAAVQHVDNLRAALSPLADLHALVLRVDPANFPLLIQCFHVVLASHLQDEFTVQMQAAWDKFLTGVAVVLTEKYR

SEQ ID NO: 911392 - protein, 128 aa, Homo sapiens
GSGLCLLTGTDQGLRSTRLFTVYPSTKVYFPHLSACQDATQLLSHGQRMLAAVGAAVQHVDNLRAALSPLADLHALVLRVDPANFPLLIQCFHVVLASHLQDEFTVQMQAAWDKFLTGVAVVLTEKYR

SEQ ID NO: 911393 - protein, 76 aa, Homo sapiens
TPGTLAPICFGEPDPETPAGCLINSSSASSPASHLLCAPRQSAQSHVHPRSALSPAHHQSVHSPAHLSSASRNILL

SEQ ID NO: 911394 - protein, 109 aa, Homo sapiens
MAPSSKRAVETRSHSQICPGMQVPLRMWCRSYKCGAEDSFKEERNIDPETPAGCLINSSSASSPASHLLCAPRQSAQSHVHPRSALSPAHHQSVHSPAHLSSASRNILL

SEQ ID NO: 911395 - protein, 114 aa, Homo sapiens
MWCRRQLQRGKEYRCQEPAILPKQPFVLCSSQPTGTLLQIMIREMACEIAHDPETPAGCLINSSSASSPASHLLCAPRQSAQSHVHPRSALSPAHHQSVHSPAHLSSASRNILL

SEQ ID NO: 911396 - protein, 114 aa, Homo sapiens; identical to SEQ ID NO: 911395

SEQ ID NO: 911397 - protein, 1783 aa, Homo sapiens [sequence omitted]

SEQ ID NO: 911398 - protein, 359 aa, Homo sapiens
PSFKEFAASASPSFAGWARSQSAGGEGRRSRDLAGARLLALAPVPAAWGRRNPAARRGRSAEEPWAPGAPPSSAARSSRPRGAPRRLSPSPAAAAPRPRRRQTPPRTPPSLPRTPPPRYGRAGPPAPGARVFGGGGGGGGVPPISAERTSQPIQPHLQTQECEPLFGGFSGSFAPGRGQSSGERGGGLASLSRVSRGGDCAMRNNKTRALPTAAEPFCALFRWEPCSPRRRSCAEGDPWRMDPGPGLRSSEMRKVSCEARTRGGARRGAQPPSGSPSRTALDASGAWSERVWYPVLLRQRPEQAPPSRGRESLGCSSLRARKNLGRRCVSRRNDRFRKPASALAFAQRFACRLSWPNTR

SEQ ID NO: 911399 - protein, 1783 aa, Homo sapiens [sequence omitted]

SEQ ID NO: 911400 - protein, 1325 aa, Homo sapiens
MGAGSSTEQRSPEQPPEGSSTPAEPEPSGGGPSAEAAPDTTADPAIAASDPATKLLQKNGQLSTINGVAEQDELSLQEGDLNGQKGALNGQGALNSQEEEEVIVTEVGQRDSEDVSERDSDKEMATKSAVVHDITDDGQEETPEIIEQIPSSESNLEELTQPTESQANDIGFKKVFKFVGFKFTVKKDKTEKPDTVQLLTVKKDEGEGAAGAGDHKDPSLGAGEAASKESEPKQSTEKPEETLKREQSHAEISPPAESGQAVEECKEEGEEKQEKEPSKSAESPTSPVTSETGSTFKKFFTQGWAGWRKKTSFRKPKEDEVEASEKKKEQEPEKVDTEEDGKAEVASEKLTASEQAHPQEPAESAHEPRLSAEYEKVELPSEEQVSGSQGPSEEKPAPLATEVFDEKIEVHQEEVVAEVHVSTVEERTEEQKTEVEETAGSVPAEELVEMDAEPQEAEPAKELVKLKETCVSGEDPTQGADLSPDEKVLSKPPEGVVSEVEMLSSQERMKVQGSPLKKLFTSTGLKKLSGKKQKGKRGGGDEESGEHTQVPADSPDSQEEQKGESSASSPEEPEEITCLEKGLAEVQQDGEAEEGATSDGEKKREGVTPWASFKKMVTPKKRVRRPSESDKEDELDKVKSATLSSTESTASEMQEEMKGSVEEPKPEEPKRKVDTSVSWEALICVGSSKKRARRGSSSDEEGGPKAMGGDHQKADEAGKDKETGTDGILAGSQEHDPGQGSSSPEQAGSPTEGEGVSTWESFKRLVTPRKKSKSKLEEKSEDSIAGSGVEHSTPDTEPGKEESWVSIKKFIPGRRKKRPDGKQEQAPVEDAGPTGANEDDSDVPAVVPLSEYDAVEREKMEAQQAQKSAEQPEQKAATEVSKELSESQVHMMAAAVADGTRAATIIEERSPSWISASVTEPLEQVEAEAALLTEEVLEREVIAEEEPPTVTEPLPENREARGDTVVSEAELTPEAVTAAETAGPLGAEEGTEASAAEETTEMVSAVSQLTDSPDTTEEATPVQEVEGGVPDIEEQERRTQEVLQAVAEKVKEESQLPGTGGPEDVLQPVQRAEAERPEEQAEASGLKKETDVVLKVDAQEAKTEPFTQGKVVGQTTPESFEKAPQVTESIESSELVTTCQAETLAGVKSQEMVMEQAIPPDSVETPTDSETDGSTPVADFDAPGTTQKDEIVEIHEENEVASGTQSGGTEAEAVPAQKERPPAPSSFVFQEETKEQSKMEDTLEHTDKEVSVETVSILSKTEGTQEADQYADEKTKDVPFFEGLEGSIDTGITVSREKVTEVALKGEGTEEAGMAELFQEAELGP

SEQ ID NO: 911401 - protein, 140 aa, Homo sapiens
MGAGSSTEQRSPEQPPEGSSTPAEPEPSGGGPSAEAAPDTTADPAIAASDPATKLLQKNGQLSTINGVAEQDELSLQEGDLNGQKGALNGQGALNSQEEEEVIVTEGKPPLQELEGTQHLQQTLDSAENTLSYCLVVDWC

SEQ ID NO: 911402 - protein, 1685 aa, Homo sapiens [sequence omitted]

SEQ ID NO: 911403 - protein, 1783 aa, Homo sapiens [sequence omitted]

SEQ ID NO: 911404 - protein, 1234 aa, Homo sapiens
MGAGSSTEQRSPEQPPEGSSTPAEPEPSGGGPSAEAAPDTTADPAIAASDPATKLLQKNGQLSTINGVAEQDELSLQEGDLNGQKGALNGQGALNSQEEEEVIVTEVGQRDSEDVSERDSDKEMATKSAVVHDITDDGQEETPEIIEQIPSSESNLEELTQPTESQANDIGFKKVFKFVGFKFTVKKDKTEKPDTVQLLTVKKDEGEGAAGAGDHKDPSLGAGEAASKESEPKQSTEKPEETLKREQSHAEISPPAESGQAVEECKEEGEEKQEKEPSKSAESPTSPVTSETGSTFKKFFTQGWAGWRKKTSFRKPKEDEVEASEKKKEQEPEKVDTEEDGKAEVASEKLTASEQAHPQEPAESAHEPRLSAEYEKVELPSEEQVSGSQGPSEEKPAPLATEVFDEKIEVHQEEVVAEVHVSTVEERTEEQKTEVEETAGSVPAEELVEMDAEPQEAEPAKELVKLKETCVSGEDPTQGADLSPDEKVLSKPPEGVVSEVEMLSSQERMKVQGSPLKKLFTSTGLKKLSGKKQKGKRGGGDEESGEHTQVPADSPDSQEEQKGESSASSPEEPEEITCLEKGLAEVQQDGEAEEGATSDGEKKREGVTPWASFKKMVTPKKRVRRPSESDKEDELDKVKSATLSSTESTASEMQEEMKGSVEEPKPEEPKRKVDTSVSWEALICVGSSKKRARRGSSSDEEGGPKAMGGDHQKADEAGKDKETGTDGILAGSQEHDPGQGSSSPEQAGSPTEGEGVSTWESFKRLVTPRKKSKSKLEEKSEDSIAGSGVEHSTPDTEPGKEESWVSIKKFIPGRRKKRPDGKQEQAPVEDAGPTGANEDDSDVPAVVPLSEYDAVEREKMEAQQAQKSAEQPEQKAATEVSKELSESQVHMMAAAVADGTRAATIIEERSPSWISASVTEPLEQVEAEAALLTEEVLEREVIAEEEPPTVTEPLPENREARGDTVVSEAELTPEAVTAAETAGPLGAEEGTEASAAEETTEMVSAVSQLTDSPDTTEEATPVQEVEGGVPDIEEQERRTQEVLQAVAEKVKEESQLPGTGGPEDVLQPVQRAEAERPEEQAEASGLKKETDVVLKVDAQEAKTEPFTQGKVVGQTTPESFEKAPQVTESIESSELVTTCQAETLAGVKSQEMVMEQAIPPDSVETPTDSETDGSTPVADFDAPGTTQKDEIVEIHEENEVASGTQSGGTEAEAVPAQKERPPAPSSFVFQEETK

SEQ ID NO: 911405 - protein, 113 aa, Homo sapiens
AGTKSVPEDDGHALLAERIEKSLVEPKEDEKGDDVDDPENQNSALADTDASGGLTKESPDTNGPKQKEKEDAQEVELQEGKVHSESDKAITPQAQEELQKQERESAKSELTES

SEQ ID NO: 911406 - protein, 876 aa, Homo sapiens
MGPEALSSLLLLLLVASGDADMKGHFDPAKCRYALGMQDRTIPDSDISASSSWSDSTAARHSRLESSDGDGAWCPAGSVFPKEEEYLQVDLQRLHLVALVGTQGRHAGGLGKEFSRSYRLRYSRDGRRWMGWKDRWGQEVISGNEDPEGVVLKDLGPPMVARLVRFYPRADRVMSVCLRVELYGCLWRDGLLSYTAPVGQTMYLSEAVYLNDSTYDGHTVGGLQYGGLGQLADGVVGLDDFRKSQELRVWPGYDYVGWSNHSFSSGYVEMEFEFDRLRAFQAMQVHCNNMHTLGARLPGGVECRFRRGPAMAWEGEPMRHNLGGNLGDPRARAVSVPLGGRVARFLQCRFLFAGPWLLFSEISFISDVVNNSSPALGGTFPPAPWWPPGPPPTNFSSLELEPRGQQPVAKAEGSPTAILIGCLVAIILLLLLIIALMLWRLHWRRLLSKAERRVLEEELTVHLSVPGDTILINNRPGPREPPPYQEPRPRGNPPHSAPCVPNGSAYSGDYMEPEKPGAPLLPPPPQNSVPHYAEADIVTLQGVTGGNTYAVPALPPGAVGDGPPRVDFPRSRLRFKEKLGEGQFGEVHLCEVDSPQDLVSLDFPLNVRKGHPLLVAVKILRPDATKNARNDFLKEVKIMSRLKDPNIIRLLGVCVQDDPLCMITDYMENGDLNQFLSAHQLEDKAAEGAPGDGQAAQGPTISYPMLLHVAAQIASGMRYLATLNFVHRDLATRNCLVGENFTIKIADFGMSRNLYAGDYYRVQGRAVLPIRWMAWECILMGKFTTASDVWAFGVTLWEVLMLCRAQPFGQLTDEQVIENAGEFFRDQGRQVYLSRPPACPQGLYELMLRCWSRESEQRPPFSQLHRFLAEDALNTV

SEQ ID NO: 911407 - protein, 913 aa, Homo sapiens
MGPEALSSLLLLLLVASGDADMKGHFDPAKCRYALGMQDRTIPDSDISASSSWSDSTAARHSRLESSDGDGAWCPAGSVFPKEEEYLQVDLQRLHLVALVGTQGRHAGGLGKEFSRSYRLRYSRDGRRWMGWKDRWGQEVISGNEDPEGVVLKDLGPPMVARLVRFYPRADRVMSVCLRVELYGCLWRDGLLSYTAPVGQTMYLSEAVYLNDSTYDGHTVGGLQYGGLGQLADGVVGLDDFRKSQELRVWPGYDYVGWSNHSFSSGYVEMEFEFDRLRAFQAMQVHCNNMHTLGARLPGGVECRFRRGPAMAWEGEPMRHNLGGNLGDPRARAVSVPLGGRVARFLQCRFLFAGPWLLFSEISFISDVVNNSSPALGGTFPPAPWWPPGPPPTNFSSLELEPRGQQPVAKAEGSPTAILIGCLVAIILLLLLIIALMLWRLHWRRLLSKAERRVLEEELTVHLSVPGDTILINNRPGPREPPPYQEPRPRGNPPHSAPCVPNGSALLLSNPAYRLLLATYARPPRGPGPPTPAWAKPTNTQAYSGDYMEPEKPGAPLLPPPPQNSVPHYAEADIVTLQGVTGGNTYAVPALPPGAVGDGPPRVDFPRSRLRFKEKLGEGQFGEVHLCEVDSPQDLVSLDFPLNVRKGHPLLVAVKILRPDATKNARNDFLKEVKIMSRLKDPNIIRLLGVCVQDDPLCMITDYMENGDLNQFLSAHQLEDKAAEGAPGDGQAAQGPTISYPMLLHVAAQIASGMRYLATLNFVHRDLATRNCLVGENFTIKIADFGMSRNLYAGDYYRVQGRAVLPIRWMAWECILMGKFTTASDVWAFGVTLWEVLMLCRAQPFGQLTDEQVIENAGEFFRDQGRQVYLSRPPACPQGLYELMLRCWSRESEQRPPFSQLHRFLAEDALNTV

SEQ ID NO: 911408 - protein, 919 aa, Homo sapiens
MGPEALSSLLLLLLVASGDADMKGHFDPAKCRYALGMQDRTIPDSDISASSSWSDSTAARHSRLESSDGDGAWCPAGSVFPKEEEYLQVDLQRLHLVALVGTQGRHAGGLGKEFSRSYRLRYSRDGRRWMGWKDRWGQEVISGNEDPEGVVLKDLGPPMVARLVRFYPRADRVMSVCLRVELYGCLWRDGLLSYTAPVGQTMYLSEAVYLNDSTYDGHTVGGLQYGGLGQLADGVVGLDDFRKSQELRVWPGYDYVGWSNHSFSSGYVEMEFEFDRLRAFQAMQVHCNNMHTLGARLPGGVECRFRRGPAMAWEGEPMRHNLGGNLGDPRARAVSVPLGGRVARFLQCRFLFAGPWLLFSEISFISDVVNNSSPALGGTFPPAPWWPPGPPPTNFSSLELEPRGQQPVAKAEGSPTAILIGCLVAIILLLLLIIALMLWRLHWRRLLSKAERRVLEEELTVHLSVPGDTILINNRPGPREPPPYQEPRPRGNPPHSAPCVPNGSALLLSNPAYRLLLATYARPPRGPGPPTPAWAKPTNTQAYSGDYMEPEKPGAPLLPPPPQNSVPHYAEADIVTLQGVTGGNTYAVPALPPGAVGDGPPRVDFPRSRLRFKEKLGEGQFGEVHLCEVDSPQDLVSLDFPLNVRKGHPLLVAVKILRPDATKNASFSLFSRNDFLKEVKIMSRLKDPNIIRLLGVCVQDDPLCMITDYMENGDLNQFLSAHQLEDKAAEGAPGDGQAAQGPTISYPMLLHVAAQIASGMRYLATLNFVHRDLATRNCLVGENFTIKIADFGMSRNLYAGDYYRVQGRAVLPIRWMAWECILMGKFTTASDVWAFGVTLWEVLMLCRAQPFGQLTDEQVIENAGEFFRDQGRQVYLSRPPACPQGLYELMLRCWSRESEQRPPFSQLHRFLAEDALNTV

SEQ ID NO: 911409 - protein, 913 aa, Homo sapiens; identical to SEQ ID NO: 911407

SEQ ID NO: 911410 - protein, 913 aa, Homo sapiens; identical to SEQ ID NO: 911407

SEQ ID NO: 911411 - protein, 913 aa, Homo sapiens; identical to SEQ ID NO: 911407

SEQ ID NO: 911412 - protein, 913 aa, Homo sapiens; identical to SEQ ID NO: 911407

SEQ ID NO: 911413 - protein, 918 aa, Homo sapiens
MCPSQKRPEALSSLLLLLLVASGDADMKGHFDPAKCRYALGMQDRTIPDSDISASSSWSDSTAARHSRLESSDGDGAWCPAGSVFPKEEEYLQVDLQRLHLVALVGTQGRHAGGLGKEFSRSYRLRYSRDGRRWMGWKDRWGQEVISGNEDPEGVVLKDLGPPMVARLVRFYPRADRVMSVCLRVELYGCLWRDGLLSYTAPVGQTMYLSEAVYLNDSTYDGHTVGGLQYGGLGQLADGVVGLDDFRKSQELRVWPGYDYVGWSNHSFSSGYVEMEFEFDRLRAFQAMQVHCNNMHTLGARLPGGVECRFRRGPAMAWEGEPMRHNLGGNLGDPRARAVSVPLGGRVARFLQCRFLFAGPWLLFSEISFISDVVNNSSPALGGTFPPAPWWPPGPPPTNFSSLELEPRGQQPVAKAEGSPTAILIGCLVAIILLLLLIIALMLWRLHWRRLLSKAERRVLEEELTVHLSVPGDTILINNRPGPREPPPYQEPRPRGNPPHSAPCVPNGSALLLSNPAYRLLLATYARPPRGPGPPTPAWAKPTNTQAYSGDYMEPEKPGAPLLPPPPQNSVPHYAEADIVTLQGVTGGNTYAVPALPPGAVGDGPPRVDFPRSRLRFKEKLGEGQFGEVHLCEVDSPQDLVSLDFPLNVRKGHPLLVAVKILRPDATKNARNDFLKEVKIMSRLKDPNIIRLLGVCVQDDPLCMITDYMENGDLNQFLSAHQLEDKAAEGAPGDGQAAQGPTISYPMLLHVAAQIASGMRYLATLNFVHRDLATRNCLVGENFTIKIADFGMSRNLYAGDYYRVQGRAVLPIRWMAWECILMGKFTTASDVWAFGVTLWEVLMLCRAQPFGQLTDEQVIENAGEFFRDQGRQVYLSRPPACPQGLYELMLRCWSRESEQRPPFSQLHRFLAEDALNTV

SEQ ID NO: 911414 - protein, 913 aa, Homo sapiens; identical to SEQ ID NO: 911407

SEQ ID NO: 911415 - protein, 567 aa, Homo sapiens
AAPTTTKFAAARRRCMAWECILMGKFTTASDVWAFGVTLCEVLMLCRAQPIASVTDEQVIENAGEFFRDQGAEWGGFPRGLGLLLLIIALMLWRLHWRRLLSKAERRVLEEELTVHLSVPGDTILINNRPGPREPPPYQEPRPRGNPPHSAPCVPNGSALLLSNPAYRLLLATYARPPRGPGPPTPAWAKPTNTQAYSGDYMEPEKPGAPLLPPPPQNSVPHYAEADIVTLQGVTGGNTYAVPALPPGAVGDGPPRVDFPRSRLRFKEKLGEGQFGEVHLCEVDSPQDLVSLDFPLNVRKGHPLLVAVKILRPDATKNARNDFLKEVKIMSRLKDPNIIRLLGVCVQDDPLCMITDYMENGDLNQFLSAHQLEDKAAEGAPGDGQAAQGPTISYPMLLHVAAQIASGMRYLATLNFVHRDLATRNCLVGENFTIKIADFGMSRNLYAGDYYRVQGRAVLPIRWMAWECILMGKFTTASDVWAFGVTLWEVLMLCRAQPFGQLTDEQVIENAGEFFRDQGRQVYLSRPPACPQGLYELMLRCWSRESEQRPPFSQLHRFLAEDALNTV

SEQ ID NO: 911416 - protein, 913 aa, Homo sapiens; identical to SEQ ID NO: 911407

SEQ ID NO: 911417 - protein, 383 aa, Homo sapiens
MGPEALSSLLLLLLVASGDADMKGHFDPAKCRYALGMQDRTIPDSDISASSSWSDSTAARHSRLESSDGDGAWCPAGSVFPKEEEYLQVDLQRLHLVALVGTQGRHAGGLGKEFSRSYRLRYSRDGRRWMGWKDRWGQEVISGNEDPEGVVLKDLGPPMVARLVRFYPRADRVMSVCLRVELYGCLWRDGLLSYTAPVGQTMYLSEAVYLNDSTYDGHTVGGLQYGGLGQLADGVVGLDDFRKSQELRVWPGYDYVGWSNHSFSSGYVEMEFEFDRLRAFQAMQVHCNNMHTLGARLPGGVECRFRRGPAMAWEGEPMRHNLGGNLGDPRARAVSVPLGGRVARFLQCRFLFAGPWLLFSEISFISDSAAGRVCAGRPPLHDY

SEQ ID NO: 911418 - protein, 293 aa, Homo sapiens
MALVHLCEVDSPQDLVSLDFPLNVRKGHPLLVAVKILRPDATKNARNDFLKEVKIMSRLKDPNIIRLLGVCVQDDPLCMITDYMENGDLNQFLSAHQLEDKAAEGAPGDGQAAQGPTISYPMLLHVAAQIASGMRYLATLNFVHRDLATRNCLVGENFTIKIADFGMSRNLYAGDYYRVQGRAVLPIRWMAWECILMGKFTTASDVWAFGVTLWEVLMLCRAQPFGQLTDEQVIENAGEFFRDQGRQVYLSRPPACPQGLYELMLRCWSRESEQRPPFSQLHRFLAEDALNTV

SEQ ID NO: 911419 - protein, 941 aa, Homo sapiens
MGPEALSSLLLLLLVASGDADMKGHFDPAKCRYALGMQDRTIPDSDISASSSWSDSTAARHSRLESSDGDGAWCPAGSVFPKEEEYLQVDLQRLHLVALVGTQGRHAGGLGKEFSRSYRLRYSRDGRRWMGWKDRWGQEVISGNEDPEGVVLKDLGPPMVARLVRFYPRADRVMSVCLRVELYGCLWRDGLLSYTAPVGQTMYLSEAVYLNDSTYDGHTVGGLQYGGLGQLADGVVGLDDFRKSQELRVWPGYDYVGWSNHSFSSGYVEMEFEFDRLRAFQAMQVHCNNMHTLGARLPGGVECRFRRGPAMAWEGEPMRHNLGGNLGDPRARAVSVPLGGRVARFLQCRFLFAGPWLLFSEISFISDVVNNSSPALGGTFPPAPWWPPGPPPTNFSSLELEPRGQQPVAKAEGSPTAILIGCLVAIILLLLLIIALMLWRLHWRRLLSKAERRVLEEELTVHLSVPGDTILINNRPGPREPPPYQEPRPRGNPPHSAPCVPNGSALLLSNPAYRLLLATYARPPRGPGPPTPAWAKPTNTQAYSGDYMEPEKPGAPLLPPPPQNSVPHYAEADIVTLQGVTGGNTYAVPALPPGAVGDGPPRVDFPRSRLRFKEKLGEGQFGEVHLCEVDSPQDLVSLDFPLNVRKGHPLLVAVKILRPDATKNARNDFLKEVKIMSRLKDPNIIRLLGVCVQDDPLCMITDYMENGDLNQFLSAHQLEDKAAEGAPGDGQAAQGPTISYPMLLHVAAQIASGMRYLATLNFVHRDLATRNCLVGENFTIKIADFGMSRNLYAGDYYRVQGRAVLPIRWMAWECILMGKFTTASDVWAFGVTLWEVLMLCRAQPFGQLTDEQVIENAGEFFRDQGRQVYLSRPPACPQGLYELMLRCWSRESEQRPPFSQLHRFLAEDALNTCRPPSWSCGWDPLHPPLAIPWGRVGRNIG

SEQ ID NO: 911420 - protein, 189 aa, Homo sapiens
TQARYEAGFKFGRGSYPMLLHVAAQIASGMRYLATLNFVHRDLATRNCLVGENFTIKIADFGMSRNLYAGDYYRVQGRAVLPIRWMAWECILMGKFTTASDVWAFGVTLWEVLMLCRAQPFGQLTDEQVIENAGEFFRDQGRQVYLSRPPACPQGLYELMLRCWSRESEQRPPFSQLHRFLAEDALNTV

SEQ ID NO: 911421 - protein, 913 aa, Homo sapiens; identical to SEQ ID NO: 911407

SEQ ID NO: 911422 - protein, 683 aa, Homo sapiens
MGPEALSSLLLLLLVASGDADMKGHFDPAKCRYALGMQDRTIPDSDISASSSWSDSTAARHSRLESSDGDGAWCPAGSVFPKEEEYLQVDLQRLHLVALVGTQGRHAGGLGKEFSRSYRLRYSRDGRRWMGWKDRWGQEVISGNEDPEGVVLKDLGPPMVARLVRFYPRADRVMSVCLRVELYGCLWRDGLLSYTAPVGQTMYLSEAVYLNDSTYDGHTVGGLQYGGLGQLADGVVGLDDFRKSQELRVWPGYDYVGWSNHSFSSGYVEMEFEFDRLRAFQAMQVHCNNMHTLGARLPGGVECRFRRGPAMAWEGEPMRHNLGGNLGDPRARAVSVPLGGRVARFLQCRFLFAGPWLLFSEISFISDVVNNSSPALGGTFPPAPWWPPGPPPTNFSSLELEPRGQQPVAKAEGSPTAILIGCLVAIILLLLLIIALMLWRLHWRRLLSKAERRVLEEELTVHLSVPGDTILINNRPGPREPPPYQEPRPRGNPPHSAPCVPNGSAYSGDYMEPEKPGAPLLPPPPQNSVPHYAEADIVTLQGVTGGNTYAVPALPPGAVGDGPPRVDFPRSRLRFKEKLGEGQFGEVHLCEVDSPQDLVSLDFPLNVRKGHPLLVAVKILRPDATKNARNDFLKEVKIMSRLKDPNIIRLLGVCVQDDPLCMITDYMENGDLNQFLSAHQLED

SEQ ID NO: 911423 - protein, 516 aa, Homo sapiens
MGPEALSSLLLLLLVASGDADMKGHFDPAKCRYALGMQDRTIPDSDISASSSWSDSTAARHSRLESSDGDGAWCPAGSVFPKEEEYLQVDLQRLHLVALVGTQGRHAGGLGKEFSRSYRLRYSRDGRRWMGWKDRWGQEVISGNEDPEGVVLKDLGPPMVARLVRFYPRADRVMSVCLRVELYGCLWRDGLLSYTAPVGQTMYLSEAVYLNDSTYDGHTVGGLQYGGLGQLADGVVGLDDFRKSQELRVWPGYDYVGWSNHSFSSGYVEMEFEFDRLRAFQAMQVHCNNMHTLGARLPGGVECRFRRGPAMAWEGEPMRHNLGGNLGDPRARAVSVPLGGRVARFLQCRFLFAGPWLLFSEISFISDVVNNSSPALGGTFPPAPWWPPGPPPTNFSSLELEPRGQQPVAKAEGSPTAILIGCLVAIILLLLLIIALMLWRLHWRRLLSKAERRVLEEELTVHLSVPGDTILINNRPGPREPPPYQEPRPRGNPPHSAPCVPNGSGKTCLVPVAPLS

SEQ ID NO: 911424 - protein, 315 aa, Homo sapiens
  misc_feature (251)..(251): Xaa can be any naturally occurring amino acid
MGPEALSSLLLLLLVASGDADMKGHFDPAKCRYALGMQDRTIPDSDISASSSWSDSTAARHSRLESSDGDGAWCPAGSVFPKEEEYLQVDLQRLHLVALVGTQGRHAGGLGKEFSRSYRLRYSRDGRRWMGWKDRWGQEVISGNEDPEGVVLKDLGPPMVARLVRFYPRADRVMSVCLRVELYGCLWRDGLLSYTAPVGQTMYLSEAVYLNDSTYDGHTVGGLQYGGLGQLAEVVESGSPAETLLLALLDXTRYEADLTFFNTLVRKKSKLGDLEGAKALLPVLAKRGLVPNLQTFCNLAIGCHRPKGRLQLLTD

SEQ ID NO: 911425 - protein, 98 aa, Homo sapiens
RLLGVCVQDDPLCMITDYMENGDLNQFLSAHQLEDKAAEGAPGDGQAAQGPTIRYLLTQAGPCSEFPQGISSSPLASAWRKRGERGGGKGERFQEGLG

SEQ ID NO: 911426 - protein, 876 aa, Homo sapiens; identical to SEQ ID NO: 911406

SEQ ID NO: 911427 - protein, 102 aa, Homo sapiens
MSPSVPQVPLPFSAFYTSHLPVSLSFTLCAPVSLLFPSTLCFTPAPPSLVLASCPLDLSAQLSSLLSSLPSSLRSLFPTLFPSRVHFSSFIQFSPFLPKLQS

SEQ ID NO: 911428 - protein, 913 aa, Homo sapiens; identical to SEQ ID NO: 911407

SEQ ID NO: 911429 - protein, 876 aa, Homo sapiens; identical to SEQ ID NO: 911406

SEQ ID NO: 911430 - protein, 913 aa, Homo sapiens; identical to SEQ ID NO: 911407

SEQ ID NO: 911431 - protein, 364 aa, Homo sapiens
MGPEALSSLLLLLLVASGDADMKGHFDPAKCRYALGMQDRTIPDSDISASSSWSDSTAARHSRLESSDGDGAWCPAGSVFPKEEEYLQVDLQRLHLVALVGTQGRHAGGLGKEFSRSYRLRYSRDGRRWMGWKDRWGQEVISGNEDPEGVVLKDLGPPMVARLVRFYPRADRVMSVCLRVELYGCLWRDGLLSYTAPVGQTMYLSEAVYLNDSTYDGHTVGGLQYGGLGQLADGVVGLDDFRKSQELRVWPGYDYVGWSNHSFSSGYVEMEFEFDRLRAFQAMQVHCNNMHTLGARLPGGVECRFRRGPAMAWEGEPMRHNLGGNLGDPRARAVSVPLGGRVARFLQCRSAPTSPEQRPPLCRG

SEQ ID NO: 911432 - protein, 767 aa, Homo sapiens
MGPEALSSLLLLLLVASGDADMKGHFDPAKCRYALGMQDRTIPDSDISASSSWSDSTAARHSRLESSDGDGAWCPAGSVFPKEEEYLQVDLQRLHLVALVGTQGRHAGGLGKEFSRSYRLRYSRDGRRWMGWKDRWGQEVISGNEDPEGVVLKDLGPPMVARLVRFYPRADRVMSVCLRVELYGCLWRDGLLSYTAPVGQTMYLSEAVYLNDSTYDGHTVGGLQYGGLGQLADGVVGLDDFRKSQELRVWPGYDYVGWSNHSFSSGYVEMEFEFDRLRAFQAMQVHCNNMHTLGARLPGGVECRFRRGPAMAWEGEPMRHNLGGNLGDPRARAVSVPLGGRVARFLQCRFLFAGPWLLFSEISFISDVVNNSSPALGGTFPPAPWWPPGPPPTNFSSLELEPRGQQPVAKAEGSPTAILIGCLVAIILLLLLIIALMLWRLHWRRLLSKVLESHPRTRSPGLVGIRPTPLPVSPMALVHLCEVDSPQDLVSLDFPLNVRKGHPLLVAVKILRPDATKNARNDFLKEVKIMSRLKDPNIIRLLGVCVQDDPLCMITDYMENGDLNQFLSAHQLEDKAAEGAPGDGQAAQGPTISYPMLLHVAAQIASGMRYLATLNFVHRDLATRNCLVGENFTIKIADFGMSRNLYAGDYYRVQGRAVLPIRWMAWECILMGKFTTASDVWAFGVTLWEVLMLCRAQPFGQLTDEQVIENAGEFFRDQGRQVYLSRPPACPQGLYELMLRCWSRESEQRPPFSQLHRFLAEDALNTV

SEQ ID NO: 911433 - protein, 347 aa, Homo sapiens
TQARYEAGFKFGRGSGGNTYAVPALPPGAVGDGPPRVDFPRSRLRFKEKLGEGQFGEVHLCEVDSPQDLVSLDFPLNVRKGHPLLVAVKILRPDATKNARNDFLKEVKIMSRLKDPNIIRLLGVCVQDDPLCMITDYMENGDLNQFLSAHQLEDKAAEGAPGDGQAAQGPTISYPMLLHVAAQIASGMRYLATLNFVHRDLATRNCLVGENFTIKIADFGMSRNLYAGDYYRVQGRAVLPIRWMAWECILMGKFTTASDVWAFGVTLWEVLMLCRAQPFGQLTDEQVIENAGEFFRDQGRQVYLSRPPACPQGLYELMLRCWSRESEQRPPFSQLHRFLAEDALNTV

SEQ ID NO: 911434 - protein, 913 aa, Homo sapiens; identical to SEQ ID NO: 911407

SEQ ID NO: 911435 - protein, 913 aa, Homo sapiens; identical to SEQ ID NO: 911407

SEQ ID NO: 911436 - protein, 913 aa, Homo sapiens; identical to SEQ ID NO: 911407

SEQ ID NO: 911437 - protein, 913 aa, Homo sapiens; identical to SEQ ID NO: 911407

SEQ ID NO: 911438 - protein, 293 aa, Homo sapiens
MGPEALSSLLLLLLVASGDADMKGHFDPAKCRYALGMQDRTIPDSDISASSSWSDSTAARHSRLESSDGDGAWCPAGSVFPKEEEYLQVDLQRLHLVALVGTQGRHAGGLGKEFSRSYRLRYSRDGRRWMGWKDRWGQEVISGNEDPEGVVLKDLGPPMVARLVRFYPRADRVMSVCLRVELYGCLWRDGLLSYTAPVGQTMYLSEAVYLNDSTYDGHTVGGLQYGGLGQLADGVVGLDDFRKSQELRVWPGYDYVGWSNHSFSTPPSPETLDLGVAPPQPSVTPTSHLQSCS

SEQ ID NO: 911439 - protein, 1026 aa, Homo sapiens
RARQPGSPRPPPAPRWPGLSRPRFMAAHEWDWFQREELIGQISDIRVQNLQVERENVQKRTFTRWINLHLEKCNPPLEVKDLFVDIQDGKILMALLEVLSGRNLLHEYKSSSHRIFRLNNIAKALKFLEDSNVKLVSIDAAEIADGNPSLVLGLIWNIILFFQIKELTGNLSRNSPSSSLSPGSGGTDSDSSFPPTPTAERSVAISVKDQRKAIKALLAWVQRKTRKYGVAVQDFAGSWRSGLAFLAVIKAIDPSLVDMKQALENSTRENLEKAFSIAQDALHIPRLLEPEDIMVDTPDEQSIMTYVAQFLERFPELEAEDIFDSDKEVPIESTFVRIKETPSEQESKVFVLTENGERTYTVNHETSHPPPSKVFVCDKPESMKEFRLDGVSSHALSDSSTEFMHQIIDQVLQGGPGKTSDISEPSPESSILSSRKENGRSNSLPIKKTVHFEADTYKDPFCSKNLSLCFEGSPRVAKESLRQDGHVLAVEVAEEKEQKQESSKIPESSSDKVAGDIFLVEGTNNNSQSSSCNGALESTARHDEESHSLSPPGENTVMADSFQIKVNLMTVEALEEGDYFEAIPLKASKFNSDLIDFASTSQAFNKVPSPHETKPDEDAEAFENHAEKLGKRSIKSAHKKKDSPEPQVKMDKHEPHQDSGEEAEGCPSAPEETPVDKKPEVHEKAKRKSTRPHYEEEGEDDDLQGVGEELSSSPPSSCVSLETLGSHSEEGLDFKPSPPLSKVSVIPHDLFYFPHYEVPLAAVLEAYVEDPEDLKNEEMDLEEPEGYMPDLDSREEEADGSQSSSSSSVPGESLPSASDQVLYLSRGGVGTTPASEPAPLAPHEDHQQRETKENDPMDSHQSQESPNLENIANPLEENVTKESISSKKKEKRKHVDHVESSLFVAPGSVQSSDDLEEDSSDYSIPSRTSHSDSSIYLRRHTHRSSESDHFSYVQLRNAADLDDRRNRILTRKANSSGEAMSLGSHSPQSDSLTQLVQQPDMMYFILFLWLLVYCLLLFPQLDVSRL

SEQ ID NO: 911440 - protein, 660 aa, Homo sapiens
RRNFAELKIKRLRKKFAQKMLRKARRKLIYEKAKHYHKEYIIDQVLQGGPGKTSDISEPSPESSILSSRKENGRSNSLPIKKTVHFEADTYKDPFCSKNLSLCFEGSPRVAKESLRQDGHVLAVEVAEEKEQKQESSKIPESSSDKVAGDIFLVEGTNNNSQSSSCNGALESTARHDEESHSLSPPGENTVMADSFQIKVNLMTVEALEEGDYFEAIPLKASKFNSDLIDFASTSQAFNKVPSPHETKPDEDAEAFENHAEKLGKRSIKSAHKKKDSPEPQVKMDKHEPHQDSGEEAEGCPSAPEETPVDKKPEVHEKAKRKSTRPHYEEEGEDDDLQGVGEELSSSPPSSCVSLETLGSHSEEGLDFKPSPPLSKVSVIPHDLFYFPHYEVPLAAVLEAYVEDPEDLKNEEMDLEEPEGYMPDLDSREEEADGSQSSSSSSVPGESLPSASDQVLYLSRGGVGTTPASEPAPLAPHEDHQQRETKENDPMDSHQSQESPNLENIANPLEENVTKESISSKKKEKRKHVDHVESSLFVAPGSVQSSDDLEEDSSDYSIPSRTSHSDSSIYLRRHTHRSSESDHFSYVQLRNAADLDDRRNRILTRKANSSGEAMSLGSHSPQSDSLTQLVQQPDMMYFILFLWLLVYCLLLFPQLDVSRL

SEQ ID NO: 911441 - protein, 1028 aa, Homo sapiens
RARQPGSPRPPPAPRWPGLSRPRFMAAHEWDWFQREELIGQISDIRVQNLQVERENVQKRTFTRWINLHLEKCNPPLEVKDLFVDIQDGKILMALLEVLSGRNLLHEYKSSSHRIFRLNNIAKALKFLEDSNVKLVSIDAAEIADGNPSLVLGLIWNIILFFQIKELTGNLSRNSPSSSLSPGSGGTDSDSSFPPTPTAERSVAISVKDQRKAIKALLAWVQRKTRKYGVAVQDFAGSWRSGLAFLAVIKAIDPSLVDMKQALENSTRENLEKAFSIAQDALHIPRLLEPEDIMVDTPDEQSIMTYVAQFLERFPELEAEDIFDSDKEVPIESTFVRIKETPSEQESKVFVLTENGERTYTVNHETSHPPPSKVFVCDKPESMKEFRLDGVSSHALSDSSTEFMHQIIDQVLQGGPGKTSDISEPSPESSILSSRKENGRSNSLPIKKTVHFEADTYKDPFCSKNLSLCFEGSPRVAKESLRQDGHVLAVEVAEEKEQKQESSKIPESSSDKVAGDIFLVEGTNNNSQSSSCNGALESTARHDEESHSLSPPGENTVMADSFQIKVNLMTVEALEEGDYFEAIPLKASKFNSDLIDFASTSQAFNKVPSPHETKPDEDAEAFENHAEKLGKRSIKSAHKKKDSPEPQVKMDKHEPHQDSGEEAEGCPSAPEETPVDKKPEVHEKAKRKSTRPHYEEEGEDDDLQGVGEELSSSPPSSCVSLETLGSHSEEGLDFKPSPPLSKVSVIPHDLFYFPHYEVPLAAVLEAYVEDPEDLKNEEMDLEEPEGYMPDLDSREEEADGSQSSSSSSVPGESLPSASDQVLYLSRGGVGTTPASEPAPLAPHEDHQQRETKENDPMDSHQSQESPNLENIANPLEENVTKESISSKKKEKRKHVDHVESSLFVAPGSVQSSDDLEEDSSDYSIPSRTSHSDSSIYLRRHTHRSSESDHFSYVQLRNAADLDDRRNRILTRYSTQKLTELILQFYGIRADMKRESKHARMSMKVFLAVGELLAWPNVAELLETCPFKT

SEQ ID NO: 911442 - protein, 1405 aa, Homo sapiens
MSPLICYSLSLLFFFFWCGTFFNNFLRKRTWEVNMVVNILRFLHDLRCLYSALNRNVAEHRMQVENNTLPEPLPSVLVEISDAILIPVPLYVTSGFFIHPSWKHLRSLYSWCLNCHDGVVSRVLNLVLGLHGKFLKFSCDYLHSFFLDHLLFQCWTLPYTQADALIFFIFSIFRLCFCSAFRKNYSFLSSQSECFIEFLFSKLIKPLVIILSLFYSVLLLMRGCRFCLSVDVNDCGLRGSLFCSLCCPHFLWVLFILVVSVSIFHVVNFSQIYGDPMDLFMFLRVRHPKADWKLCVPTGELFHQGHQVGTWTHHWRTLPVSICTCFLWGSFCFLRDIPTTLLPGKRAYTGLLAYAEYSCGFKNGVPSGQKSPGALGLTGKGHLLPLPPDIPSSELGQCSRNNEKARFELLIALFSQVPLCNAQTVGPYPETLVYTQCARVLTAEQAASSPVSIYTFIKLLQPLLCLVSLSWSCSDFSMEYGAQWSSGCMGRTGDLRANKCPGLQPHVSPHPSYSNPQASPGGHRASLLTTLWPPLCRHVVLGSPSLLTFPSVPFLHKEVASSCLLFSSVFCVHGCINITFIPLLLFSWGFMREETGSCVQYTILIHKPHLSYLTGCLGGLLLCLVCERALSPAGTAATSILLSCGLLSDFVYCCAKCRRGIHSMAKLCLNAMISYYLPSFPLVLLPIVSEMILDLLPPQRYSLCGGLGSRFSLPPLLHLRNRKLARHSSGSHLKSQPFGRPRQEDRLRPGIQDQPAQHSKTPSLQKVKFKLVVAYTYSPSYSEDEAGELFEAHDFEVTVSYDPAILLHLSDRARRCLKNKETSSPHRCLPANKQRGFSVERGQHCLVEVCIFAIVDDQVVGASWSDLTFVGRCSPTKAQKQDTLAAPRAATQNMGVSISEVQHSSPHPLPMQCMPALYQDGTEEKAEALGAACVVDLCKSQTVRKPQELCKRSVPHLRDEKLKIRKRKRLVALLVDDLQIAIFIPSEVYYKTTASAAEANLPTHHRWGLRTPWSSSLQQKSELASTDVSYENVRIHHGCFGEELFSFRGHAIGRQLYDKNAFTCAPIFLTLQKDFRSLWSFETRPLSPFCLETPSWGSPLHSPPVFLCGALRPQVPEMGCVGASSQPGISGPSQPGNETAQSPVRPSCVISPSPHCIITADTAFGEDLTSWASSCHLEPSPHSRLFCPIQLMRGLPYDKVQDLGWVVEGWELEWALLCFCAENCYGSFPLTASVGEPNMRHKHPLELHRSCALLSSGISLENSSQQLMEVSPVHRLCMDFAQVPFPSCADTCIFGLHVSTCPLHSDFFFKRQHLTLSPRLEYSGVITAHCSLKLLGSGNPPASASRVAGSTGACHHAHLIFLSFIDTGLTVAQAGLELLASSDPPALAYQNAGIIGMNHCAWPSL

SEQ ID NO: 911443 - protein, 1539 aa, Homo sapiens
MIFKPDRQGPAGPYKSHEEWLGWNQLPAVLELGGGVASCPLKLWCTPPSECMSWNGHSLWSLVMGFLKRLSGQHSGSRPAQEVCERREASLAPLPPVFLSPRLPLLSPPCQDSGPWGVSALVPPPLALPFRKHVPGNPYKITNESGGDSVSILSSWTQRAEQLDQDHIADQGQTCSETQAPDALSRAVTPCRKLPLGTPMSCEKDKMTRIKMSTFKQNQNSYSPSSSSPIPSEIPLTAATACHLTYQRRSYSRNHVSFFASQGLAHFKQWVSSLQNSSMAKKNLHSTSESMTAKIWPLNQSDYSLSPLLKEFQPSNQKAAGSLEDSIWKAKSPMENELINELPGINEKLKGTDNKDYVIVYNSGHHAVLAYIRCSKSLGRANPNVNHFILWVQTLFRKTSARYFSHLLQLVILFKTSTGKMPESHLVQVGSQLIFCKGKEKSHLSIGFYGRSWIKKMDVEVCRTNHPIACKFFLNEKKYNKAFNKNQQSPKSRCLEVTTFNSLMFAFLHNVLTLYFLIKKHLLACCHSRGGFHSYHTVLWFSSIARSHHLVHFYEVLTLPGALKDCGLPSPAVCYGYMSFLLQMSPLICYSLSLLFFFFWCGTFFNNFLRKRTWEVNMVVNILRFLHDLRCLYSALNRNVAEHENDRWKIIPSPSPSQACWLRFLMPFYSRTFICDLGFFIHPSWKHLRSLYSCVLNCHDGVVSRVLNLVLGLHGKFLKFSCDYLHSFFLDHLLFQCWTLPYTQADALIFFIFSIFRLCFCSAFRKNYSFLSSQSECFIEFLFSKLIKPLVIILSLFYSVLLLMRGCRFCLSVDVNDCGLRGSLFCSLCCPHFLRVLFILVVSVSIFHVVNFSQIYGDPMDLFMFLRVRHPKADWKLCVPTGELFHQGHQVGTWTHHWRTLPVSICTCFLWGSFCFLRDIPTTLLPGKRAYTGLLAYAEYSCGFKNGVPSGQKSPGALGLTGKGHLLPLPPDIPSSELGQCSRNNEKARFELLIALFSQVPLCNAQTVGPYPETLVYTQCARVLTAEQAASSPVSIYTFIKLLQPLLCLVSLSWSCSDFSMEYGAQWSSGCMGRTGDLRANKCPGLQPHVSPHPSYSNPQASPGGHRASLLTTLWPPLCRHVVLGSPSLLTFPSVPFLHKEVASSCLLFSSVFCVHGCINITFIPLLLFSWGFMREETGSCVQYTILIHKPHLSYLTGCLGGLLLCLVCERALSPAGTAATSILLSCGLLSDFVECCAKCRRGIHSMAKLCLNAMISYYLPSFPLVLLPIVSEMILDLLPPQRYSLCGGLGSRFSLPPLLHLRNRKLARHSSGSHLKSQPFGRPRQEDRLRPGIQDQPAQHSKTPSLQKVKFKLVVAYTYSPSYSEDEAGELFEAHDFEVTVSYDPAILLHLSDRARRCLKNKETSSPHRCLPANKQRGFSVERGQHCLVEVCIIAIVDDQVVGASWSDLTFVGRCSPTKAQKQDTLAAPRAATQNMGVSISEVQHSSPHPLPMQCMPALYQDGTEGRQRHWGQPVLLISVSHRLFENLRNYVSVQCLI

SEQ ID NO: 911444 - protein, 1184 aa, Homo sapiens
MYQATLIKSQMSQEGTQGASCLAGPRETEQLDQDHIADQGQTCSETQAPDALSRAVTPCRKLPLGTPMSREKDKMTRIKMSTFKQNQNSYSPSSSSPIPSEIPLTAATACHLTYQRRSYSRNHVSFFASQGLAHFKQWVSSLQNSSMAKKNLHSTSESMTAKIWPLNQSDYSLSPLLKEFQPSNQKAAGSLEDSIWKAKSPMENELINELPGINEKLKGTDNKDYVIVYNSGHHAVLAYIRCSKSLGRANPNVNHFILWVQTLFRKTSARYFSHLLQLVILFKTSTGKMPESHLVQVGSQLIFCKGKEKSHLSIGFYGRSWIKKMDVEVCRTNHPIACKFFLNYKKYNKAFNKNQQSPKSRCLEVTTFNSLMFAFLHNVLTLYFLIKKHLLACCHSRGGFHSYHTVLWFSSIARSHHLVHFYEVLTLPGALKDCGLPSPAVCYGYMSFLLQMSPLICYSLSLLFFFFWCGTFFNNFLRKRTWEVNMVVNILRFLHDLRCLYSALNRNVAEHENDRWKIIPSPSPSQACWLRFLMPFCSRTFICDLGFFIHPSWKHLRSLYSCVLNCHDGVVSRVLNLVLGLHGKFLKFSCDYLHSFFLDHLLFQCWTLPYTQADALIFFIFSIFRLCFCSAFRKNYSFLSSQSECFIEFLFSKLIKPLVIILSLFYSVLLLMRGCRFCLSVDVNDCGLRGSLFCSLCCPHFLSVLFILVVSVSIFHVVNFSQIYGDPMDLFMFLRVRHPKADWKLCVPTGELFHQGHQVGTWTHHWRTLPVSICTCFLWGSFCFLRDIPTTLLPGKRAYTGLLAYAEYSCGFKNGVPSGQKSPSALGLTGKGHLLPLPPDIPSSELGQCSRNNEKARFELLIALFSQVPLCNAQTVGPYPETLVYTQCARVLTAEQAASSPVSIYTFIKLLQPLLCLVSLSWSCSDFSMEYGAQWSSGCMGRTGDLRANKCPGLQPHVSPHPSYSNPQASPGGHRASLLTTLWPPLCRHVVLGSPSLLTFPSVPFLHKEVASSCLLFSSVFCVHGCINITFIPLLLFSWGFMREETGSCVQYTILIHKPHLSYLTGCLGGLLLCLVCERALSPAGTAATSILLSCGLLSDFVECCAKCRRGIHSMAKLCLNAMISYYLPSFPLVLLPIVSEMILDLLPPQRYSLCGGLGSRFSLPPLLHLRNRKLARHSSGSHL

SEQ ID NO: 911445 - protein, 1323 aa, Homo sapiens
MSDSRTFICDLGFFIHPSWKHLRSLYSCVLNCHDGVVSRVLNLVLGLHGKFLKFSCDYLHSFFLDHLLFQCWTLPYTQADAANIFYLFYFSSMFLICFQEELFIFIFLNLNVLFEFLFSKLIKPLVIILSLFYSVLLLMRGCRFCLSVDVNDCGLRGSLFCSLCCPHFLWVLFILVVSVSIFHVVNFSQIYGDPMDLFMFLRVRHPKADWKLCVPTGELFHQGHQVGTWTHHWRTLPVSICTCFLWGSFCFLRDIPTTLLPGKRAYTGLLAYAEYSCGFKNGVPSGQKSPGALGLTGKGHLLPLPPDIPSSELGQCSRNNEKARFELLIALFSQVPLCNAQTVGPYPETLVYTQCARVLTAEQAASSPVSIYTFIKLLQPLLCLVSLSWSCSDFSMEYGAQWSSGCMGRTGDLRANKCPGLQPHVSPHPSYSNPQASPGGHRASLLTTLWPPLCRHVVLGSPSLLTFPSVPFLHKEVASSCLLFSSVFCVHGCINITFIPLLLFSWGFMREETGSCVQYTILIHKPHLSYLTGCLGGLLLCLVCERALSPAGTAATSILLSCGLLSDFVYCCAKCRRGIHSMAKLCLNAMISYYLPSFPLVLLPIVSEMILDLLPPQRYSLCGGLGSRFSLPPLLHLRNRKLARHSSGSHLKSQPFGRPRQEDRLRPGIQDQPAQHSKTPSLQKVKFKLVVAYTYSPSYSEDEAGELFEAHDFEVTVSYDPAILLHLSDRARRCLKNKETSSPHRCLPANKQRGFSVERGQHCLVEVCIFAIVDDQVVGASWSDLTFVGRCSPTKAQKQDTLAAPRAATQNMGVSISEVQHSSPHPLPMQCMPALYQDGTEEKAEALGAACVVDLCKSQTVRKPQELCKRSVPHLRDEKLKIRKRKRLVALLVDDLQIAIFIPSEVYYKTTASAAEANLPTHHRWGLRTPWSSSLQQKSELASTDVSYENVRIHHGCFGEELFSFRGHAIGRQLYDKNAFTCAPIFLTLQKDFRSLWSFETRPLSPFCLETPSWGSPLHSPPVFLCGALRPQVPEMGCVGASSQPGISGPSQPGNETAQSPVRPSCVISPSPHCIITADTAFGEDLTSWASSCHLEPSPHSRLFCPIQLMRGLPYDKVQDLGWVVEGWELEWALLCFCAENCYGSFPLTASVGEPNMRHKHPLELHRSCALLSSGISLENSSQQLMEVSPVHRLCMDFAQVPFPSCADTCIFGLHVSTCPLHSDFFFKRQHLTLSPRLEYSGVITAHCSLKLLGSGNPPASASRVAGSTGACHHAHLIFLSFIDTGLTVAQAGLELLASSDPPALAYQNAGIIGMNHCAWPSL

SEQ ID NO: 911446 - protein, 886 aa, Homo sapiens
MASPTLSPDSSSQEALSAPTCSPTSDSENLSPDELELLAKLEEQNRLLEADSKSMRSMNGSRRNSGSSLVSSSSASSNLSHLEEDTWILWGRIANEWEEWRRRKEKLLKELIRKGIPHHFRAIVWQLLCSATDMPVKNQYSELLKMSSPCEKLIRRDIARTYPEHEFFKGQDSLGQEVLFNVMKAYSLVDREVGYCQGSAFIVGLLLMQMPEEEAFCVFVRLMQEYRLRELFKPSMAELGLCIYQFEYMLQEQLPDLNTHFRSQSFHTSMYASSWFLTLFLTTFPLPVATRVFDIFMYEGLEIVFRVGLALLQVNQAELMQLDMEGMSQYFQRVIPHQFDSCPDKLVLKAYQVKYNPKKMKRLEKEYAAMKSKEMEEQIEIKRLRTENRLLKQRIETLEKGQVTRAQEAEENYVIKRELAVVRQQCSSAAEDLQKAQSTIRQLQEQQENPRLTEDFVSHLETELEQSRLRETETLGALREMQDKVLDMEKRNSSLPDENNVAQLQEELKALKVREGQAVASTRELKLQLQELSDTWQAHLARGGRWKESPRKLVVGELQDELMSVRLREAQALAEGRELRQRVVELETQDHIHRNLLNRVEAERAALQEKLQYLAAQNKGLQTQLSESRRKQAEAECKSKEEVMAVRLREADSMAAVAEMRQRIAELEIQREEGRIQGQLNHSDSSQYIRELKDQIEELKAEVRLLKGPPPFEDPLAFDGLSLARHLDEDSLPSSDEELLGVGVGAALQDALYPLSPRDARFFRRLERPAKDSEGSSDSDADELAAPYSQGLDTEAMPSAPGVRRPQPRGAPGQSAFCSPPAALDKLRALCGSATPKARPGEAAQRVGSDLGSSGPRGRLSLPSSVYPSWSVPLRALWRSRGAWRG

SEQ ID NO: 911447 - protein, 741 aa, Homo sapiens
MASPTLSPDSSSQEALSAPTCSPTSDSENLSPDELELLAKLEEQNRLLEADSKSMRSMNGSRRNSGSSLVSSSSASSNLSHLEEDTWILWGRIANEWEEWRRRKEKLLKELIRKGIPHHFRAIVWQLLCSATDMPVKNQYSELLKMSSPCEKLIRRDIARTYPEHEFFKGQDSLGQEVLFNVMKAYSLVDREVGYCQGSAFIVGLLLMQMPEEEAFCVFVRLMQEYRLRELFKPSMAELGLCIYQFEYMLQEQLPDLNTHFRSQSFHTSMYASSWFLTLFLTTFPLPVATRVFDIFMYEGLEIVFRVGLALLQVNQAELMQLDMEGMSQYFQRVIPHQFDSCPDKLVLKAYQVKYNPKKMKRLEKEYAAMKSKEMEEQIEIKRLRTENRLLKQRIETLEKESAALADRLIQGQVTRAQEAEENYVIKRELAVVRQQCSSAAEDLQKAQSTIRQLQEQQENPRLTEDFVSHLETELEQSRLRETETLGALREMQDKVLDMEKRNSSLPDENNVAQLQEELKALKVREGQAVASTRELKLQLQELSDTWQDQIEELKAEVRLLKGPPPFEDPLAFDGLSLARHLDEDSLPSSDEELLGVGVGAALQDALYPLSPRDARFFRRLERPAKDSEGSSDSDADELAAPYSQGLDNEAMPSAPGVRRPQPRGAPGQSAFCSPPAALDKLRALCGSATPKARPGEAAQRVGSDLGSSGPRGRLSLPSSVYPSWSVPLRALWRSRGAWRG

SEQ ID NO: 911448 - protein, 151 aa, Homo sapiens
MASPTLSPDSSSQEALSAPTCSPTSDSENLSPDELELLAKLEEQNRLLEADSKSMRSMNVRLLKGPPPFEDPLAFDGLSLARHLDEDSLPSSDEELLGVGVGAALQDALYPLSPRDARFFRRLERPAKDSEGSSDSDADELAAPYSQGLDN

SEQ ID NO: 911449 - protein, 338 aa, Homo sapiens [sequence omitted]

SEQ ID NO: 911450 - protein, 139 aa, Homo sapiens
YTHFIAEELQPGSTGESAPRGPCQGGRPPPSEPPKAELRRKRGWGRLSCRKGHAAALLPQALTPLFPQRNSSLPDENNVAQLQEELKALKVREGQAVASTRELKLQLQELSDTWQVRAGWAPAGRAPPRAIPSGFLGGG

SEQ ID NO: 911451 - protein, 730 aa, Homo sapiens
MASPTLSPDSSSQEALSAPTCSPTSDSENLSPDELELLAKLEEQNRLLEADSKSMRSMNGSRRNSGSSLVSSSSASSNLSHLEEDTWILWGRIANEWEEWRRRKEKLLKELIRKGIPHHFRAIVWQLLCSATDMPVKNQYSELLKMSSPCEKLIRRDIARTYPEHEFFKGQDSLGQEVLFNVMKAYSLVDREVGYCQGSAFIVGLLLMQMPEEEAFCVFVRLMQEYRLRELFKPSMAELGLCIYQFEYMLQEQLPDLNTHFRSQSFHTSMYASSWFLTLFLTTFPLPVATRVFDIFMYEGLEIVFRVGLALLQVNQAELMQLDMEGMSQYFQRVIPHQFDSCPDKLVLKAYQVKYNPKKMKRLEKEYAAMKSKEMEEQIEIKRLRTENRLLKQRIETLEKGQVTRAQEAEENYVIKRELAVVRQQCSSAAEDLQKAQSTIRQLQEQQENPRLTEDFVSHLETELEQSRLRETETLGALREMQDKVLDMEKRNSSLPDENNVAQLQEELKALKVREGQAVASTRELKLQLQELSDTWQDQIEELKAEVRLLKGPPPFEDPLAFDGLSLARHLDEDSLPSSDEELLGVGVGAALQDALYPLSPRDARFFRRLERPAKDSEGSSDSDADELAAPYSQGLDNEAMPSAPGVRRPQPRGAPGQSAFCSPPAALDKLRALCGSATPKARPGEAAQRVGSDLGSSGPRGRLSLPSSVYPSWSVPLRALWRSRGAWRG

SEQ ID NO: 911452 - protein, 886 aa, Homo sapiens; identical to SEQ ID NO: 911446

SEQ ID NO: 911453 - protein, 509 aa, Homo sapiens
MASPTLSPDSSSQEALSAPTCSPTSDSENLSPDELELLAKLEEQNRLLEADSKSMRSMNGSRRNSGSSLVSSSSASSNLSHLEEDTWILWGRIANEWEEWRRRKEKLLKELIRKGIPHHFRAIVWQLLCSATDMPVKNQYSELLKMSSPCEKLIRRDIARTYPEHEFFKGQDSLGQEVLFNVMKAYSLVDREVGYCQGSAFIVGLLLMQMPEEEAFCVFVRLMQEYRLRELFKPSMAELGLCIYQFEYMLQEQLPDLNTHFRSQSFHTSMYASSWFLTLFLTTFPLPVATRVFDIFMYEGLEIVFRVGLALLQVNQAELMQLDMEGMSQYFQRVIPHQFDSCPDKLVLKAYQVKYNPKKMKRLEKEYAAMKSKEMEEQIEIKRLRTENRLLKQRIETLEKGQVTRAQEAEENYVIKRELAVVRQQCSSAAEDLQKAQSTIRQLQEQQENPRLTEDFVSHLETELEQSRLRETETLGALREMQDKVLDMEKRNSSLPDENNVAQLQEDLQ

SEQ ID NO: 911454 - protein, 482 aa, Homo sapiens
SWNRDHWSLSGRSSWNGSTATQPGVGLVGAKVQGDRGGRSLERRSASLPLAGLAPVAGAHPAAAADSSRARGSLRGRGSRTCAGDQRKVPARLGGQQGPGRGCGCRRGPHRATFLPGGCRWKMSQERPTFYRQELNKTIWEVPERYQNLSPVGSGAYGSVCAAFDTKTGLRVAVKKLSRPFQSIIHAKRTYRELRLLKHMKHENVIGLLDVFTPARSLEEFNDVYLVTHLMGADLNNIVKCQKLTDDHVQFLIYQILRGLKYIHSADIIHRDLKPSNLAVNEDCELKILDFGLARHTDDEMTGYVATRWYRAPEIMLNWMHYNQTVDIWSVGCIMAELLTGRTLFPGTDHINQLQQIMRLTGTPPAYLINRMPSHEARNYIQSLTQMPKMNFANVFIGANPLAVDLLEKMLVLDSDKRITAAQALAHAYFAQYHDPDDEPVADPYDQSFESRDLLIDEWKSLTYDEVISFVPPPLDQEEMES

SEQ ID NO: 911455 - protein, 419 aa, Homo sapiens
SWNRDHWSLSGRSSWNGSTATQPGVGLVGAKVQGDRGGRSLERRSASLPLAGLAPVAGAHPAAAADSSRARGSLRGRGSRTCAGDQRKVPARLGGQQGPGRGCGCRRGPHRATFLPGGCRWKMSQERPTFYRQELNKTIWEVPERYQNLSPVGSGAYGSVCAAFDTKTGLRVAVKKLSRPFQSIIHAKRTYRELRLLKHMKHENVIGLLDVFTPARSLEEFNDVYLVTHLMGADLNNIVKCQKLTDDHVQFLIYQILRGLKYIHSADIIHRDLKPSNLAVNEDCELKILDFGLARHTDDEMTGYVATRWYRAPEIMLNWMHYNQTVDIWSVGCIMAELLTGRTLFPGTDHIDQLKLILRLVGTPGAELLKKISSESARNYIQSLTQMPKMNFANVFIGANPLGKLTIYPHLMDIELVMI

SEQ ID NO: 911456 - protein, 482 aa, Homo sapiens
SWNRDHWSLSGRSSWNGSTATQPGVGLVGAKVQGDRGGRSLERRSASLPLAGLAPVAGAHPAAAADSSRARGSLRGRGSRTCAGDQRKVPARLGGQQGPGRGCGCRRGPHRATFLPGGCRWKMSQERPTFYRQELNKTIWEVPERYQNLSPVGSGAYGSVCAAFDTKTGLRVAVKKLSRPFQSIIHAKRTYRELRLLKHMKHENVIGLLDVFTPARSLEEFNDVYLVTHLMGADLNNIVKCQKLTDDHVQFLIYQILRGLKYIHSADIIHRDLKPSNLAVNEDCELKILDFGLARHTDDEMTGYVATRWYRAPEIMLNWMHYNQTVDIWSVGCIMAELLTGRTLFPGTDHIDQLKLILRLVGTPGAELLKKISSESARNYIQSLTQMPKMNFANVFIGANPLAVDLLEKMLVLDSDKRITAAQALAHAYFAQYHDPDDEPVADPYDQSFESRDLLIDEWKSLTYDEVISFVPPPLDQEEMES

SEQ ID NO: 911457 - protein, 482 aa, Homo sapiens; identical to SEQ ID NO: 911456

SEQ ID NO: 911458 - protein, 482 aa, Homo sapiens; identical to SEQ ID NO: 911456

SEQ ID NO: 911459 - protein, 482 aa, Homo sapiens; identical to SEQ ID NO: 911456

SEQ ID NO: 911460 - protein, 482 aa, Homo sapiens; identical to SEQ ID NO: 911456

SEQ ID NO: 911461 - protein, 482 aa, Homo sapiens; identical to SEQ ID NO: 911456

SEQ ID NO: 911462 - protein, 360 aa, Homo sapiens
MSQERPTFYRQELNKTIWEVPERYQNLSPVGSGAYGSVCAAFDTKTGLRVAVKKLSRPFQSIIHAKRTYRELRLLKHMKHENVIGLLDVFTPARSLEEFNDVYLVTHLMGADLNNIVKCQKLTDDHVQFLIYQILRGLKYIHSADIIHRDLKPSNLAVNEDCELKILDFGLARHTDDEMTGYVATRWYRAPEIMLNWMHYNQTVDIWSVGCIMAELLTGRTLFPGTDHIDQLKLILRLVGTPGAELLKKISSESARNYIQSLTQMPKMNFANVFIGANPLAVDLLEKMLVLDSDKRITAAQALAHAYFAQYHDPDDEPVADPYDQSFESRDLLIDEWKSLTYDEVISFVPPPLDQEEMES

SEQ ID NO: 911463 - protein, 482 aa, Homo sapiens; identical to SEQ ID NO: 911456

SEQ ID NO: 911464 - protein, 482 aa, Homo sapiens; identical to SEQ ID NO: 911456

SEQ ID NO: 911465 - protein, 111 aa, Homo sapiens
DCSELAAVRPQVHSSRGWASSRLMIQALTLALGAPKDNNIPCCEPWGLTAQNLLLSCCGWMEGWMDGWMAVDGRGCAVPCIPKPGGSVLLSMTACSRNICVPICVDKNIYT

SEQ ID NO: 911466 - protein, 580 aa, Homo sapiens
MEVPQPEPAPGSALSPAGVCGGAQRPGHLPGLLLGSHGLLGSPVRAAASSPVTTLTQTMHDLAGLGSETPKSQVGTLLFRSRSRLTHLSLSRRASESSLSSESSESSDAGLCMDSPSPMDPHMAEQTFEQAIQAASRIIRNEQFAIRRFQSMPVRLLGHSPVLRNITNSQAPDGRRKSEAGSGAASSSGEDKENDGFVFKMPWKPTHPSSTHALAEWASRREAFAQRPSSAPDLMCLSPDRKMEVEELSPLALGRFSLTPAEGDTEEDDGFVDILESDLKDDDAVPPGMESLISAPLVKTLEKEEEKDLVMYSKCQRLFRSPSMPCSVIRPILKRLERPQDRDTPVQNKRRRSVTPPEEQQEAEEPKARVLRSKSLCHDEIENLLDSDHRELIGDYSKAFLLQTVDGKHQDLKYISPETMVALLTGKFSNIVDKFVIVDCRYPYEYEGGHIKTAVNLPLERDAESFLLKSPIAPCSLDKRVILIFHCEFSSERGPRMCRFIRERDRAVNDYPSLYYPEMYILKGGYKEFFPQHPNFCEPQDYRPMNHEAFKDELKTFRLKTRSWAGERSRRELCSRLQDQ

SEQ ID NO: 911467 - protein, 601 aa, Homo sapiens
MEVPQPEPAPGSALSPAGVCGGAQRPGHLPGLLLGSHGLLGSPVRAAASSPVTTLTQTMHDLAGLGSRSRLTHLSLSRRASESSLSSESSESSDAGLCMDSPSPMDPHMAEQTFEQAIQAASRIIRNEQFAIRRFQSMPVRLLGHSPVLRNITNSQAPDGRRKSEAGSGAASSSGEDKENVRFWKAGVGALREEEGACWGGSLACEDPPLPSWLQDGFVFKMPWKPTHPSSTHALAEWASRREAFAQRPSSAPDLMCLSPDRKMEVEELSPLALGRFSLTPAEGDTEEDDGFVDILESDLKDDDAVPPGMESLISAPLVKTLEKEEEKDLVMYSKCQRLFRSPSMPCSVIRPILKRLERPQDRDTPVQNKRRRSVTPPEEQQEAEEPKARVLRSKSLCHDEIENLLDSDHRELIGDYSKAFLLQTVDGKHQDLKYISPETMVALLTGKFSNIVDKFVIVDCRYPYEYEGGHIKTAVNLPLERDAESFLLKSPIAPCSLDKRVILIFHCEFSSERGPRMCRFIRERDRAVNDYPSLYYPEMYILKGGYKEFFPQHPNFCEPQDYRPMNHEAFKDELKTFRLKTRSWAGERSRRELCSRLQDQ

SEQ ID NO: 911468 - protein, 468 aa, Homo sapiens
MDSPSPMDPHMAEQTFEQAIQAASRIIRNEQFAIRRFQSMPVRLLGHSPVLRNITNSQAPDGRRKSEAGSGAASSSGEDKENDGFVFKMPWKPTHPSSTHALAEWASRREAFAQRPSSAPDLMCLSPDRKMEVEELSPLALGRFSLTPAEGDTEEDDGFVDILESDLKDDDAVPPGMESLISAPLVKTLEKEEEKDLVMYSKCQRLFRSPSMPCSVIRPILKRLERPQDRDTPVQNKRRRSVTPPEEQQEAEEPKARVLRSKSLCHDEIENLLDSDHRELIGDYSKAFLLQTVDGKHQDLKYISPETMVALLTGKFSNIVDKFVIVDCRYPYEYEGGHIKTAVNLPLERDAESFLLKSPIAPCSLDKRVILIFHCEFSSERGPRMCRFIRERDRAVNDYPSLYYPEMYILKGGYKEFFPQHPNFCEPQDYRPMNHEAFKDELKTFRLKTRSWAGERSRRELCSRLQDQ

SEQ ID NO: 911469 - protein, 516 aa, Homo sapiens
MHSETPKSQVGTLLFRSRSRLTHLSLSRRASESSLSSESSESSDAGLCMDSPSPMDPHMAEQTFEQAIQAASRIIRNEQFAIRRFQSMPVRLLGHSPVLRNITNSQAPDGRRKSEAGSGAASSSGEDKENDGFVFKMPWKPTHPSSTHALAEWASRREAFAQRPSSAPDLMCLSPDRKMEVEELSPLALGRFSLTPAEGDTEEDDGFVDILESDLKDDDAVPPGMESLISAPLVKTLEKEEEKDLVMYSKCQRLFRSPSMPCSVIRPILKRLERPQDRDTPVQNKRRRSVTPPEEQQEAEEPKARVLRSKSLCHDEIENLLDSDHRELIGDYSKAFLLQTVDGKHQDLKYISPETMVALLTGKFSNIVDKFVIVDCRYPYEYEGGHIKTAVNLPLERDAESFLLKSPIAPCSLDKRVILIFHCEFSSERGPRMCRFIRERDRAVNDYPSLYYPEMYILKGGYKEFFPQHPNFCEPQDYRPMNHEAFKDELKTFRLKTRSWAGERSRRELCSRLQDQ

SEQ ID NO: 911470 - protein, 553 aa, Homo sapiens
MEVPQPEPAPGSALSPAGVCGGAQRPGHLPGLLLGSHGLLGSPVRAAASSPVTTLTQTMHDLAGLGSETPKSQVGTLLFRSRSRLTHLSLSRRASESSLSSESSESSDAGLCMDSPSPMDPHMAEQTFEQAIQAASRIIRNEQFAIRRFQSMPVRLLGHSPVLRNITNSQAPDGRRKSEAGSGAASSSGEDKENDGFVFKMPWKPTHPSSTHALAEWASRREAFAQRPSSAPDLMCLSPDRKMEVEELSPLALGRFSLTPAEGDTEEDDGFVDILESDLKDLVMYSKCQRLFRSPSMPCSVIRPILKRLERPQDRDTPVQNKRRRSVTPPEEQQEAEEPKARVLRSKSLCHDEIENLLDSDHRELIGDYSKAFLLQTVDGKHQDLKYISPETMVALLTGKFSNIVDKFVIVDCRYPYEYEGGHIKTAVNLPLERDAESFLLKSPIAPCSLDKRVILIFHCEFSSERGPRMCRFIRERDRAVNDYPSLYYPEMYILKGGYKEFFPQHPNFCEPQDYRPMNHEAFKDELKTFRLKTRSWAGERSRRELCSRLQDQ

SEQ ID NO: 911471 - protein, 363 aa, Homo sapiens
IAHASADAWGPSSGPDLMCLSPDRKMEVEELSPLALGRFSLTPAEGDTEEDDGFVDILESDLKDDDAVPPGMESLISAPLVKTLEKEEEKDLVMYSKCQRLFRSPSMPCSVIRPILKRLERPQDRDTPVQNKRRRSVTPPEEQQEAEEPKARVLRSKSLCHDEIENLLDSDHRELIGDYSKAFLLQTVDGKHQDLKYISPETMVALLTGKFSNIVDKFVIVDCRYPYEYEGGHIKTAVNLPLERDAESFLLKSPIAPCSLDKRVILIFHCEFSSERGPRMCRFIRERDRAVNDYPSLYYPEMYILKGGYKEFFPQHPNFCEPQDYRPMNHEAFKDELKTFRLKTRSWAGERSRRELCSRLQDQ

SEQ ID NO: 911472 - protein, 601 aa, Homo sapiens
MEVPQPEPAPGSALSPAGVCGGAQRPGHLPGLLLGSHGLLGSPVRAAASSPVTTLTQTMHDLAGLGSETPKSQVGTLLFRSRSRLTHLSLSRRASESSLSSESSESSDAGLCMDSPSPMDPHMAEQTFEQAIQAASRIIRNEQFAIRRFQSMPVRLLGHSPVLRNITNSQAPDGRRKSEAGSGAASSSGEDKENDGFVFKMPWKPTHPSSTHALAEWASRREAFAQRPSSAPDLMCLSPDRKMEVEELSPLALGRFSLTPAEGDTEEDDGFVDILESDLKDDDAVPPGMESLISAPLVKTLEKEEEKDLVMYSKCQRLFRSPSMPCSVIRPILKRLERPQDRDTPVQNKRRRSVTPPEEQQEAEEPKARVLRSKSLCHDEIENLLDSDHRELIGDYSKAFLLQTVDGKHQDLKYISPETMVALLTGKFSNIVDKFVIVDCRYPYEYEGGHIKTAVNLPLERDAESFLLKAGTSTAVNLPLERDAESFLLKSPIAPCSLDKRVILIFHCEFSSERGPRMCRFIRERDRAVNDYPSLYYPEMYILKGGYKEFFPQHPNFCEPQDYRPMNHEAFKDELKTFRLKTRSWAGERSRRELCSRLQDQ

SEQ ID NO: 911473 - protein, 580 aa, Homo sapiens; identical to SEQ ID NO: 911466

SEQ ID NO: 911474 - protein, 580 aa, Homo sapiens; identical to SEQ ID NO: 911466

SEQ ID NO: 911475 - protein, 580 aa, Homo sapiens; identical to SEQ ID NO: 911466

SEQ ID NO: 911476 - protein, 580 aa, Homo sapiens; identical to SEQ ID NO: 911466

SEQ ID NO: 911477 - protein, 580 aa, Homo sapiens; identical to SEQ ID NO: 911466

SEQ ID NO: 911478 - protein, 289 aa, Homo sapiens
MEVPQPEPAPGSALSPAGVCGGAQRPGHLPGLLLGSHGLLGSPVRAAASSPVTTLTQTMHDLAGLGSETPKSQVGTLLFRSRSRLTHLSLSRRASESSLSSESSESSDAGLCMDSPSPMDPHMAEQTFEQAIQAASRIIRNEQFAIRRFQSMPVRLLGHSPVLRNITNSQAPDGRRKSEAGSGAASSSGEDKENDGFVFKMPWKPTHPSSTHALAEWASRREAFAQRPSSAPDLMCLSPDRKMEVEELSPLALGRFSLTPAEGDTEEDDGFVDILESDLKGLCVSLYRE

SEQ ID NO: 911479 - protein, 634 aa, Homo sapiens
ARGRQKKNKRNFPQSNNPPPHPSPAASLGPASCAGVCWLPCARPSSQPSAGPAAMEVPQPEPAPGSALSPAGVCGGAQRPGHLPGLLLGSHGLLGSPVRAAASSPVTTLTQTMHDLAGLGSETPKSQVGTLLFRSRSRLTHLSLSRRASESSLSSESSESSDAGLCMDSPSPMDPHMAEQTFEQAIQAASRIIRNEQFAIRRFQSMPVRLLGHSPVLRNITNSQAPDGRRKSEAGSGAASSSGEDKENDGFVFKMPWKPTHPSSTHALAEWASRREAFAQRPSSAPDLMCLSPDRKMEVEELSPLALGRFSLTPAEGDTEEDDGFVDILESDLKDDDAVPPGMESLISAPLVKTLEKEEEKDLVMYSKCQRLFRSPSMPCSVIRPILKRLERPQDRDTPVQNKRRRSVTPPEEQQEAEEPKARVLRSKSLCHDEIENLLDSDHRELIGDYSKAFLLQTVDGKHQDLKYISPETMVALLTGKFSNIVDKFVIVDCRYPYEYEGGHIKTAVNLPLERDAESFLLKSPIAPCSLDKRVILIFHCEFSSERGPRMCRFIRERDRAVNDYPSLYYPEMYILKGGYKEFFPQHPNFCEPQDYRPMNHEAFKDELKTFRLKTRSWAGERSRRELCSRLQDQ

SEQ ID NO: 911480 - protein, 566 aa, Homo sapiens
MEVPQPEPAPGSALSPAGVCGGAQRPGHLPGLLLGSHGLLGSPVRAAASSPVTTLTQTMHDLAGLGSRSRLTHLSLSRRASESSLSSESSESSDAGLCMDSPSPMDPHMAEQTFEQAIQAASRIIRNEQFAIRRFQSMPVRLLGHSPVLRNITNSQAPDGRRKSEAGSGAASSSGEDKENDGFVFKMPWKPTHPSSTHALAEWASRREAFAQRPSSAPDLMCLSPDRKMEVEELSPLALGRFSLTPAEGDTEEDDGFVDILESDLKDDDAVPPGMESLISAPLVKTLEKEEEKDLVMYSKCQRLFRSPSMPCSVIRPILKRLERPQDRDTPVQNKRRRSVTPPEEQQEAEEPKARVLRSKSLCHDEIENLLDSDHRELIGDYSKAFLLQTVDGKHQDLKYISPETMVALLTGKFSNIVDKFVIVDCRYPYEYEGGHIKTAVNLPLERDAESFLLKSPIAPCSLDKRVILIFHCEFSSERGPRMCRFIRERDRAVNDYPSLYYPEMYILKGGYKEFFPQHPNFCEPQDYRPMNHEAFKDELKTFRLKTRSWAGERSRRELCSRLQDQ

SEQ ID NO: 911481 - protein, 539 aa, Homo sapiens
MEVPQPEPAPGSALSPAGVCGGAQRPGHLPGLLLGSHGLLGSPVRAAASSPVTTLTQTMHDLAGLGSETPKSQVGTLLFRSRSRLTHLSLSRRASESSLSSESSESSDAGLCMDSPSPMDPHMAEQTFEQAIQAASRIIRNEQFAIRRFQSMPDGFVFKMPWKPTHPSSTHALAEWASRREAFAQRPSSAPDLMCLSPDRKMEVEELSPLALGRFSLTPAEGDTEEDDGFVDILESDLKDDDAVPPGMESLISAPLVKTLEKEEEKDLVMYSKCQRLFRSPSMPCSVIRPILKRLERPQDRDTPVQNKRRRSVTPPEEQQEAEEPKARVLRSKSLCHDEIENLLDSDHRELIGDYSKAFLLQTVDGKHQDLKYISPETMVALLTGKFSNIVDKFVIVDCRYPYEYEGGHIKTAVNLPLERDAESFLLKSPIAPCSLDKRVILIFHCEFSSERGPRMCRFIRERDRAVNDYPSLYYPEMYILKGGYKEFFPQHPNFCEPQDYRPMNHEAFKDELKTFRLKTRSWAGERSRRELCSRLQDQ

SEQ ID NO: 911482 - protein, 468 aa, Homo sapiens; identical to SEQ ID NO: 911468

SEQ ID NO: 911483 - protein, 580 aa, Homo sapiens; identical to SEQ ID NO: 911466

SEQ ID NO: 911484 - protein, 606 aa, Homo sapiens
MEVPQPEPAPGSALSPAGVCGGAQRPGHLPGLLLGSHGLLGSPVRAAASSPVTTLTQTMHDLAGLGSETPKSQVGTLLFRSRSRLTHLSLSRRASESSLSSESSESSDAGLCMDSPSPMDPHMAEQTFEQAIQAASRIIRNEQFAIRRFQSMPVRLLGHSPVLRNITNSQAPDGRRKSEAGSGAASSSGEDKENDGFVFKMPWKPTHPSSTHALAEWASRREAFAQRPSSAPDLMCLSPDRKMEVEELSPLALGRFSLTPAEGDTEEDDGFVDILESDLKDDDAVPPGMESLISAPLVKTLEKEEEKDLVMYSKCQRLFRSPSMPCSVIRPILKRLERPQDRDTPVQNKRRRSVTPPEEQQEAEEPKARVLRSKSLCHDEIENLLDSDHRELIGDYSKVVPWVSDPRGASQLPWEPELNLKAKQAFLLQTVDGKHQDLKYISPETMVALLTGKFSNIVDKFVIVDCRYPYEYEGGHIKTAVNLPLERDAESFLLKSPIAPCSLDKRVILIFHCEFSSERGPRMCRFIRERDRAVNDYPSLYYPEMYILKGGYKEFFPQHPNFCEPQDYRPMNHEAFKDELKTFRLKTRSWAGERSRRELCSRLQDQ

SEQ ID NO: 911485 - protein, 580 aa, Homo sapiens; identical to SEQ ID NO: 911466

SEQ ID NO: 911486 - protein, 474 aa, Homo sapiens
ISSTTPSRNEQFAIRRFQSMAVRLLGHSPVLRNITNSQAPDGRRKSEAGSGAASSSGEDKENDGFVFKMPWKPTHPSSTHALAEWASRREAFAQRPSSAPDLMCLSPDRKMEVEELSPLALGRFSLTPAEGDTEEDDGFVDILESDLKDDDAVPPGMESLISAPLVKTLEKEEEKDLVMYSKCQRLFRSPSMPCSVIRPILKRLERPQDRDTPVQNKRRRSVTPPEEQQEAEEPKARVLRSKSLCHDEIENLLDSDHRELIGDYSKVVPWVSDPRGASQLPWEPELNLKAKQAFLLQTVDGKHQDLKYISPETMVALLTGKFSNIVDKFVIVDCRYPYEYEGGHIKTAVNLPLERDAESFLLKSPIAPCSLDKRVILIFHCEFSSERGPRMCRFIRERDRAVNDYPSLYYPEMYILKGGYKEFFPQHPNFCEPQDYRPMNHEAFKDELKTFRLKTRSWAGERSRRELCSRLQDQ

SEQ ID NO: 911487 - protein, 179 aa, Homo sapiens
QFTASGSVYSVRVSLQRQMVALLTGKFSNIVDKFVIVDCRYPYEYEGGHIKTAVNLPLERDAESFLLKSPIAPCSLDKRVILIFHCEFSSERGPRMCRFIRERDRAVNDYPSLYYPEMYILKGGYKEFFPQHPNFCEPQDYRPMNHEAFKDELKTFRLKTRSWAGERSRRELCSRLQDQ

SEQ ID NO: 911488 - protein, 580 aa, Homo sapiens; identical to SEQ ID NO: 911466

SEQ ID NO: 911489 - protein, 580 aa, Homo sapiens; identical to SEQ ID NO: 911466

SEQ ID NO: 911490 - protein, 253 aa, Homo sapiens
MEVPQPEPAPGSALSPAGVCGGAQRPGHLPGLLLGSHGLLGSPVRAAASSPVTTLTQTMHDLAGLGSETPKSQVGTLLFRSRSRLTHLSLSRRASESSLSSESSESSDAGLCMDSPSPMDPHMAEQTFEQAIQAASRIIRNEQFAIRRFQSMPVRLLGHSPVLRNITNSQAPDGRRKSEAGSGAASSSGEDKENDGFVFKMPWKPTHPSSTHALAEWASRREAFAQRPSSAPDLMFLSPDRKMDVEEDDLEVA

SEQ ID NO: 911491 - protein, 262 aa, Homo sapiens
MKTPFGKTPGQRSRADAGHAGVSANMMKKRTSHKKHRSSVGPSKPVSQPRRNIVGCRIQHGWKEGNGPVTQWKGTVLDQVPVNPSLYLIKYDGFDCVYGLELNKDERVSALEVLPDRVATSRISDAHLADTMIGKAVEHMFETEDGSKDEWRGMVLARAPVMNTWFYITYEKDPVLYMYQLLDDYKEGDLRIMPDSNDSPPAEREPGEVVDSLVGKQVEYAKEDGSKRTGMVIHQVEAKPSVYFIKFDDDFHIYVYDLVKTS

SEQ ID NO: 911492 - protein, 306 aa, Homo sapiens
RGRRSSAGAVRVRPDCWGAGGVRGEGAGAGRRRLAQAGAGGSANERRRNPWACGLQPRRSAGHAGVSANMMKKRTSHKKHRSSVGPSKPVSQPRRNIVGCRIQHGWKEGNGPVTQWKGTVLDQVPVNPSLYLIKYDGFDCVYGLELNKDERVSALEVLPDRVATSRISDAHLADTMIGKAVEHMFETEDGSKDEWRGMVLARAPVMNTWFYITYEKDPVLYMYQLLDDYKEGDLRIMPDSNDSPPAEREPGEVVDSLVGKQVEYAKEDGSKRTGMVIHQVEAKPSVYFIKFDDDFHIYVYDLVKTS

SEQ ID NO: 911493 - protein, 262 aa, Homo sapiens; identical to SEQ ID NO: 911491

SEQ ID NO: 911494 - protein, 262 aa, Homo sapiens; identical to SEQ ID NO: 911491

SEQ ID NO: 911495 - protein, 131 aa, Homo sapiens
MIGKAVEHMFETEDGSKDEWRGMVLARAPVMNTWFYITYEKDPVLYMYQLLDDYKEGDLRIMPDSNDSPPAEREPGEVVDSLVGKQVEYAKEDGSKRTGMVIHQVEAKPSVYFIKFDDDFHIYVYDLVKTS

SEQ ID NO: 911496 - protein, 262 aa, Homo sapiens; identical to SEQ ID NO: 911491

SEQ ID NO: 911497 - protein, 262 aa, Homo sapiens; identical to SEQ ID NO: 911491

SEQ ID NO: 911498 - protein, 262 aa, Homo sapiens; identical to SEQ ID NO: 911491

SEQ ID NO: 911499 - protein, 262 aa, Homo sapiens; identical to SEQ ID NO: 911491

SEQ ID NO: 911500 - protein, 262 aa, Homo sapiens; identical to SEQ ID NO: 911491

SEQ ID NO: 911501 - protein, 262 aa, Homo sapiens; identical to SEQ ID NO: 911491

SEQ ID NO: 911502 - protein, 262 aa, Homo sapiens; identical to SEQ ID NO: 911491

SEQ ID NO: 911503 - protein, 262 aa, Homo sapiens; identical to SEQ ID NO: 911491

SEQ ID NO: 911504 - protein, 262 aa, Homo sapiens; identical to SEQ ID NO: 911491

SEQ ID NO: 911505 - protein, 262 aa, Homo sapiens; identical to SEQ ID NO: 911491

SEQ ID NO: 911506 - protein, 262 aa, Homo sapiens; identical to SEQ ID NO: 911491

SEQ ID NO: 911507 - protein, 99 aa, Homo sapiens
RGRRSSAGAVRVRPDCWGAGGVRGEGAGAGRRRLAQAGAGGSANERRRNPWACGLQPRRSAAMRSYCVAQAALELLDSSDLPTLVFQSVGITGSLSRQC

SEQ ID NO: 911508 - protein, 263 aa, Homo sapiens
MISPVLILFSSFLCHVAIAGRTCPKPDDLPFSTVVPLKTFYEPGEEITYSCKPGYVSRGGMRKFICPLTGLWPINTLKCTPRVCPFAGNLRKMGAVRYYGLFEYPNTISFSCNTGFYLNGADSAKCTEEGKWSPELPVCAPIICPPPSIPTFATLRVYKPSAGNNSLYRDTAVFECLPQHAMFGNDTITCTTHGNWTKLPECREVKCPFPSRPDNGFVNYPAKPTLYYKDKATFGCHDGYSLDGPEEIECTQTGKLVLPMPKL

SEQ ID NO: 911509 - protein, 263 aa, Homo sapiens; identical to SEQ ID NO: 911508

SEQ ID NO: 911510 - protein, 263 aa, Homo sapiens; identical to SEQ ID NO: 911508

SEQ ID NO: 911511 - protein, 283 aa, Homo sapiens
KQWYQRTVPITAGCQCDSSTMISPVLILFSSFLCHVAIAGRTCPKPDDLPFSTVVPLKTFYEPGEEITYSCKPGYVSRGGMRKFICPLTGLWPINTLKCTPRVCPFAGNLRKMGAVRYYGLFEYPNTISFSCNTGFYLNGADSAKCTEEGKWSPELPVCAPIICPPPSIPTFATLRVYKPSAGNNSLYRDTAVFECLPQHAMFGNDTITCTTHGNWTKLPECREVKCPFPSRPDNGFVNYPAKPTLYYKDKATFGCHDGYSLDGPEEIECTQTGKLVLPMPKL

SEQ ID NO: 911512 - protein, 263 aa, Homo sapiens; identical to SEQ ID NO: 911508

SEQ ID NO: 911513 - protein, 263 aa, Homo sapiens; identical to SEQ ID NO: 911508

SEQ ID NO: 911514 - protein, 263 aa, Homo sapiens; identical to SEQ ID NO: 911508

SEQ ID NO: 911515 - protein, 263 aa, Homo sapiens; identical to SEQ ID NO: 911508

SEQ ID NO: 911516 - protein, 245 aa, Homo sapiens
MISPVLILFSSFLCHVAIAGRTCPKPDDLPFSTVVPLKTFYEPGEEITYSCKPGYVSRGGMRKFICPLTGLWPINTLKCTPRVCPFAGNLRKMGAVRYYGLFEYPNTISFSCNTGFYLNGADSAKCTEEGIPTFATLRVYKPSAGNNSLYRDTAVFECLPQHAMFGNDTITCTTHGNWTKLPECREVKCPFPSRPDNGFVNYPAKPTLYYKDKATFGCHDGYSLDGPEEIECTQTGKLVLPMPKL

SEQ ID NO: 911517 - protein, 211 aa, Homo sapiens
MISPVLILFSSFLCHVAIAGRTCPKPDDLPFSTVVPLKTFYEPGEEITYSCKPGYVSRGGMRKFICPLTGLWPINTLKCTPRVCPFAGNLRKMGAVRYYGLFEYPNTISFSCNTGFYLNGADSAKCTEEGKWSPELPVCAPIICPPPSIPTFATLRVYKPSAGNNSLYRDTAVFECLPQHAMFGNDTITCTTHGNWTKLPECRETNTLLQG

SEQ ID NO: 911518 - protein, 188 aa, Homo sapiens
MISPVLILFSSFLCHVAIAGRTCPKPDDLPFSTVVPLKTFYEPGEEITYSCKPGYVSRGGMRKFICPLTGLWPINTLKCTPRVCPFAGNLRKMGAVRYYGLFEYPNTISFSCNTGFYLNGADSAKCTEEGIPTFATLRVYKPSAGNNSLYRDTAVFECLPQHAMFGNDTITCTTHGNWTKLPECRVSP

SEQ ID NO: 911519 - protein, 263 aa, Homo sapiens; identical to SEQ ID NO: 911508

SEQ ID NO: 911520 - protein, 263 aa, Homo sapiens; identical to SEQ ID NO: 911508

SEQ ID NO: 911521 - protein, 263 aa, Homo sapiens; identical to SEQ ID NO: 911508

SEQ ID NO: 911522 - protein, 263 aa, Homo sapiens; identical to SEQ ID NO: 911508

SEQ ID NO: 911523 - protein, 263 aa, Homo sapiens; identical to SEQ ID NO: 911508

SEQ ID NO: 911524 - protein, 266 aa, Homo sapiens
MISPVLILFSSFLCHVAIAGRTCPKPDDLPFSTVVPLKTFYEPGEEITYSCKPGYVSRGGMRKFICPLTGLWPINTLKCTPRVCPFAGNLRKMGAVRYYGLFEYPNTISFSCNTGFYLNGADSAKCTEEGKWSPELPVCAPIICPPPSIPTFATLRVYKPSAGNNSLYRDTAVFECLPQHAMFGNDTITCTTHGNWTKLPECREVKCPFPSRPDNGFVNYPAFSGWPGRNRMYPNWETGPAHAQVVKHLVKYPVKKAHCGVPKERE

SEQ ID NO: 911525 - protein, 203 aa, Homo sapiens
MRKFICPLTGLWPINTLKCTPRVCPFAGNLRKMGAVRYYGLFEYPNTISFSCNTGFYLNGADSAKCTEEGKWSPELPVCAPIICPPPSIPTFATLRVYKPSAGNNSLYRDTAVFECLPQHAMFGNDTITCTTHGNWTKLPECREVKCPFPSRPDNGFVNYPAKPTLYYKDKATFGCHDGYSLDGPEEIECTQTGKLVLPMPKL

SEQ ID NO: 911526 - protein, 174 aa, Homo sapiens
MISPVLILFSSFLCHVAIAGRTCPKPDDLPFSTVVPLKTFYEPGEEITYSCKPGYVSRGGMRKFICPLTGLWPINTLKCTPRVCPFAGNLRKMGAVRYYGLFEYPNTISFSCNTGFYLNGADSAKCTEEGKWSPELPVCAPIICPPPSIPTFATLRVYKPSAGNNSHQDQTMDL

SEQ ID NO: 911527 - protein, 104 aa, Homo sapiens
MISPVLILFSSFLCHVAIAGRTCPKPDDLPFSTVVPLKTFYEPGEEITYSCKPGYVSRGGMRKFICPLTGLWPINTLKCTPRVCPFAGILSCNTVFYLNGAGPF

SEQ ID NO: 911528 - protein, 159 aa, Homo sapiens
MPLMWLPAAGWPFVYLSEPVPPTLKLGQWRYSENCPFGDDPPTVGLPLITLPDRTLPFLDLGDSPDSSTPKLSRAQRPQSCTSVGRVTVHSTPVRRSSGPAPQSLLSARRVSALPTPASRRCSGLPPMTPKTMPRAVGSPLCVPARRRSSEPRKNSAMR

SEQ ID NO: 911529 - protein, 113 aa, Homo sapiens [sequence omitted]

SEQ ID NO: 911530 - protein, 739 aa, Homo sapiens
MEGGGGRDEPSACRAGDVNMDDPKKEDILLLADEKFDFDLSLSSSSANEDDEVFFGPFGHKERCIAASLELNNPVPEQPPLPTSESPFAWSPLAGEKFVEVYKEAHLLALHIESSSRNQAAQAAKPEDPRSQGVERFIQESKLKINLFEKEKEMKKSPTSLKRETYYLSDSPLLGPPVGEPRLLASSPALPSSGAQARLTRAPGPPHSAHALPRESCTAHAASQAATQRKPGTKLLLPRAASVRGRSIPGAAEKPKKEIPASPSRTKIPAEKESHRDVLPDKPAPGAVNVPAAGSHLGQGKRAIPVPNKLGLKKTLLKAPGSTSNLARKSSSGPVWSGASSACTSPAVGKAKSSEFASIPANSSRPLSNISKSGRMGPAMLRPALPAGPVGASSWQAKRVDVSELAAEQLTAPPSASPTQPQTPEGGGQWLNSSCAWSESSQLNKTRSIRRRDSCLNSKTKVMPTPTNQFKIPKFSIGDSPDSSTPKLSRAQRPQSCTSVGRVTVHSTPVRRSSGPAPQSLLSARRVSALPTPASRRCSGLPPMTPKTMPRAVGSPLCVPARRRSSEPRKNSAMRTEPTRESNRKTDSRLVDVSPDRGSPPSRVPQALNFSPEESDSTFSKSTATEVAREEAKPGGDAAPSEALLVDIKLEPLAVTPDAASQPLIDLPLIDFCDTPEAHVAVGSESRPLIDLMTNTPDMNKNVAKPSPVVGQLIDLSSPLIQLSPEADKENVDSPLLKF

SEQ ID NO: 911531 - protein, 739 aa, Homo sapiens; identical to SEQ ID NO: 911530

SEQ ID NO: 911532 - protein, 586 aa, Homo sapiens
MKKSPTSLKRETYYLSDSPLLGPPVGEPRLLASSPALPSSGAQARLTRAPGPPHSAHALPRESCTAHAASQAATQRKPGTKLLLPRAASVRGRSIPGAAEKPKKEIPASPSRTKIPAEKESHRDVLPDKPAPGAVNVPAAGSHLGQGKRAIPVPNKLGLKKTLLKAPGSTSNLARKSSSGPVWSGASSACTSPAVGKAKSSEFASIPANSSRPLSNISKSGRMGPAMLRPALPAGPVGASSWQAKRVDVSELAAEQLTAPPSASPTQPQTPEGGGQWLNSSCAWSESSQLNKTRSIRRRDSCLNSKTKVMPTPTNQFKIPKFSIGDSPDSSTPKLSRAQRPQSCTSVGRVTVHSTPVRRSSGPAPQSLLSARRVSALPTPASRRCSGLPPMTPKTMPRAVGSPLCVPARRRSSEPRKNSAMRTEPTRESNRKTDSRLVDVSPDRGSPPSRVPQALNFSPEESDSTFSKSTATEVAREEAKPGGDAAPSEALLVDIKLEPLAVTPDAASQPLIDLPLIDFCDTPEAHVAVGSESRPLIDLMTNTPDMNKNVAKPSPVVGQLIDLSSPLIQLSPEADKENVDSPLLKF

SEQ ID NO: 911533 - protein, 721 aa, Homo sapiens
MTVDFFPLDILLLADEKFDFDLSLSSSSANEDDEVFFGPFGHKERCIAASLELNNPVPEQPPLPTSESPFAWSPLAGEKFVEVYKEAHLLALHIESSSRNQAAQAAKPEDPRSQGVERFIQESKLKINLFEKEKEMKKSPTSLKRETYYLSDSPLLGPPVGEPRLLASSPALPSSGAQARLTRAPGPPHSAHALPRESCTAHAASQAATQRKPGTKLLLPRAASVRGRSIPGAAEKPKKEIPASPSRTKIPAEKESHRDVLPDKPAPGAVNVPAAGSHLGQGKRAIPVPNKLGLKKTLLKAPGSTSNLARKSSSGPVWSGASSACTSPAVGKAKSSEFASIPANSSRPLSNISKSGRMGPAMLRPALPAGPVGASSWQAKRVDVSELAAEQLTAPPSASPTQPQTPEGGGQWLNSSCAWSESSQLNKTRSIRRRDSCLNSKTKVMPTPTNQFKIPKFSIGDSPDSSTPKLSRAQRPQSCTSVGRVTVHSTPVRRSSGPAPQSLLSARRVSALPTPASRRCSGLPPMTPKTMPRAVGSPLCVPARRRSSEPRKNSAMRTEPTRESNRKTDSRLVDVSPDRGSPPSRVPQALNFSPEESDSTFSKSTATEVAREEAKPGGDAAPSEALLVDIKLEPLAVTPDAASQPLIDLPLIDFCDTPEAHVAVGSESRPLIDLMTNTPDMNKNVAKPSPVVGQLIDLSSPLIQLSPEADKENVDSPLLKF

SEQ ID NO: 911534 - protein, 640 aa, Homo sapiens
MEGGGGRDEPSACRAGDVNMDDPKKEDILLLADEKFDFDLSLSSSSANEDDEVFFGPFGHKERCIAASLELNNPVPEQPPLPTSESPFAWSPLAGEKFVEVYKEAHLLALHIESSSRNQAAQAAKPEDPRSQGVERFIQESKLKINLFEKEKEMKKSPTSLKRETYYLSDSPLLGPPVGEPRLLASSPALPSSGAQARLTRAPGPPHSAHALPRESCTAHAASQAATQRKPGTKLLLPRAASVRGRSIPGAAEKPKKEIPASPSRTKIPAEKESHRDVLPDKPAPGAVNVPAAGSHLGQGKRAIPVPNKLGLKKTLLKAPGSTSNLARKSSSGPVWSGASSACTSPAVGKAKSSEFASIPANSSRPLSNISKSGRMGPAMLRPALPAGPVGASSWQAKRVDVSELAAEQLTAPPSASPTQPQTPEGGGQWLNSSCAWSESSQLNKTRSIRRRDSCLNSKTKVMPTPTNQFKIPKFSIGDSPDSSTPKLSRAQRPQSCTSVGRVTVHSTPVRRSSGPAPQSLLSARRVSALPTPASRRCSGLPPMTPKTMPRAVGSPLCVPARRRSSEPRKNSAMRTEPTRESNRKTDSRLVDVSPDRGSPPSRVPQALNFSPEESDSTFSKSTSSHRLLRYPRSTRGCRI

SEQ ID NO: 911535 - protein, 657 aa, Homo sapiens
NAYRLGTRPGVESAEGERGVKEAHLLALHIESSSRNQAAQAAKPEDPRSQGVERFIQESKLKINLFEKEKEMKKSPTSLKRETYYLSDSPLLGPPVGEPRLLASSPALPSSGAQARLTRAPGPPHSAHALPRESCTAHAASQAATQRKPGTKLLLPRAASVRGRSIPGAAEKPKKEIPASPSRTKIPAEKESHRDVLPDKPAPGAVNVPAAGSHLGQGKRAIPVPNKLGLKKTLLKAPGSTSNLARKSSSGPVWSGASSACTSPAVGKAKSSEFASIPANSSRPLSNISKSGRMGPAMLRPALPAGPVGASSWQAKRVDVSELAAEQLTAPPSASPTQPQTPEGGGQWLNSSCAWSESSQLNKTRSIRRRDSCLNSKTKVMPTPTNQFKIPKFSIGDSPDSSTPKLSRAQRPQSCTSVGRVTVHSTPVRRSSGPAPQSLLSARRVSALPTPASRRCSGLPPMTPKTMPRAVGSPLCVPARRRSSEPRKNSAMRTEPTRESNRKTDSRLVDVSPDRGSPPSRVPQALNFSPEESDSTFSKSTATEVAREEAKPGGDAAPSEALLVDIKLEPLAVTPDAASQPLIDLPLIDFCDTPEAHVAVGSESRPLIDLMTNTPDMNKNVAKPSPVVGQLIDLSSPLIQLSPEADKENVDSPLLKF

SEQ ID NO: 911536 - protein, 276 aa, Homo sapiens
MTPSRPCELRSLLPGDSPDSSTPKLSRAQRPQSCTSVGRVTVHSTPVRRSSGPAPQSLLSARRVSALPTPASRRCSGLPPMTPKTMPRAVGSPLCVPARRRSSEPRKNSAMRTEPTRESNRKTDSRLVDVSPDRGSPPSRVPQALNFSPEESDSTFSKSTATEVAREEAKPGGDAAPSEALLVDIKLEPLAVTPDAASQPLIDLPLIDFCDTPEAHVAVGSESRPLIDLMTNTPDMNKNVAKPSPVVGQLIDLSSPLIQLSPEADKENVDSPLLKF

SEQ ID NO: 911537 - protein, 451 aa, Homo sapiens
MEGGGGRDEPSACRAGDVNMDDPKKEDILLLADEKFDFDLSLSSSSANEDDEVFFGPFGHKERCIAASLELNNPVPEQPPLPTSESPFAWSPLAGEKFVEVYKEAHLLALHIESSSRNQAAQAAKPEDPRSQGVERFIQESKLKINLFEKEKEMKKSPTSLKRETYYLSDSPLLGPPVGEPRLLASSPALPSSGAQARLTRAPGPPHSAHALPRESCTAHAASQAATQRKPGTKLLLPRAASVRGRSIPGAAEKPKKEIPASPSRTKIPAEKESHRDVLPDKPAPGAVNVPAAGSHLGQGKRAIPVPNKLGLKKTLLKAPGSTSNLARKSSSGPVWSGASSACTSPAVGKAKSSEFASIPANSSRPLSNISKSGRMGPAMLRPALPAGPVGASSWQAKRVDVSELAAEQLTAPPSASPTQPQTPEGGGHTDHPRPLLPAATLLAAILWAGM

SEQ ID NO: 911538 - protein, 575 aa, Homo sapiens
MEGGGGRDEPSACRAGDVNMDDPKKEDILLLADEKFDFDLSLSSSSANEDDEVFFGPFGHKERCIAASLELNNPVPEQPPLPTSESPFAWSPLAGEKFVEVYKEAHLLALHIESSSRNQAAQAAKPEDPRSQGVERFIQESKLKINLFEKEKEMKKSPTSLKRETYYLSDSPLLGPPVGEPRLLASSPALPSSGAQARLTRAPGPPHSAHALPRESCTAHAASQAATQRKPGTKLLLPRAASVRGRSIPGAAEKPKKEIPASPSRTKIPAEKESHRDVLPDKPAPGAVNVPAAGSHLGQGKRAIPVPNKLGLKKTLLKAPGSTSNLARKSSSGPVWSGASSACTSPAVGKAKSSEFASIPANSSRPLSNISKSGRMGPAMLRPALPAGPVGASSWQAKRVDVSELAAEQLTAPPSASPTQPQTPEGGGQWLNSSCAWSESSQLNKTRSIRRRDSCLNSKTKVMPTPTNQFKIPKFSIGDSPDSSTPKLSRAQRPQSCTSVGRVTVHSTPVRRSSGPAPQSLLSARRVSALPTPASRRCSGLPPMTPKTMPRAVGSPLCVPARRRSSEPRKNSAMR

SEQ ID NO: 911539 - protein, 406 aa, Homo sapiens
MEGGGGRDEPSACRAGDVNMDDPKKEDILLLADEKFDFDLSLSSSSANEDDEVFFGPFGHKERCIAASLELNNPVPEQPPLPTSESPFAWSPLAGEKFVEVYKEAHLLALHIESSSRNQAAQAAKPEDPRSQGVERFIQESKLKINLFEKEKEMKKSPTSLKRETYYLSDSPLLGPPVGEPRLLASSPALPSSGAQARLTRAPGPPHSAHALPRESCTAHAASQAATQRKPGTKLLLPRAASVRGRSIPGAAEKPKKEIPASPSRTKIPAEKESHRDVLPDKPAPGAVNVPAAGSHLGQGKRAIPVPNKLGLKKTLLKAPGSTSNLARKSSSGPVWSGASSACTSPAVGKAKSSEFASIPANSSRPLSNISKSGRMGPAMLRPALPAGPVGASSWQAKRVRIFSIE

SEQ ID NO: 911540 - protein, 739 aa, Homo sapiens; identical to SEQ ID NO: 911530

SEQ ID NO: 911541 - protein, 739 aa, Homo sapiens; identical to SEQ ID NO: 911530

SEQ ID NO: 911542 - protein, 739 aa, Homo sapiens; identical to SEQ ID NO: 911530

SEQ ID NO: 911543 - protein, 658 aa, Homo sapiens
MEGGGGRDEPSACRAGDVNMDDPKKEDILLLADEKFDFDLSLSSSSANEDDEVFFGPFGHKERCIAASLELNNPVPEQPPLPTSESPFAWSPLAGEKFVEVYKEAHLLALHIESSSRNQAAQAAKPEDPRSQGVERFIQESKLKINLFEKEKEMKKSPTSLKRETYYLSDSPLLGPPVGEPRLLASSPALPSSGAQARLTRAPGPPHSAHALPRESCTAHAASQAATQRKPGTKLLLPRAASVRGRSIPGAAEKPKKEIPASPSRTKIPAEKESHRDVLPDKPAPGAVNVPAAGSHLGQGKRAIPVPNKLGLKKTLLKAPGSTSNLARKSSSGPVWSGASSACTSPAVGKAKSSEFASIPANSSRPLSNISKSGRMGPAMLRPALPAGPVGASSWQAKRVDVSELAAEQLTAPPSASPTQPQTPEGGGQWLNSSCAWSESSQLNKTRSIRRRDSCLNSKTKVMPTPTNQFKIPKFSIGDSPDSSTPKLSRAQRPQSCTSVGRVTVHSTPVRRSSGPAPQSLLSARRVSALPTPASRRCSGLPPMTPKTMPRAVGSPLCVPARRRSSEPRKNSAMRTEPTRESNRKTDSRLVDVSPDRGSPPSRVPQALNFSPEESDSTFSKSTATEVAREEAKPGGDAAPSEVGGLLEPRSSGPAWEI

SEQ ID NO: 911544 - protein, 578 aa, Homo sapiens
MEGGGGRDEPSACRAGDVNMDDPKKEDILLLADEKFDFDLSLSSSSANEDDEVFFGPFGHKERCIAASLELNNPVPEQPPLPTSESPFAWSPLAGEKFVEVYKEAHLLALHIESSSRNQAAQAAKPEDPRSQGVERFIQESKLKINLFEKEKEMKKSPTSLKRETYYLSDSPLLGPPVGEPRLLASSPALPSSGAQARLTRAPGPPHSAHALPRESCTAHAASQAATQRKPGTKLLLPRAASVRGRSIPGAAEKPKKEIPASPSRTKIPAEKESHRDVLPDKPAPGAVNVPAAGSHLGQGKRAIPVPNKLGLKKTLLKAPGSTSNLARKSSSGPVWSGASSACTSPAVGKAKSSEFASIPANSSRPLSNISKSGRMGPAMLRPALPAGPVGASSWQAKRVDVSELAAEQLTAPPSASPTQPQTPEGGGQWLNSSCAWSESSQLNKTRSIRRRDSCLNSKTKVMPTPTNQFKIPKFSIGDSPDSSTPKLSRAQRPQSCTSVGRVTVHSTPVRRSSGPAPQSLLSARRVSALPTPASRRCSGLPPMTPKTMPRAVGSPLCVPARRRSSEPRKNSAMRLFL

SEQ ID NO: 911545 - protein, 323 aa, Homo sapiens
MPLMWLPAAGWPFVYLSEPVPPTLKLGQWRYSENCPFGDDPPTVGLPLITLPDRTLPFLDLGDSPDSSTPKLSRAQRPQSCTSVGRVTVHSTPVRRSSGPAPQSLLSARRVSALPTPASRRCSGLPPMTPKTMPRAVGSPLCVPARRRSSEPRKNSAMRTEPTRESNRKTDSRLVDVSPDRGSPPSRVPQALNFSPEESDSTFSKSTATEVAREEAKPGGDAAPSEALLVDIKLEPLAVTPDAASQPLIDLPLIDFCDTPEAHVAVGSESRPLIDLMTNTPDMNKNVAKPSPVVGQLIDLSSPLIQLSPEADKENVDSPLLKF

SEQ ID NO: 911546 - protein, 652 aa, Homo sapiens
MEGGGGRDEPSACRAGDVNMDDPKKEDILLLADEKFDFDLSLSSSSANEDDEVFFGPFGHKERCIAASLELNNPVPEQPPLPTSESPFAWSPLAGEKFVEVYKEAHLLALHIESSSRNQAAQAAKPEDPRSQGVERFIQESKLKINLFEKEKEMKKSPTSLKRETYYLSDSPLLGPPVGEPRLLASSPALPSSGAQARLTRAPGPPHSAHALPRESCTAHAASQAATQRKPGTKLLLPRAASVRGRSIPGAAEKPKKEIPASPSRTKIPAEKESHRDVLPDKPAPGAVNVPAAGSHLGQGKRAIPVPNKLGLKKTLLKAPGSTSNLARKSSSGPVWSGASSACTSPAVGKAKSSEFASIPANSSRPLSNISKSGRMGPAMLRPALPAGPVGASSWQAKRVDVSELAAEQLTAPPSASPTQPQTPEGGGQWLNSSCAWSESSQLNKTRSIRRRDSCLNSKTKVMPTPTNQFKIPKFSIGDSPDSSTPKLSRAQRPQSCTSVGRVTVHSTPVRRSSGPAPQSLLSARRVSALPTPASRRCSGLPPMTPKTMPRAVGSPLCVPARRRSSEPRKNSAMRTEPTRESNRKTDSRLVDVSPDRGSPPSRVPQALNFSPEESDSTFSKSTATEVAREEAKPGGDAAPSEVGRTGAAGFC

SEQ ID NO: 911547 - protein, 451 aa, Homo sapiens; identical to SEQ ID NO: 911537

SEQ ID NO: 911548 - protein, 325 aa, Homo sapiens
  misc_feature (280)..(280): Xaa can be any naturally occurring amino acid
MEGGGGRDEPSACRAGDVNMDDPKKEDILLLADEKFDFDLSLSSSSANEDDEVFFGPFGHKERCIAASLELNNPVPEQPPLPTSESPFAWSPLAGEKFVEVYKEAHLLALHIESSSRNQAAQAAKPEDPRSQGVERFIQESKLKINLFEKEKKKKKKKKRGRRARRGPRGKKSFLKPMRGGARGGHRGRKEGTRGAKSGFPRGENARGRGHRERAGEISPTQNKKRPRGGQPREGSGKKNPERGSSREGPIRGEHLYTKRRSPQSGEPPEDIQKYKAPRXRGGGPTHQKQAARGTPRTSRPRRRDKQRRPQRRPPQRHHNDVTTS

SEQ ID NO: 911549 - protein, 359 aa, Homo sapiens
MSLQRLLQHSSNGNLADFCAGPAYSSYSTLTGSLTMDDNRRIQMLADTVATLPRGRKQLALTRSSSLSDFSWSQRKLVTVEKQDNETFGFEIQSYRPQNQNACSSEMFTLICKIQEDSPAHCAGLQAGDVLANINGVSTEGFTYKQVVDLIRSSGNLLTIETLNGTMILKRTELEAKLQVLKQTLKQKWVEYRSLQLQEHRLLHGDAANCPSLENMDLDELSLFGPLPGPGPALVDRNRLSSESSCKSWLSSMTMDSEDGYQTCVSEDSSRGAFSRQTSTDDECFIPKEGDDFLRRSSSRRNRSISNTSSGSMSPLWEGNLSSMFGTLPRKSRKGSVRKQLLKFIPGLHRAVEEEESRF

SEQ ID NO: 911550 - protein, 359 aa, Homo sapiens; identical to SEQ ID NO: 911549

SEQ ID NO: 911551 - protein, 324 aa, Homo sapiens
MDDNRRIQMLADTVATLPRGRKQLALTRSSSLSDFSWSQRKLVTVEKQDNETFGFEIQSYRPQNQNACSSEMFTLICKIQEDSPAHCAGLQAGDVLANINGVSTEGFTYKQVVDLIRSSGNLLTIETLNGTMILKRTELEAKLQVLKQTLKQKWVEYRSLQLQEHRLLHGDAANCPSLENMDLDELSLFGPLPGPGPALVDRNRLSSESSCKSWLSSMTMDSEDGYQTCVSEDSSRGAFSRQTSTDDECFIPKEGDDFLRRSSSRRNRSISNTSSGSMSPLWEGNLSSMFGTLPRKSRKGSVRKQLLKFIPGLHRAVEEEESRF

SEQ ID NO: 911552 - protein, 219 aa, Homo sapiens
MSLQRLLQHSSNGNLADFCAGPAYSSYSTLTGSLTMDDNRRIQMLADTVATLPRGRKQLALTRSSSLSDFSWSQRKLVTVEKQDNETFGFEIQSYRPQNQNACSSEMFTLICKIQEDSPAHCAGLQAGDVLANINGVSTEGFTYKQVVDLIRSSGNLLTIETLNGTMILKRTELEAKLQVLKQTLKQKWVEYRSLQLQEHRLLHGKCNFLFRNHTNITS

SEQ ID NO: 911553 - protein, 183 aa, Homo sapiens
MSLQRLLQHSSNGNLADFCAGPAYSSYSTLTGSLTMDDNRRIQMLADTVATLPRGRKQLALTRSSSLSDFSWSQRKLVTVEKQDNETFGFEIQSYRPQNQNACSSEMFTLICKIQEDSPAHCAGLQAGDVLANINGVSTEGFTYKQVVDLIRSSGNLLTIETLNGTMILKRTELEAKLQVLKE

SEQ ID NO: 911554 - protein, 359 aa, Homo sapiens; identical to SEQ ID NO: 911549

SEQ ID NO: 911555 - protein, 193 aa, Homo sapiens [sequence omitted]

SEQ ID NO: 911556 - protein, 211 aa, Homo sapiens
FTSIIGTVLVPKKVGGNVVLACFHSEILSHDIGAWVHYSHCRNRHGGLRTGLGSKSNECRSGRTYRVAIAMSVQGPSDMGIEATALVDRNRLSSESSCKSWLSSMTMDSEDGYQTCVSEDSSRGAFSRQTSTDDECFIPKEGDDFLRRSSSRRNRSISNTSSGSMSPLWEGNLSSMFGTLPRKSRKGSVRKQLLKFIPGLHRAVEEEESRF

SEQ ID NO: 911557 - protein, 576 aa, Homo sapiens
MAASETVRLRLQFDYPPPATPHCTAFWLLVDLNRCRVVTDLISLIRQRFGFSSGAFLGLYLEGGLLPPAESARLVRDNDCLRVKLEERGVAENSVVISNGDINLSLRKAKKRAFQLEEGEETEPDCKYSKKHWKSRENNNNNEKVLDLEPKAVTDQTVSKKNKRKNKATCGTVGDDNEEAKRKSPKKKEKCEYKKKAKNPKSPKVQAVKDWANQRCSSPKGSARNSLVKAKRKGSVSVCSKESPSSSSESESCDESISDGPSKVTLEARNSSEKLPTELSKEEPSTKNTTADKLAIKLGFSLTPSKGKTSGTTSSSSDSSAESDDQCLMSSSTPECAAGFLKTVGLFAGRGRPGPGLSSQTAGAAGWRRSGSNGGGQAPGASPSVSLPASLGRGWGREENLFSWKGAKGRGMRGRGRGRGHPVSCVVNRSTDNQRQQQLNDVVKNSSTIIQNPVETPKKDYSLLPLLAAAPQVGEKIAFKLLELTSSYSPDVSDYKEGRILSHNPETQQVDIEILSSLPALREPGKFDLVYHNENGAEVVEYAVTQESKITVFWKELIDPRLIIESPSNTSSTEPA

SEQ ID NO: 911558 - protein, 195 aa, Homo sapiens
GRCLRPARAATVPALRATRRRDRLAASSSSASPFQTKIEKMVDLTQVMDDEVFMAFASYATIILSKMMLMSTATAFYRLTRKVFANPEDCVAFGKGENAKKYLRTDDRVERVRRAHLNDLENIIPFLGIGLLYSLSGPDPSTAILHFRLFVGARIYHTIAYLTPLPQPNRALSFFVGYGVTLSMAYRLLKSKLYL

SEQ ID NO: 911559 - protein, 187 aa, Homo sapiens
GRCLRPARAATVPALRATRRRDRLAASSSSASPFQTKIEKMVDLTQVMDDEVFMAFASYATIILSKMMLMSTATAFYRLTRKVFANPEDCVAFGKGENAKKYLRTDDRVERVRRAQEILGPERQIQKNLHVNETGVEMRMAGNAWKQTCNCLMAWSSKSQRMECNGMISAHRNLCLPDSSDSPASAS

SEQ ID NO: 911560 - protein, 164 aa, Homo sapiens
GRCLRPARAATVPALRATRRRDRLAASSSSASPFQTKIEKMVDLTQVMDDEVFMAFASYATIILSKMMLMSTATAFYRLTRKVFANPEDCVAFGKGENAKKYLRTDDRVERVRRAQEILGPERQIQKNLHVNETGVEMRMAGNAWKQTCNCLMAWSSKSQSRLA

SEQ ID NO: 911561 - protein, 195 aa, Homo sapiens; identical to SEQ ID NO: 911558

SEQ ID NO: 911562 - protein, 195 aa, Homo sapiens; identical to SEQ ID NO: 911558

SEQ ID NO: 911563 - protein, 155 aa, Homo sapiens
MVDLTQVMDDEVFMAFASYATIILSKMMLMSTATAFYRLTRKVFANPEDCVAFGKGENAKKYLRTDDRVERVRRAHLNDLENIIPFLGIGLLYSLSGPDPSTAILHFRLFVGARIYHTIAYLTPLPQPNRALSFFVGYGVTLSMAYRLLKSKLYL

SEQ ID NO: 911564 - protein, 261 aa, Homo sapiens
SSSSSSIVLIILFFIFILQPQFLAFTGTTFAAFFPLAGVVSIAASSEVIFLIVIVILIIFVILIVLILWAGAAAAAFIAAGSISSSSSSSSSSSSSASPFQTKIEKMVDLTQVMDDEVFMAFASYATIILSKMMLMSTATAFYRLTRKVFANPEDCVAFGKGENAKKYLRTDDRVERVRRAHLNDLENIIPFLGIGLLYSLSGPDPSTAILHFRLFVGARIYHTIAYLTPLPQPNRALSFFVGYGVTLSMAYRLLKSKLYL

SEQ ID NO: 911565 - protein, 86 aa, Homo sapiens
GRCLRPARAATVPALRATRRRDRLAASSSSASPFQTKIEKMVDLTQVMDDEVFMAFASYATIILSKMMLMSTATAFYRLTRKSPPE

SEQ ID NO: 911566 - protein, 195 aa, Homo sapiens; identical to SEQ ID NO: 911558

SEQ ID NO: 911567 - protein, 146 aa, Homo sapiens
GRCLRPARAATVPALRATRRRDRLAASSSSASPFQTKIEKMVDLTQVMDDEVFMAFASYATIILSKMMLMSTATAFYRLTRKVFANPEDCVAFGKGENAKKYLRTDDRVERVRSHCKAVTISIFERQSQNGATNEVKSMLYRVQQL

SEQ ID NO: 911568 - protein, 149 aa, Homo sapiens
GRCLRPARAATVPALRATRRRDRLAASSSSASPFQTKIEKMVDLTQVMDDEVFMAFASYATIILSKMMLMSTATAFYRLTRKVFANPEDCVAFGKGENAKKYLRTDDRVERVRSLEWSRPLYSHPALQTICRSTDLPHHCIFDTPSPAK

SEQ ID NO: 911569 - protein, 86 aa, Homo sapiens; identical to SEQ ID NO: 911565

SEQ ID NO: 911570 - protein, 100 aa, Homo sapiens
GRCLRPARAATVPALRATRRRDRLAASSSSASPFQTKIEKMVDLTQVMDDEVFMAFASYATIILSKMMLMSTATAFYRLTRKGTGDLRPRKADSEEPTCK

SEQ ID NO: 911571 - protein, 146 aa, Homo sapiens; identical to SEQ ID NO: 911567

SEQ ID NO: 911572 - protein, 141 aa, Homo sapiens
GRCLRPARAATVPALRATRRRDRLAASSSSASPFQTKIEKMVDLTQVMDDEVFMAFASYATIILSKMMLMSTATAFYRLTRKVFANPEDCVAFGKGENAKKYLRTDDRVERVRRRSFVLVVQDGVQWHDLSSPQPLPPGFK

SEQ ID NO: 911573 - protein, 195 aa, Homo sapiens; identical to SEQ ID NO: 911558

SEQ ID NO: 911574 - protein, 155 aa, Homo sapiens; identical to SEQ ID NO: 911563

SEQ ID NO: 911575 - protein, 155 aa, Homo sapiens; identical to SEQ ID NO: 911563

SEQ ID NO: 911576 - protein, 169 aa, Homo sapiens [sequence omitted]

SEQ ID NO: 911577 - protein, 195 aa, Homo sapiens; identical to SEQ ID NO: 911558

SEQ ID NO: 911578 - protein, 195 aa, Homo sapiens; identical to SEQ ID NO: 911558

SEQ ID NO: 911579 - protein, 193 aa, Homo sapiens
SSSSSSIVLIILFFIFILQPQFLAFTGTTFAAFFPLAGVVSIAASSEVIFLIVIVILIIFVILIVLILWAGAAAAAFIAAGSISSSSSSSSSSSSSASPFQTKIEKMVDLTQVMDDEVFMAFASYATIILSKMMLMSTATAFYRLTRKVFANPEDCVAFGKGENAKKYLRTDDRVERVRRIKQTLSIYLASSI

SEQ ID NO: 911580 - protein, 509 aa, Homo sapiens
RPGLSFLLALLFFLGQAAGDLGDVGPPIPSPGFSSFPGVDSSSSFSSSSRSGSSSSRSLGSGGSVSQLFSNFTGSVDDRGTCQCSVSLPDTTFPVDRVERLEFTAHVLSQKFEKELSKVREYVQLISVYEKKLLNLTVRIDIMEKDTISYTELDFELIKVEVKEMEKLVIQLKESFGGSSEIVDQLEVEIRNMTLLVEKLETLDKNNVLAIRREIVALKTKLKECEASKDQNTPVVHPPPTPGSCGHGGVVNISKPSVVQLNWRGFSYLYGAWGRDYSPQHPNKGLYWVAPLNTDGRLLEYYRLYNTLDDLLLYINARELRITYGQGSGTAVYNNNMYVNMYNTGNIARVNLTTNTIAVTQTLPNAAYNNRFSYANVAWQDIDFAVDENGLWVIYSTEASTGNMVISKLNDTTLQVLNTWYTKQYKPSASNAFMVCGVLYATRTMNTRTEEIFYYYDTNTGKEGKLDIVMHKMQEKVQSINYNPFDQKLYVYNDGYLLNYDLSVLQKPQ

SEQ ID NO: 911581 - protein, 92 aa, Homo sapiens
TQRTTMTGELRASQPIARIMISYKDQEFSQEEAPAFSFLSLSTLLKVSRIFYLITSFQRQLRRLEPDLLTNSTPHQPPSTAYFKKINSFLWN

SEQ ID NO: 911582 - protein, 341 aa, Homo sapiens
PEPPGAVHTFPGHSLFSYMLAMGKSPLGTIRSPWALCRASGSSFSSSSRSGSSSSRSLGSGGSVSQLFSNFTGSVDDRGTCQCSVSLPDTTFPVDRVERLEFTAHVLSQKFEKELSKVREYVQLISVYEKKLLNLTVRIDIMEKDTISYTELDFELDQGSGTAVYNNNMYVNMYNTGNIARVNLTTNTIAVTQTLPNAAYNNRFSYANVAWQDIDFAVDENGLWVIYSTEASTGNMVISKLNDTTLQVLNTWYTKQYKPSASNAFMVCGVLYATRTMNTRTEEIFYYYDTNTGKEGKLDIVMHKMQEKVQSINYNPFDQKLYVYNDGYLLNYDLSVLQKPQ

SEQ ID NO: 911583 - protein, 275 aa, Homo sapiens
RPGLSFLLALLFFLGQAAGDLGDVGPPIPSPGFSSFPGVDSSSSFSSSSRSGSSSSRSLGSGGSVSQLFSNFTGSVDDRGTCQCSVSLPDTTFPVDRVERLEFTAHVLSQKFEKELSKVREYVQLISVYEKKLLNLTVRIDIMEKDTISYTELDFELIKVEVKEMEKLVIQLKESFGGSSEIVDQLEVEIRNMTLLVEKLETLDKNNVLAIRREIVALKTKLKECEASKDQNTPVVHPPPTPGSCGHGGVVNITSKQRTVLGGAIEYRWETVGVL

SEQ ID NO: 911584 - protein, 352 aa, Homo sapiens [sequence omitted]

SEQ ID NO: 911585 - protein, 352 aa, Homo sapiens [sequence omitted]

SEQ ID NO: 911586 - protein, 352 aa, Homo sapiens [sequence omitted]

SEQ ID NO: 911587 - protein, 335 aa, Homo sapiens
RRPTPAAPPPPPPPPPGLLFMWEYSTNYGQAPLSLLVSYTKSYLSMVGSCCTSASPTVCFLKERLQLKHLSLLTTLSNRVCSQYAAYGEKKSRLSNLIKLAQKVPTADLEDVLPLAEDITNILSKCCESASEDCMAKELPEHTVKLCDNLSTKNSKFEDCCQEKTAMDVFVCTYFMPAAQLPELPDVELPTNKDVCDPGNTKVMDKYTFELSRRTHLPEVFLSKVLEPTLKSLGECCDVEDSTTCFNAKGPLLKKELSSFIDKGQELCADYSENTFTEYKKKLAERLKAKLPDATPTELAKLVNKRSDFASNCCSINSPPLYCDSEIDAELKNIL

SEQ ID NO: 911588 - protein, 315 aa, Homo sapiens
MKSVRRSGKIQRNMLIISYTKSYLSMVGSCCTSASPTVCFLKERLQLKHLSLLTTLSNRVCSQYAAYGEKKSRLSNLIKLAQKVPTADLEDVLPLAEDITNILSKCCESASEDCMAKELPEHTVKLCDNLSTKNSKFEDCCQEKTAMDVFVCTYFMPAAQLPELPDVELPTNKDVCDPGNTKVMDKYTFELSRRTHLPEVFLSKVLEPTLKSLGECCDVEDSTTCFNAKGPLLKKELSSFIDKGQELCADYSENTFTEYKKKLAERLKAKLPDATPTELAKLVNKRSDFASNCCSINSPPLYCDSEIDAELKNIL

SEQ ID NO: 911589 - protein, 334 aa, Homo sapiens
MAALKHQPQEFPTYVEPTNDEICEAFRKDPKEYANQFMWEYSTNYGQAPLSLLVSYTKSYLSMVGSCCTSASPTVCFLKERLQLKHLSLLTTLSNRVCSQYAAYGEKKSRLSNLIKLAQKVPTADLEDVLPLAEDITNILSKCCESASEDCMAKELPEHTVKLCDNLSTKNSKFEDCCQEPELPDVELPTNKDVCDPGNTKVMDKYTFELSRRTHLPEVFLSKVLEPTLKSLGECCDVEDSTTCFNAKGPLLKKELSSFIDKGQELCADYSENTFTEYKKKLAERLKAKLPDATPTELAKLVNKRSDFASNCCSINSPPLYCDSEIDAELKNIL

SEQ ID NO: 911590 - protein, 317 aa, Homo sapiens
MAALKHQPQEFPTYVEPTNDEICEAFRKDPKEYANQFMWEYSTNYGQAPLSLLVSYTKSYLSMVGSCCTSASPTVCFLKERLQLKHLSLLTTLSNRVCSQYAAYGEKKSRLSNLIKLAQKVPTADLEDVLPLAEDITNILSKCCESASEDCMAKELPEHTVKLCDNLSTKNSKFEDCCQEKTAMDVFVCTYFMPAAQLPELPDVELPTNKDVCDPGNTKVMDKYTFELSRRTHLPEVFLSKVLEPTLKSLGECCDVEDSTTCFNAKGPLLKKELSSFIDKGQELCADYSENTFTEYKKKNWQSWLTSAQTLPPTAVP

SEQ ID NO: 911591 - protein, 303 aa, Homo sapiens
MAALKHQPQEFPTYVEPTNDEICEAFRKDPKEYANQFMWEYSTNYGQAPLSLLVSYTKSYLSMVGSCCTSASPTVCFLKERLQLKHLSLLTTLSNRVCSQYAAYGEKKSRLSNLIKLAQKVPTADLEDVLPLAEDITNILSKCCESASEDCMAKELPEHTVKLCDNLSTKNSKFEDCCQEKTAMDVFVCTYFMPAAQLPELPDVELPTNKDVCDPGNTKVMDKYTFELSRRTHLPEVFLSKVLEPTLKSLGECCDVEDSTTCFNAKGPLLKKELSSFIDKGQELCADYSENTFTEYKKKLMLN

SEQ ID NO: 911592 - protein, 228 aa, Homo sapiens
MAALKHQPQEFPTYVEPTNDEICEAFRKDPKEYANQFMWEYSTNYGQAPLSLLVSYTKSYLSMVGSCCTSASPTVCFLKERLQLKHLSLLTTLSNRVCSQYAAYGEKKSRLSNLIKLAQKVPTADLEDVLPLAEDITNILSKCCESASEDCMAKELPEHTVKLCDNLSTKNSKFEDCCQEKTAMDVFVCTYFMPAAQLPELPDVELPTNKDVCDPGNTKVMDKYTFEL

SEQ ID NO: 911593 - protein, 352 aa, Homo sapiens [sequence omitted]

SEQ ID NO: 911594 - protein, 352 aa, Homo sapiens [sequence omitted]

SEQ ID NO: 911595 - protein, 352 aa, Homo sapiens [sequence omitted]

SEQ ID NO: 911596 - protein, 335 aa, Homo sapiens
LYKFIIYNTYALPTTKLSLFMWEYSTNYGQAPLSLLVSYTKSYLSMVGSCCTSASPTVCFLKERLQLKHLSLLTTLSNRVCSQYAAYGEKKSRLSNLIKLAQKVPTADLEDVLPLAEDITNILSKCCESASEDCMAKELPEHTVKLCDNLSTKNSKFEDCCQEKTAMDVFVCTYFMPAAQLPELPDVELPTNKDVCDPGNTKVMDKYTFELSRRTHLPEVFLSKVLEPTLKSLGECCDVEDSTTCFNAKGPLLKKELSSFIDKGQELCADYSENTFTEYKKKLAERLKAKLPDATPTELAKLVNKRSDFASNCCSINSPPLYCDSEIDAELKNIL

SEQ ID NO: 911597 - protein, 352 aa, Homo sapiens [sequence omitted]

SEQ ID NO: 911598 - protein, 334 aa, Homo sapiens
MAALKHQPQEFPTYVEPTNDEICEAFRKDPKEYANQFMWEYSTNYGQAPLSLLVSYTKSYLSMVGSCCTSASPTVCFLKERLQLKHLSLLTTLSNRVCSQYAAYGEKKSRLSNLIKLAQKVPTADLEDVLPLAEDITNILSKCCESASEDCMAKELPEHTVKLCDNLSTKNSKFEDCCQEKTAMDVFVCTYFMPAAQLPELPDVELPTNKDVCDPGNTKVMDKYTFELSRRTHLPEVFLSKVLEPTLKGPLLKKELSSFIDKGQELCADYSENTFTEYKKKLAERLKAKLPDATPTELAKLVNKRSDFASNCCSINSPPLYCDSEIDAELKNIL

SEQ ID NO: 911599 - protein, 317 aa, Homo sapiens
MAALKHQPQEFPTYVEPTNDEICEAFRKDPKEYANQFMWEYSTNYGQAPLSLLVSYTKSYLSMVGSCCTSASPTVCFLKERLQLKHLSLLTTLSNRVCSQYAAYGEKKSRLSNLIKLAQKVPTADLEDVLPLAEDITNILSKCCESASEDCMAKELPEHTVKLCDNLSTKNSKFEDCCQEKTAMDVFVCTYFMPAAQLPELPDVELPTNKDVCDPGNTKVMDKYTFELSRRTHLPEVFLSKVLEPTLKSLGECCDVEDSTTCFNAKGPLLKKELSSFIDKGQELCADYSDFASNCCSINSPPLYCDSEIDAELKNIL

SEQ ID NO: 911600 - protein, 140 aa, Homo sapiens [sequence omitted]

SEQ ID NO: 911601 - protein, 140 aa, Homo sapiens [sequence omitted]

SEQ ID NO: 911602 - protein, 140 aa, Homo sapiens [sequence omitted]

SEQ ID NO: 911603 - protein, 140 aa, Homo sapiens [sequence omitted]

SEQ ID NO: 911604 - protein, 36 aa, Homo sapiens
MAEMNPAQMESCCVVTQAGVQWHDLGSLQPAPPGFK

SEQ ID NO: 911605 - protein, 402 aa, Homo sapiens
MAEMNPAQGHVVFEDVAIYFSQEEWGHLDEAQRLLYRDVMLENLALLSSLGCCHGAEDEEAPLEPGVSVGVSQVMAPKPCLSTQNTQPCETCSSLLKDILRLAEHDGTHPEQGLYTCPAHLHQHQKEQIREKLSRGDGGRPTFVKNHRVHMAGKTFLCSECGKAFSHKHKLSDHQKIHTGERTYKCSKCGILFMERSTLNRHQRTHTGERPYECNECGKAFLCKSHLVRHQTIHSGERPYECSECGKLFMWSSTLITHQRVHTGKRPYGCSECGKFFKCNSNLFRHYRIHTGKRSYGCSECGKFFMERSTLSRHQRVHTGERPYECNECGKFFSLKSVLIQHQRVHTGERPYECSECGKAFLTKSHLICHQTVHTAAKQCSECGKFFRYNSTLLRHQKVHTG

SEQ ID NO: 911606 - protein, 148 aa, Homo sapiens
MNIKGSPWKAGSLLLLLVSNLLLCQSVAPLPICPGGAARCQVTLRDLFDRAVVLSHYIHNLSSEMFSEFDKRYTHGRGFITKAINSCHTSSLATPEDKEQAQQMNQKDFLSLIVSILRSWNEPLYHLVTEVPWYARSPGGYPIQSCRD

SEQ ID NO: 911607 - protein, 108 aa, Homo sapiens
MSLCIIWSRKYRGMQEAPEAILSKAVEIEEQTKRLLEGMELIVSQVHPETKENEIYPVWSGLPSLQMADEESRLSAYYNLLHCLRRDSHKIDNYLKLLKCRIIHNNNC

SEQ ID NO: 911608 - protein, 152 aa, Homo sapiens
GINHLRVARVLIEAGSLLLLLVSNLLLCQSVAPLPICPGGAARCQVTLRDLFDRAVVLSHYIHNLSSEMFSEFDKRYTHGRGFITKAINSCHTSSLATPEDKEQAQQMNQKDFLSLIVSILRSWNEPLYHLVTEVPWYARSPGGYPIQSCRD

SEQ ID NO: 911609 - protein, 148 aa, Homo sapiens; identical to SEQ ID NO: 911606

SEQ ID NO: 911610 - protein, 148 aa, Homo sapiens; identical to SEQ ID NO: 911606

SEQ ID NO: 911611 - protein, 148 aa, Homo sapiens; identical to SEQ ID NO: 911606

SEQ ID NO: 911612 - protein, 148 aa, Homo sapiens; identical to SEQ ID NO: 911606

SEQ ID NO: 911613 - protein, 148 aa, Homo sapiens; identical to SEQ ID NO: 911606

SEQ ID NO: 911614 - protein, 148 aa, Homo sapiens; identical to SEQ ID NO: 911606

SEQ ID NO: 911615 - protein, 148 aa, Homo sapiens; identical to SEQ ID NO: 911606

SEQ ID NO: 911616 - protein, 148 aa, Homo sapiens; identical to SEQ ID NO: 911606

SEQ ID NO: 911617 - protein, 154 aa, Homo sapiens
  misc_feature (10)..(10): Xaa can be any naturally occurring amino acid
MAGITNMNIXRDSPWKGSLLLLLVSNLLLCQSVAPLPICPGGAARCQVTLRDLFDRAVVLSHYIHNLSSEMFSEFDKRYTHGRGFITKAINSCHTSSLATPEDKEQAQQMNQKDFLSLIVSILRSWNEPLYHLVTEVPWYARSPGGYPIQSCRD

SEQ ID NO: 911618 - protein, 108 aa, Homo sapiens; identical to SEQ ID NO: 911607

SEQ ID NO: 911619 - protein, 148 aa, Homo sapiens; identical to SEQ ID NO: 911606

SEQ ID NO: 911620 - protein, 148 aa, Homo sapiens; identical to SEQ ID NO: 911606

SEQ ID NO: 911621 - protein, 148 aa, Homo sapiens; identical to SEQ ID NO: 911606

SEQ ID NO: 911622 - protein, 148 aa, Homo sapiens; identical to SEQ ID NO: 911606

SEQ ID NO: 911623 - protein, 148 aa, Homo sapiens; identical to SEQ ID NO: 911606

SEQ ID NO: 911624 - protein, 148 aa, Homo sapiens; identical to SEQ ID NO: 911606

SEQ ID NO: 911625 - protein, 148 aa, Homo sapiens; identical to SEQ ID NO: 911606

SEQ ID NO: 911626 - protein, 108 aa, Homo sapiens; identical to SEQ ID NO: 911607

SEQ ID NO: 911627 - protein, 108 aa, Homo sapiens; identical to SEQ ID NO: 911607

SEQ ID NO: 911628 - protein, 108 aa, Homo sapiens
MNIKGSPWKAGSLLLLLVSNLLLCQSVAPLPICPGGAARCQVTLRDLFDRAVVLSHYIHNLSSEMFSEFDKRYTHGRGFITKAINSCHTSSLATPEDKEQAQQMNQTF

SEQ ID NO: 911629 - protein, 108 aa, Homo sapiens; identical to SEQ ID NO: 911607

SEQ ID NO: 911630 - protein, 108 aa, Homo sapiens; identical to SEQ ID NO: 911607

SEQ ID NO: 911631 - protein, 108 aa, Homo sapiens; identical to SEQ ID NO: 911607

SEQ ID NO: 911632 - protein, 148 aa, Homo sapiens; identical to SEQ ID NO: 911606

SEQ ID NO: 911633 - protein, 148 aa, Homo sapiens; identical to SEQ ID NO: 911606

SEQ ID NO: 911634 - protein, 148 aa, Homo sapiens; identical to SEQ ID NO: 911606

SEQ ID NO: 911635 - protein, 148 aa, Homo sapiens; identical to SEQ ID NO: 911606

SEQ ID NO: 911636 - protein, 148 aa, Homo sapiens; identical to SEQ ID NO: 911606

SEQ ID NO: 911637 - protein, 148 aa, Homo sapiens; identical to SEQ ID NO: 911606

SEQ ID NO: 911638 - protein, 148 aa, Homo sapiens; identical to SEQ ID NO: 911606

SEQ ID NO: 911639 - protein, 148 aa, Homo sapiens; identical to SEQ ID NO: 911606

SEQ ID NO: 911640 - protein, 148 aa, Homo sapiens; identical to SEQ ID NO: 911606

SEQ ID NO: 911641 - protein, 152 aa, Homo sapiens
MSLCIIWSRKYRGMQEAPEAILSKAVEIEEQTKRLLEGMELIVSQVHPETKENEIYPVWSGLPSLQMADEESRLSAYYNLLHCLRRDSHKIDNYLKLPSPEGEHPTTGSPTITNREAKKPGAPRTLNAGDKPLKGADHSHTGRATRMGGRGR

SEQ ID NO: 911642 - protein, 148 aa, Homo sapiens; identical to SEQ ID NO: 911606

SEQ ID NO: 911643 - protein, 148 aa, Homo sapiens; identical to SEQ ID NO: 911606

SEQ ID NO: 911644 - protein, 139 aa, Homo sapiens
MNIKGSPWKAGSLLLLLVSNLLLCQSVAPLPICPGGAARCQVTLRDLFDRAVVLSHYIHNDKRYTHGRGFITKAINSCHTSSLATPEDKEQAQQMNQKDFLSLIVSILRSWNEPLYHLVTEVPWYARSPGGYPIQSCRD

SEQ ID NO: 911645 - protein, 148 aa, Homo sapiens; identical to SEQ ID NO: 911606

SEQ ID NO: 911646 - protein, 79 aa, Homo sapiens
GSVRAVLLAGGVKMAARGVRFEDGAVFLAACSSGDTDEVRKLLARGADINTVNVDGLTALHQVTPFLVLEASSLLQMRL

SEQ ID NO: 911647 - protein, 170 aa, Homo sapiens
RERAGGTTGGRSKDGGARVSALCSGLKRSERGGSGNSSPNSNLVLVVLAAAAEAGAMAELEHLGGKRAESARMRRAEQLRRWRGSLTEQEPAERRGAGRQPLTRRGSPRVRFEDGAVFLAACSSGDTDEVRKLLARGADINTVNVDGLTALHQVTPFLVLEASSLLQMRL

SEQ ID NO: 911648 - protein, 224 aa, Homo sapiens
MDKNENEEADLDEQSSKRLSIRERRRPKERRRGTGINFWTKDEDETDGSEEVKETWHERLSRLESGGSNPTTSDSYGDRASARARREAREARLATLTSRVEEDSNRDYKKLYESALTENQKLKTKLQEAQLELADIKSKLEKVAQQKQEKTSDRSSVLEMEKRERRALERKMSEMEEEMKNLHQLKQIQTLKQMNEQLQAENRALTRVVARLSESIESSDTQEL

SEQ ID NO: 911649 - protein, 208 aa, Homo sapiens
MDKNENEEADLDEQSSKRLSIRERRRPKERRRGTGINFWTKDEDETDGSEEVKETWHERLSRLESGGSNPTTSDSYGDRASARARREAREARLATLTSRVEEDSNRDYKKLYESALTENQKLKTKLQEAQLELADIKSKLEKVAQQKQEKTSDRSSVLEMEKRERRALERKMSEMEEEMKVLTELKSDNQRLKDENGALIRVISKLSK

SEQ ID NO: 911650 - protein, 105 aa, Homo sapiens
GAGAPSGFDDAPSRWARSSIRNVHSIHQRSRKRLSQDAYRRNSVRFLQQRRRQARPGPQSPGSPLEEERQTQRSKPQPAVPPRPSADLILNRCSESTKRKLASAV

SEQ ID NO: 911651 - protein, 322 aa, Homo sapiens [sequence omitted]

SEQ ID NO: 911652 - protein, 442 aa, Homo sapiens
KARYEAGVKSADQSWGTPSSVTSPCWALRSASYPASTMYMFLVKWQDLSEKVVYRRFTEIYEFHKTLKEMFPIEAGAINPENRIIPHLPAPKWFDGQRAAENHQGTLTEYCSTLMSLPTKISRCPHLLDFFKVRPDDLKLPTDNQTKKPETYLMPKDGKSTATDITGPIILQTYRAIANYEKTSGSEMALSTGDVVEVVEKSESGWWFCQMKAKRGWIPASFLEPLDSPDETEDPEPNYAGEPYVAIKAYTAVEGDEVSLLEGEAVEVIHKLLDGWWVISKYLSPAVTWICYPPPLPRLWKDCWKGLSCTDQETEAQQRKDDVTGYFPSMYLQKSGQDVSQAQRQIKRGAPPRRSSIRNVHSIHQRSRKRLSQDAYRRNSVRFLQQRRRQARPGPQSPGSPLEEERQTQRSKPQPAVPPRPSADLILNRCSESTKRKLASAV

SEQ ID NO: 911653 - protein, 322 aa, Homo sapiens [sequence omitted]

SEQ ID NO: 911654 - protein, 473 aa, Homo sapiens
KARYEAGVKSADQSWGTPSSVTSPCWALRSASYPASTMYMFLVKWQDLSEKVVYRRFTEIYEFHRWDFAMLPRLVSNSWTQVILPPQLPKLLGLQKTLKEMFPIEAGAINPENRIIPHLPAPKWFDGQRAAENHQGTLTEYCSTLMSLPTKISRCPHLLDFFKVRPDDLKLPTDNQTKKPETYLMPKDGKSTATDITGPIILQTYRAIANYEKTSGSEMALSTGDVVEVVEKSESGWWFCQMKAKRGWIPASFLEPLDSPDETEDPEPNYAGEPYVAIKAYTAVEGDEVSLLEGEAVEVIHKLLDGWWVISKYLSPAVTWICYPPPLPRLWKDCWKGLSCTDQETEAQQRKDDVTGYFPSMYLQKSGQDVSQAQRQIKRGAPPRRSSIRNVHSIHQRSRKRLSQDAYRRNSVRFLQQRRRQARPGPQSPGSPLEEERQTQRSKPQPAVPPRPSADLILNRCSESTKRKLASAV

SEQ ID NO: 911655 - protein, 442 aa, Homo sapiens; identical to SEQ ID NO: 911652

SEQ ID NO: 911656 - protein, 113 aa, Homo sapiens [sequence omitted]

SEQ ID NO: 911657 - protein, 126 aa, Homo sapiens
KARYEAGVKSADQSWGTPSSVTSPCWALRSASYPASTMYMFLVKWQDLSEKVVYRRFTEIYEFHKTLKEMFPIEAGAINPENRIIPHLPAPKWFDGQRAAENHQGTLTEYCSTLMSLPTHKVGGIL

SEQ ID NO: 911658 - protein, 254 aa, Homo sapiens [sequence omitted]

SEQ ID NO: 911659 - protein, 403 aa, Homo sapiens
KARYEAGVKSADQSWGTPSSVTSPCWALRSASYPASTMYMFLVKWQDLSEKVVYRRFTEIYEFHKTLKEMFPIEAGAINPENRIIPHLPAPKWFDGQRAAENHQGTLTEYCSTLMSLPTKISRCPHLLDFFKVRPDDLKLPTDNQTKKPETYLMPKDGKSTATDITGPIILQTYRAIANYEKTSGSEMALSTGDVVEVVEKSESGWWFCQMKAKRGWIPASFLEPLDSPDETEDPEPNYAGEPYVAIKAYTAVEGDEVSLLEGEAVEVIHKLLDGWWVIRKDDVTGYFPSMYLQKSGQDVSQAQRQIKRGAPPRRSSIRNVHSIHQRSRKRLSQDAYRRNSVRFLQQRRRQARPGPQSPGSPLEEERQTQRSKPQPAVPPRPSADLILNRCSESTKRKLASAV

SEQ ID NO: 911660 - protein, 322 aa, Homo sapiens [sequence omitted]

SEQ ID NO: 911661 - protein, 320 aa, Homo sapiens
MFLVKWQDLSEKVVYRRFTEIYEFHKTLKEMFPIEAGAINPENRIIPHLPAPKWFDGQRAAENHQGTLTEYCSTLMSLPTKISRCPHLLDFFKVRPDDLKLPTDNQTKKPETYLMPKDGKSTATDITGPIILQTYRAIANYEKTSGSEMALSTGDVVEVVEKSESGWWFCQMKAKRGWIPASFLEPLDSPDETEDPEPNYAGEPYVAIKAYTAVEGDEVSLLEGEAVEERRRHRLLPVHVPAKVRARRVPGPTPDQAGGAAPQVVHPQRAQHPPAVAEAPQPGRLSPQQRPFSAAATPPGAAGTAEPREPARGGAADAAL

SEQ ID NO: 911662 - protein, 328 aa, Homo sapiens
MSLPTKISRCPHLLDFFKVRPDDLKLPTDNQTKKPETYLMPKDGKSTATDITGPIILQTYRAIANYEKTSGSEMALSTGDVVEVVEKSESGWWFCQMKAKRGWIPASFLEPLDSPDETEDPEPNYAGEPYVAIKAYTAVEGDEVSLLEGEAVEVIHKLLDGWWVISKYLSPAVTWICYPPPLPRLWKDCWKGLSCTDQETEAQQRKDDVTGYFPSMYLQKSGQDVSQAQRQIKRGAPPRRSSIRNVHSIHQRSRKRLSQDAYRRNSVRFLQQRRRQARPGPQSPGSPLEEERQTQRSKPQPAVPPRPSADLILNRCSESTKRKLASAV

SEQ ID NO: 911663 - protein, 176 aa, Homo sapiens
KARYEAGVKSADQSWGTPSSVTSPCWALRSASYPASTMYMFLVKWQDLSEKVVYRRFTEIYEFHDKKARDILDAQRWQEYRDRHHRPHHPADVPRHCQLREDLGLRDGSVHGGRGGGRGEERERSDLPPYGAPSPGAQEPTATSPLPRLRQPGPWEDSSSVRGPKCPPHTVGRLLS

SEQ ID NO: 911664 - protein, 139 aa, Homo sapiens
MSKSQHSIHTTDNREPNMSDSIPMLQREEILGINFKGCEGPFKENSKPLLKEIKEDTNKWKNIPCSWVGRINSVKMAILPKVIYRFNAIPIKLPMTFFTELEKTTLKFIWNQKRARIAKSILSHDIPEEDSELLLGRLL

SEQ ID NO: 911665 - protein, 474 aa, Homo sapiens
MRRVVRQSKFRHVFGQAVKNDQCYDDIRVSRVTWDSSFCAVNPRFVAIIIEASGGGAFLVLPLHKTGRIDKSYPTVCGHTGPVLDIDWCPHNDQVIASGSEDCTVMVWQIPENGLTLSLTEPVVILEGHSKRVGIVAWHPTARNVLLSAGCDNAIIIWNVGTGEALINLDDMHSDMIYNVSWNRNGSLICTASKDKKVRVIDPRKQEIVAEKEKAHEGARPMRAIFLADGNVFTTGFSRMSERQLALWNPKNMQEPIALHEMDTSNGVLLPFYDPDTSIIYLCGKGDSSIRYFEITDESPYVHYLNTFSSKEPQRGMGYMPKRGLDVNKCEIARFFKLHERKCEPIIMTVPRKSDLFQDDLYPDTAGPEAALEAEEWFEGKNADPILISLKHGYIPGKNRDLKVVKKNILDSKPTANKKCDLISIPKKTTDTASVQNEAKLDEILKEIKSIKDTICNQDERISKLEQQMAKIAA

SEQ ID NO: 911666 - protein, 474 aa, Homo sapiens; identical to SEQ ID NO: 911665

SEQ ID NO: 911667 - protein, 474 aa, Homo sapiens; identical to SEQ ID NO: 911665

SEQ ID NO: 911668 - protein, 331 aa, Homo sapiens
MVLPVLGCDNAIIIWNVGTGEALINLDDMHSDMIYNVSWNRNGSLICTASKDKKVRVIDPRKQEIVAEKEKAHEGARPMRAIFLADGNVFTTGFSRMSERQLALWNPKNMQEPIALHEMDTSNGVLLPFYDPDTSIIYLCGKGDSSIRYFEITDESPYVHYLNTFSSKEPQRGMGYMPKRGLDVNKCEIARFFKLHERKCEPIIMTVPRKSDLFQDDLYPDTAGPEAALEAEEWFEGKNADPILISLKHGYIPGKNRDLKVVKKNILDSKPTANKKCDLISIPKKTTDTASVQNEAKLDEILKEIKSIKDTICNQDERISKLEQQMAKIAA

SEQ ID NO: 911669 - protein, 474 aa, Homo sapiens; identical to SEQ ID NO: 911665

SEQ ID NO: 911670 - protein, 68 aa, Homo sapiens
RIMAVPECRGSKKCDLISIPKKTTDTASVQNEAKLDEILKEIKSIKDTICNQDERISKLEQQMAKIAA

SEQ ID NO: 911671 - protein, 494 aa, Homo sapiens
MRRVVRQSKFRHVFGQAVKNDQCYDDIRVSRVTWDSSFCAVNPRFVAIIIEASGGGAFLVLPLHKTGRIDKSYPTVCGHTGPVLDIDWCPHNDQVIASGSEDCTVMVWQIPENGLTLSLTEPVVILEGHSKRVGIVAWHPTARNVLLSAGCDNAIIIWNVGTGEALINLDDMHSDMIYNVSWNRNGSLICTASKDKKVRVIDPRKQEIVAEKEKAHEGARPMRAIFLADGNVFTTGFSRMSERQLALWNPKNMQEPIALHEMDTSNGVLLPFYDPDTSIIYLCGKGDSSIRYFEITDESPYVHYLNTFSSKEPQRGMGYMPKRGLDVNKCEIARFFKLHERKCEPIIMTVPRKSDLFQDDLYPDTAGPEAALEAEEWFEGKNADPILISLKHGYIPGKNRDLKVVKKNILDSKPTANKKCDLISIPKKTTDTASVQNEAKLDEILKEIKSIKDTICNQDERISKLEQQMAKIATRRSNTHCAEMKADKESVEEI

SEQ ID NO: 911672 - protein, 142 aa, Homo sapiens
MVLQLSCSVYFVLLCRKPSTCGNSNNVEQLRENDKRIMKNNIYMRRTFIVKLHKKTGNQVEGLSVIEREMCSAIGTTKGILAHARAGVGMGLAGNVCMQGARVRAECGDSRTWSNVRVEKGPCSYPANTGSAVSTISGHLNV

SEQ ID NO: 911673 - protein, 312 aa, Homo sapiens
MRRVVRQSKFRHVFGQAVKNDQCYDDIRVSRVTWDSSFCAVNPRFVAIIIEASGGGAFLVLPLHKTGRIDKSYPTVCGHTGPVLDIDWCPHNDQVIASGSEDCTVMVWQIPENGLTLSLTEPVVILEGHSKRVGIVAWHPTARNVLLSAGCDNAIIIWNVGTGEALINLDDMHSDMIYNVSWNRNGSLICTASKDKKVRVIDPRKQEIVAEKGEKPLKAKTMTTIFLCRWTMFFNNRVTDRIRPEQVTWGIFWHSRTKVMQETKWSTLPDVTLTNGASCTRHPNNHSTRNNWISSTTFEANTNIEKIAISGI

SEQ ID NO: 911674 - protein, 312 aa, Homo sapiens; identical to SEQ ID NO: 911673

SEQ ID NO: 911675 - protein, 474 aa, Homo sapiens; identical to SEQ ID NO: 911665

SEQ ID NO: 911676 - protein, 474 aa, Homo sapiens; identical to SEQ ID NO: 911665

SEQ ID NO: 911677 - protein, 406 aa, Homo sapiens
DSSRILWPRGFLGPVLDIDWCPHNDQVIASGSEDCTVMVWQIPENGLTLSLTEPVVILEGHSKRVGIVAWHPTARNVLLSAGCDNAIIIWNVGTGEALINLDDMHSDMIYNVSWNRNGSLICTASKDKKVRVIDPRKQEIVAEKEKAHEGARPMRAIFLADGNVFTTGFSRMSERQLALWNPKNMQEPIALHEMDTSNGVLLPFYDPDTSIIYLCGKGDSSIRYFEITDESPYVHYLNTFSSKEPQRGMGYMPKRGLDVNKCEIARFFKLHERKCEPIIMTVPRKSDLFQDDLYPDTAGPEAALEAEEWFEGKNADPILISLKHGYIPGKNRDLKVVKKNILDSKPTANKKCDLISIPKKTTDTASVQNEAKLDEILKEIKSIKDTICNQDERISKLEQQMAKIAA

SEQ ID NO: 911678 - protein, 474 aa, Homo sapiens; identical to SEQ ID NO: 911665

SEQ ID NO: 911679 - protein, 474 aa, Homo sapiens; identical to SEQ ID NO: 911665

SEQ ID NO: 911680 - protein, 392 aa, Homo sapiens
RAARGRGLRAVAGAVAAARAPPPHGAQCQAGGGSGWRLRPALQRGLRRRRLRHLGPDTMRRVVRQSKFRHVFGQAVKNDQCYDDIRVSRVTWDSSFCAVNPRFVAIIIEASGGGAFLVLPLHKTGRIDKSYPTVCGHTGPVLDIDWCPHNDQVIASGSEDCTVMVWQIPENGLTLSLTEPVVILEGHSKRVGIVAWHPTARNVLLSAGCDNAIIIWNVGTGEALINLDDMHSDMIYNVSWNRNGSLICTASKDKKVRVIDPRKQEIVAEKEKAHEGARPMRAIFLADGNVFTTGFSRMSERQLALWNPKNMQEPIALHEMDTSNGVLLPFYDPDTSIIYLCGKGDSSIRYFEITDESPYVHYLNTFSSKEPQRGMGYMPKRGLDVNKCEIAR

SEQ ID NO: 911681 - protein, 1688 aa, Homo sapiens
MKLRGVSLAAGLFLLALSLWGQPAEAAACYGCSPGSKCDCSGIKGEKGERGFPGLEGHPGLPGFPGPEGPPGPRGQKGDDGIPGPPGPKGIRGPPGLPGFPGTPGLPGMPGHDGAPGPQGIPGCNGTKGERGFPGSPGFPGLQGPPGPPGIPGMKGEPGSIIMSSLPGPKGNPGYPGPPGIQGLPGPTGIPGPIGPPGPPGLMGPPGPPGLPGPKGNMGLNFQGPKGEKGEQGLQGPPGPPGQISEQKRPIDVEFQKGDQGLPGDRGPPGPPGIRGPPGPPGGEKGEKGEQGEPGKRGKPGKDGENGQPGIPGLPGDPGYPGEPGRDGEKGQKGDTGPPGPPGLVIPRPGTGITIGEKGNIGLPGLPGEKGERGFPGIQGPPGLPGPPGAAVMGPPGPPGFPGERGQKGDEGPPGISIPGPPGLDGQPGAPGLPGPPGPAGPHIPPSDEICEPGPPGPPGSPGDKGLQGEQGVKGDKGDTCFNCIGTGISGPPGQPGLPGLPGPPGSLGFPGQKGEKGQAGATGPKGLPGIPGAPGAPGFPGSKGEPGDILTFPGMKGDKGELGSPGAPGLPGLPGTPGQDGLPGLPGPKGEPGGITFKGERGPPGNPGLPGLPGNIGPMGPPGFGPPGPVGEKGIQGVAGNPGQPGIPGPKGDPGQTITQPGKPGLPGNPGRDGDVGLPGDPGLPGQPGLPGIPGSKGEPGIPGIGLPGPPGPKGFPGIPGPPGAPGTPGRIGLEGPPGPPGFPGPKGEPGFALPGPPGPPGLPGFKGALGPKGDRGFPGPPGPPGRTGLDGLPGPKGDVGPNGQPGPMGPPGLPGIGVQGPPGPPGIPGPIGQPGLHGIPGEKGDPGPPGLDVPGPPGERGSPGIPGAPGPIGPPGSPGLPGKAGASGFPGTKGEMGMMGPPGPPGPLGIPGRSGVPGLKGDDGLQGQPGLPGPTGEKGSKGEPGLPGPPGPMDPNLLGSKGEKGEPGLPGIPGVSGPKGYQGLPGDPGQPGLSGQPGLPGPPGPKGNPGLPGQPGLIGPPGLKGTIGDMGFPGPQGVEGPPGPSGVPGQPGSPGLPGQKGDKGDPGISSIGLPGLPGPKGEPGLPGYPGNPGIKGSVGDPGLPGLPGTPGAKGQPGLPGFPGTPGPPGPKGISGPPGNPGLPGEPGPVGGGGHPGQPGPPGEKGKPGQDGIPGPAGQKGEPGQPGFGNPGPPGLPGLSGQKGDGGLPGIPGNPGLPGPKGEPGFHGFPGVQGPPGPPGSPGPALEGPKGNPGPQGPPGRPGYEGLPGPEGPPGLPGNGGIKGEKGNPGQPGLPGLPGLKGDQGPPGLQGNPGRPGLNGMKGDPGLPGVPGFPGMKGPSGVPGSAGPEGEPGLIGPPGPPGLPGPSGQSIIIKGDAGPPGIPGQPGLKGLPGPQGPQGLPGPTGPPGDPGRNGLPGFDGAGGRKGDPGLPGQPGTRGLDGPPGPDGLQGPPGPPGTSSVAHGFLITRHSQTTDAPQCPQGTLQVYEGFSLLYVQGNKRAHGQDLGTAGSCLRRFSTMPFMFCNINNVCNFASRNDYSYWLSTPEPMPMSMQPLKGQSIQPFISRCAVCEAPAVVIAVHSQTIQIPHCPQGWDSLWIGYSFMMHTSAGAEGSGQALASPGSCLEEFRSAPFIECHGRGTCNYYANSYSFWLATVDVSDMFSKPQSETLKAGDLRTRISRCQVCMKRT

SEQ ID NO: 911682 - protein, 1688 aa, Homo sapiens; identical to SEQ ID NO: 911681

SEQ ID NO: 911683 - protein, 1069 aa, Homo sapiens
MGPPGFGPPGPVGEKGIQGVAGNPGQPGIPGPKGDPGQTITQPGKPGLPGNPGRDGDVGLPGDPGLPGQPGLPGIPGSKGEPGIPGIGLPGPPGPKGFPGIPGPPGAPGTPGRIGLEGPPGPPGFPGPKGEPGFALPGPPGPPGLPGFKGALGPKGDRGFPGPPGPPGRTGLDGLPGPKGDVGPNGQPGPMGPPGLPGIGVQGPPGPPGIPGPIGQPGLHGIPGEKGDPGPPGLDVPGPPGERGSPGIPGAPGPIGPPGSPGLPGKAGASGFPGTKGEMGMMGPPGPPGPLGIPGRSGVPGLKGDDGLQGQPGLPGPTGEKGSKGEPGLPGPPGPMDPNLLGSKGEKGEPGLPGIPGVSGPKGYQGLPGDPGQPGLSGQPGLPGPPGPKGNPGLPGQPGLIGPPGLKGTIGDMGFPGPQGVEGPPGPSGVPGQPGSPGLPGQKGDKGDPGISSIGLPGLPGPKGEPGLPGYPGNPGIKGSVGDPGLPGLPGTPGAKGQPGLPGFPGTPGPPGPKGISGPPGNPGLPGEPGPVGGGGHPGQPGPPGEKGKPGQDGIPGPAGQKGEPGQPGFGNPGPPGLPGLSGQKGDGGLPGIPGNPGLPGPKGEPGFHGFPGVQGPPGPPGSPGPALEGPKGNPGPQGPPGRPGYKGLPGPEGPPGLPGNGGIKGEKGNPGQPGLPGLPGLKGDQGPPGLQGNPGRPGLNGMKGDPGLPGVPGFPGMKGPSGVPGSAGPEGEPGLIGPPGPPGLPGPSGQSIIIKGDAGPPGIPGQPGLKGLPGPQGPQGLPGPTGPPGDPGRNGLPGFDGAGGRKGDPGLPGQPGTRGLDGPPGPDGLQGPPGPPGTSSVAHGFLITRHSQTTDAPQCPQGTLQVYEGFSLLYVQGNKRAHGQDLGTAGSCLRRFSTMPFMFCNINNVCNFASRNDYSYWLSTPEPMPMSMQPLKGQSIQPFISRCAVCEAPAVVIAVHSQTIQIPHCPQGWDSLWIGYSFMMHTSAGAEGSGQALASPGSCLEEFRSAPFIECHGRGTCNYYANSYSFWLATVDVSDMFSKPQSETLKAGDLRTRISRCQVCMKRT

SEQ ID NO: 911684 - protein, 1670 aa, Homo sapiens
MKLRGVSLAAGLFLLALSLWGQPAEAAACYGCSPGSKCDCSGIKGEKGERGFPGLEGHPGLPGFPGPEGPPGPRGQKGDDGIPGPPGPKGIRGPPGLPGFPGTPGLPGMPGHDGAPGPQGIPGCNGTKGERGFPGSPGFPGLQGPPGPPGIPGMKGEPGSIIMSSLPGPKGNPGYPGPPGIQGLPGPTGIPGPIGPPGPPGLMGPPGPPGLPGPKGNMGLNFQGPKGEKGEQGLQGPPGPPGQISEQKRPIDVEFQKGDQGLPGDRGPPGPPGIRGPPGPPGGEKGEKGEQGEPGKRGKPGKDGENGQPGIPGLPGDPGYPGEPGRDGEKGQKGDTGPPGPPGLVIPRPGTGITIGEKGNIGLPGLPGEKGERGFPGIQGPPGLPGPPGAAVMGPPGPPGFPGERGQKGDEGPPGISIPGPPGLDGQPGAPGLPGPPGPAGPHIPPSDEICEPGPPGPPGSPGDKGLQGEQGVKGDKGDTCFNCIGTGISGPPGQPGLPGLPGPPGSLGFPGQKGEKGQAGATGPKGLPGIPGAPGAPGFPGSKGEPGDILTFPGMKGDKGELGSPGAPGLPGLPGTPGQDGLPGLPGPKGEPGGITFKGERGPPGNPGLPGLPGNIGPMGPPGFGPPGPVGEKGIQGVAGNPGQPGIPGPKGDPGQTITQPGKPGLPGNPGRDGDVGLPGDPGLPGQPGLPGIPGSKGEPGIPGIGLPGPPGPKGFPGIPGPPGAPGTPGRIGLEGPPGPPGFPGPKGEPGFALPGPPGPPGLPGFKGALGPKGDRGFPGPPGPPGRTGLDGLPGPKGDVGPNGQPGPMGPPGLPGIGVQGPPGPPGIPGPIGQPGLHGIPGEKGDPGPPGLDVPGPPGERGSPGIPGAPGPIGPPGSPGLPGKAGASGFPGTKGEMGMMGPPGPPGPLGIPGRSGVPGLKGDDGLQGQPGLPGPTGEKGSKGEPGLPGPPGPMDPNLLGSKGEKGEPGLPGIPGVSGPKGYQGLPGDPGQPGLSGQPGLPGPPGPKGNPGLPGQPGLIGPPGLKGTIGDMGFPGPQGVEGPPGPSGVPGQPGSPGLPGQKGDKGDPGISSIGLPGLPGPKGEPGLPGYPGNPGIKGSVGDPGLPGLPGTPGAKGQPGLPGFPGTPGPPGPKGISGPPGNPGLPGEPGPVGGGGHPGQPGPPGEKGKPGQDGIPGPAGQKGEPGQPGFGNPGPPGLPGLSGQKGDGGLPGIPGNPGLPGPKGEPGFHGFPGVQGPPGPPGSPGPALEGPKGNPGPQGPPGRPGYEGLPGPEGPPGLPGNGGIKGEKGNPGQPGLPGLPGLKGDQGPPGLQGNPGRPGLNGMKGDPGLPGVPGFPGMKGPSGVPGSAGPEGEPGLIGPPGPPGLPGPSGQSIIIKGDAGPPGIPGQPGLKGLPGPQGPQGLPGPTGPPGDPGRNGLPGFDGAGGRKGDPGLPGQPGTRGLDGPPGPDGLQGPPGPPGTSSVAHGFLITRHSQTTDAPQCPQGTLQVYEGFSLLYVQGNNTMPFMFCNINNVCNFASRNDYSYWLSTPEPMPMSMQPLKGQSIQPFISRCAVCEAPAVVIAVHSQTIQIPHCPQGWDSLWIGYSFMMHTSAGAEGSGQALASPGSCLEEFRSAPFIECHGRGTCNYYANSYSFWLATVDVSDMFSKPQSETLKAGDLRTRISRCQVCMKRT

SEQ ID NO: 911685 - protein, 170 aa, Homo sapiens
MPFMFCNINNVCNFASRNDYSYWLSTPEPMPMSMQPLKGQSIQPFISRCAVCEAPAVVIAVHSQTIQIPHCPQGWDSLWIGYSFMMHTSAGAEGSGQALASPGSCLEEFRSAPFIECHGRGTCNYYANSYSFWLATVDVSDMFSKPQSETLKAGDLRTRISRCQVCMKRT
